United States Patent Application Publication US 2011/0183924 A1 - sequence listing, part 86

SEQ ID NO: 291926 - DNA, 2586 bp, Homo sapiens
tcggaaggggccaggagacactggaaggtccggacggcagggaaggggacggggttctttccagtcccacccgtgtagggacacctctccccctcatcccccgatgtaccctcgctgaatctgggatgggagagacgaaccgagtctaggcatctgcgtagcagcgccggggagagcggggagcccaggcggagcccagtcgactcccggattcccctgccccgcccccggcacgaggccccgccccggcgccccgcccctcctcgggactcgaccgggctgcgctcactgcccagccggggccccgggagcctccaggctcccgcccgccctgagctgcggcctccgcatggaggggccactcactccaccaccgctgcagggaggcggagccgccgctgttccggagcccggagcccggcaacacccgggacacgagacggcggcgcagcggtacagcgcccgactgctgcaggccggctacgagcccgagagcgacttcctgattctcccaggattcatagacttcatagctgatgaggtggacctgacctcagccctgacccggaagatcacgctgaagacgccactgatctcctcccccatggacactgtgacagaggctgacatggccattgccatggctaagtttgaacagggcttcatcacggaccctgtggtgctgagcccctcgcacactgtgggcgatgtgctggaggccaagatgcggcatggcttctctggcatccccatcactgagacgggcaccatgggcagcaagctggtgggcatcgtcacctcccgagacatcgactttcttgctgagaaggaccacaccaccctcctcagtgaggtgatgacgccaaggattgaactggtggtggctccagcaggtgtgacgttgaaagaggcaaatgagatcctgcagcgtagcaagaaagggaagctgcctatcgtcaatgattgcgatgagctggtggccatcatcgcccgcaccgacctgaagaagaaccgagactaccctctggcctccaaggattcccagaagcagctgctctgtggggcagctgtgggcacccgtgaggatgacaaataccgtctggacctgctcacccaggcgggcgtcgacgtcatagtcttggactcgtcccaagggaattcggtgtatcagatcgccatggtgcattacatcaaacagaagtacccccacctccaggtgattggggggaacgtggtgacagcagcccaggccaagaacctgattgatgctggtgtggacgggctgcgcgtgggcatgggctgcggctccatctgcatcacccaggaagtgatggcctgtggtcggccccagggcactgctgtgtacaaggtggctgagtatgcccggcgctttggtgtgcccatcatagccgatggcggcatccagaccgtgggacacgtggtcaaggccctggcccttggagcctccacagtgatgatgggctccctgctggccgccactacggaggcccctggcgagtacttcttctcagacggggtgcggctcaagaagtaccggggcatgggctcactggatgccatggagaagagcagcagcagccagaaacgatacttcagcgagggggataaagtgaagatcgcgcagggtgtctcgggctccatccaggacaaaggatccattcagaagttcgtgccctacctcatagcaggcatccaacacggctgccaggatatcggggcccgcagcctgtctgtccttcggtccatgatgtactcaggagagctcaagtttgagaagcggaccatgtcggcccagattgagggtggtgtccatggcctgcactcttacgaaaagcggctgtactgaggacagcggtggaggccgaggtggtggaggggatgcaccccagtgtccacttttgggcacagcctccctccataactgagtggtccacagatttgcactacgggttctccagctcctttccaggcagagaggaggggaggtcctgaggggactgctgcccctcactcggcatcccctgcagagtcaggactgctcccggggccaggctgccctgggagcccccctccgagcccagccagccaggctctcaggccctgcgcctgcctcaggtctttcttgctgcagcctgctccagcctggcccccaccccaggggcaggcggcccctcctggcttctcctgtagggcacctccctgcccctagcctcccaggaaatggtgctctcctggccctgcctctggcccttcccgggccgctgcccctcagccatgtggcacttctgagctcctgacctaggccaaggggaggtctctgcccccttccccggccctgggctacccttgggtcctgctcctcaggccgctcccctgtccctggccatgggtaggagactgccctggtcatggccgcctgcctgtcattcctgactcaccaccgtccccaggtgaaccattcctcccttctcctcagctgcagtcgaaggctttaactttgcacacttgggatcacagttgcgtcattgtgtattaaatacttggaataaatcaagcaggtctcaa

SEQ ID NO: 291927 - DNA, 1813 bp, Homo sapiens
agcggccgcgcgggtgtttatgtcgggtcgcggggtctcgcggcacatggcggactacctgatcagcggcggcaccggctacgtgcccgaggatgggctcaccgcgcagcagctcttcgccagcgccgacggcctcacctacaacgacttcctgattctcccaggattcatagacttcatagctgatgaggtggacctgacctcagccctgacccggaagatcacgctgaagacgccactgatctcctcccccatggacactgtgacagaggctgacatggccattgccatggctctgatgggaggtattggtttcattcaccacaactgcaccccagagttccaggccaacgaggtgcggaaggtcaagaagtttgaacagggcttcatcacggaccctgtggtgctgagcccctcgcacactgtgggcgatgtgctggaggccaagatgcggcatggcttctctggcatccccatcactgagacgggcaccatgggcagcaagctggtgggcatcgtcacctcccgagacatcgactttcttgctgagaaggaccacaccaccctcctcagtgaggtgatgacgccaaggattgaactggtggtggctccagcaggtgtgacgttgaaagaggcaaatgagatcctgcagcgtagcaagaaagggaagctgcctatcgtcaatgattgcgatgagctggtggccatcatcgcccgcaccgacctgaagaagaaccgagactaccctctggcctccaaggattcccagaagcagctgctctgtggggcagctgtgggcacccgtgaggatgacaaataccgtctggacctgctcacccaggcgggcgtcgacgtcatagtcttggactcgtcccaagggaattcggtgtatcagatcgccatggtgcattacatcaaacagaagtacccccacctccaggtgattggggggaacgtggtgacagcagcccaggccaagaacctgattgatgctggtgtggacgggctgcgcgtgggcatgggctgcggctccatctgcatcacccaggaagtgatggcctgtggtcggccccagggcactgctgtgtacaaggtggctgagtatgcccggcgctttggtgtgcccatcatagccgatggcggcatccagaccgtgggacacgtggtcaaggccctggcccttggagcctccacagtgatgatgggctccctgctggccgccactacggaggcccctggcgagtacttcttctcagacggggtgcggctcaagaagtaccggggcatgggctcactggatgccatggagaagagcagcagcagccagaaacgatacttcagcgagggggataaagtgaagatcgcgcagggtgtctcgggctccatccaggacaaaggatccattcagaagttcgtgccctacctcatagcaggcatccaacacggctgccaggatatcggggcccgcagcctgtctgtccttcggtccatgatgtactcaggagagctcaagtttgagaagcggaccatgtcggcccagattgagggtggtgtccatggcctgcactcgtaagtgtggtggcctccttgctgtcacttggaggcagtgggttgggcaggtggggccagggttctgaggtcaagctgaggttccagggaccccatggaccacctgcagcagggacagatgctgctgcaggatggcccctcaccctctcttcgggggcccagccccctgttccttgtcctttagtccccatgcaagcaggccctcccctcccctcgggcctctcccgagcagggcacaggaggt

SEQ ID NO: 291928 - DNA, 1013 bp, Homo sapiens
tgggcactgaggacatccactcagatgtggcgatggcccaaaggagcatggccatctctgcacccagcatggttcttcagggaatgctggcctgggggaggacagaggcctagggcctgctccaggccctcctcctgcgccgtacggctgagatctcagggcttctcagctctctgttctctcctacatctgggggccctggggaaagggttttgggaaggagcagggtccacacacccactcttgttccccctcttgccttgtccccacagttacgaaaagcggctgtactgaggacagcggtggaggccgaggtggtggaggggatgcaccccagtgtccacttttgggcacagcctccctccataactgagtggtccacagatttgcactacgggttctccagctcctttccaggcagagaggaggggaggtcctgaggggactgctgcccctcactcggcatcccctgcagagtcaggactgctcccggggccaggctgccctgggagcccccctccgagcccagccagccaggctctcaggccctgcgcctgcctcaggtctttcttgctgcagcctgctccagcctggcccccaccccaggggcaggcggcccctcctggcttctcctgtagggcacctccctgcccctagcctcccaggaaatggtgctctcctggccctgcctctggcccttcccgggccgctgcccctcagccatgtggcacttctgagctcctgacctaggccaaggggaggtctctgcccccttccccggccctgggctacccttgggtcctgctcctcaggccgctcccctgtccctggccatgggtaggagactgccctggtcatggccgcctgcctgtcattcctgactcaccaccgtccccaggtgaaccattcctcccttctcctcagctgcagtcgaaggctttaactttgcacacttgggatcacagttgcgtcattgtgtattaaatacttggaataaatcaagcaggtctcaa

SEQ ID NO: 291929 - DNA, 2760 bp, Homo sapiens
tcggaaggggccaggagacactggaaggtccggacggcagggaaggggacggggttctttccagtcccacccgtgtagggacacctctccccctcatcccccgatgtaccctcgctgaatctgggatgggagagacgaaccgagtctaggcatctgcgtagcagcgccggggagagcggggagcccaggcggagcccagtcgactcccggattcccctgccccgcccccggcacgaggccccgccccggcgccccgcccctcctcgggactcgaccgggctgcgctcactgcccagccggggccccgggagcctccaggctcccgcccgccctgagctgcggcctccgcatggaggggccactcactccaccaccgctgcagggaggcggagccgccgctgttccggagcccggagcccggcaacacccgggacacgagacggcggcgcagcggtacagcgcccgactgctgcaggccggctacgagcccgagagcatggcggactacctgatcagcggcggcaccggctacgtgcccgaggatgggctcaccgcgcagcagctcttcgccagcgccgacggcctcacctacaacgacttcctgattctcccaggattcatagacttcatagctgatgaggtggacctgacctcagccctgacccggaagatcacgctgaagacgccactgatctcctcccccatggacactgtgacagaggctgacatggccattgccatggctctgatgggaggtattggtttcattcaccacaactgcaccccagagttccaggccaacgaggtgcggaaggtcaagaagtttgaacagggcttcatcacggaccctgtggtgctgagcccctcgcacactgtgggcgatgtgctggaggccaagatgcggcatggcttctctggcatccccatcactgagacgggcaccatgggcagcaagctggtgggcatcgtcacctcccgagacatcgactttcttgctgagaaggaccacaccaccctcctcagtgaggtgatgacgccaaggattgaactggtggtggctccagcaggtgtgacgttgaaagaggcaaatgagatcctgcagcgtagcaagaaagggaagctgcctatcgtcaatgattgcgatgagctggtggccatcatcgcccgcaccgacctgaagaagaaccgagactaccctctggcctccaaggattcccagaagcagctgctctgtggggcagctgtgggcacccgtgaggatgacaaataccgtctggacctgctcacccaggcgggcgtcgacgtcatagtcttggactcgtcccaagggaattcggtgtatcagatcgccatggtgcattacatcaaacagaagtacccccacctccaggtgattggggggaacgtggtgacagcagcccaggccaagaacctgattgatgctggtgtggacgggctgcgcgtgggcatgggctgcggctccatctgcatcacccaggaagtgatggcctgtggtcggccccagggcactgctgtgtacaaggtggctgagtatgcccggcgctttggtgtgcccatcatagccgatggcggcatccagaccgtgggacacgtggtcaaggccctggcccttggagcctccacagtgatgatgggctccctgctggccgccactacggaggcccctggcgagtacttcttctcagacggggtgcggctcaagaagtaccggggcatgggctcactggatgccatggagaagagcagcagcagccagaaacgatacttcagcgagggggataaagtgaagatcgcgcagggtgtctcgggctccatccaggacaaaggatccattcagaagttcgtgccctacctcatagcaggcatccaacacggctgccaggatatcggggcccgcagcctgtctgtccttcggtccatgatgtactcaggagagctcaagtttgagaagcggaccatgtcggcccagattgagggtggtgtccatggcctgcactcttacgaaaagcggctgtactgaggacagcggtggaggccgaggtggtggaggggatgcaccccagtgtccacttttgggcacagcctccctccataactgagtggtccacagatttgcactacgggttctccagctcctttccaggcagagaggaggggaggtcctgaggggactgctgcccctcactcggcatcccctgcagagtcaggactgctcccggggccaggctgccctgggagcccccctccgagcccagccagccaggctctcaggccctgcgcctgcctcaggtctttcttgctgcagcctgctccagcctggcccccaccccaggggcaggcggcccctcctggcttctcctgtagggcacctccctgcccctagcctcccaggaaatggtgctctcctggccctgcctctggcccttcccgggccgctgcccctcagccatgtggcacttctgagctcctgacctaggccaaggggaggtctctgcccccttccccggccctgggctacccttgggtcctgctcctcaggccgctcccctgtccctggccatgggtaggagactgccctggtcatggccgcctgcctgtcattcctgactcaccaccgtccccaggtgaaccattcctcccttctcctcagctgcagtcgaaggctttaactttgcacacttgggatcacagttgcgtcattgtgtattaaatacttggaataaatcaagcaggtctcaa

SEQ ID NO: 291930 - DNA, 2956 bp, Homo sapiens
tcggaaggggccaggagacactggaaggtccggacggcagggaaggggacggggttctttccagtcccacccgtgtagggacacctctccccctcatcccccgatgtaccctcgctgaatctgggatgggagagacgaaccgagtctaggcatctgcgtagcagcgccggggagagcggggagcccaggcggagcccagtcgactcccggattcccctgccccgcccccggcacgaggccccgccccggcgccccgcccctcctcgggactcgaccgggctgcgctcactgcccagccggggccccgggagcctccaggctcccgcccgccctgagctgcggcctccgcatggaggggccactcactccaccaccgctgcagggaggcggagccgccgctgttccggagcccggagcccggcaacacccgggacacgagacggcggcgcagcggtacagcgcccgactgctgcaggccggctacgagcccgagagccctagattggacctcgctacacacccgacgacaccccgttcaggtggctccaactcctggggttcaaacagtgcttgctggagtcctgtccgactgacttggcttacccctccttagctgtttcctcctagaactatcttcagtggtcttactggcaggtgttggtgtccagatggatcgccttcgcagggctagcatggcggactacctgatcagcggcggcaccggctacgtgcccgaggatgggctcaccgcgcagcagctcttcgccagcgccgacggcctcacctacaacgacttcctgattctcccaggattcatagacttcatagctgatgaggtggacctgacctcagccctgacccggaagatcacgctgaagacgccactgatctcctcccccatggacactgtgacagaggctgacatggccattgccatggctctgatgggaggtattggtttcattcaccacaactgcaccccagagttccaggccaacgaggtgcggaaggtcaagaagtttgaacagggcttcatcacggaccctgtggtgctgagcccctcgcacactgtgggcgatgtgctggaggccaagatgcggcatggcttctctggcatccccatcactgagacgggcaccatgggcagcaagctggtgggcatcgtcacctcccgagacatcgactttcttgctgagaaggaccacaccaccctcctcagtgaggtgatgacgccaaggattgaactggtggtggctccagcaggtgtgacgttgaaagaggcaaatgagatcctgcagcgtagcaagaaagggaagctgcctatcgtcaatgattgcgatgagctggtggccatcatcgcccgcaccgacctgaagaagaaccgagactaccctctggcctccaaggattcccagaagcagctgctctgtggggcagctgtgggcacccgtgaggatgacaaataccgtctggacctgctcacccaggcgggcgtcgacgtcatagtcttggactcgtcccaagggaattcggtgtatcagatcgccatggtgcattacatcaaacagaagtacccccacctccaggtgattggggggaacgtggtgacagcagcccaggccaagaacctgattgatgctggtgtggacgggctgcgcgtgggcatgggctgcggctccatctgcatcacccaggaagtgatggcctgtggtcggccccagggcactgctgtgtacaaggtggctgagtatgcccggcgctttggtgtgcccatcatagccgatggcggcatccagaccgtgggacacgtggtcaaggccctggcccttggagcctccacagtgatgatgggctccctgctggccgccactacggaggcccctggcgagtacttcttctcagacggggtgcggctcaagaagtaccggggcatgggctcactggatgccatggagaagagcagcagcagccagaaacgatacttcagcgagggggataaagtgaagatcgcgcagggtgtctcgggctccatccaggacaaaggatccattcagaagttcgtgccctacctcatagcaggcatccaacacggctgccaggatatcggggcccgcagcctgtctgtccttcggtccatgatgtactcaggagagctcaagtttgagaagcggaccatgtcggcccagattgagggtggtgtccatggcctgcactcttacgaaaagcggctgtactgaggacagcggtggaggccgaggtggtggaggggatgcaccccagtgtccacttttgggcacagcctccctccataactgagtggtccacagatttgcactacgggttctccagctcctttccaggcagagaggaggggaggtcctgaggggactgctgcccctcactcggcatcccctgcagagtcaggactgctcccggggccaggctgccctgggagcccccctccgagcccagccagccaggctctcaggccctgcgcctgcctcaggtctttcttgctgcagcctgctccagcctggcccccaccccaggggcaggcggcccctcctggcttctcctgtagggcacctccctgcccctagcctcccaggaaatggtgctctcctggccctgcctctggcccttcccgggccgctgcccctcagccatgtggcacttctgagctcctgacctaggccaaggggaggtctctgcccccttccccggccctgggctacccttgggtcctgctcctcaggccgctcccctgtccctggccatgggtaggagactgccctggtcatggccgcctgcctgtcattcctgactcaccaccgtccccaggtgaaccattcctcccttctcctcagctgcagtcgaaggctttaactttgcacacttgggatcacagttgcgtcattgtgtattaaatacttggaataaatcaagcaggtctcaa

SEQ ID NO: 291931 - DNA, 2857 bp, Homo sapiens
tcggaaggggccaggagacactggaaggtccggacggcagggaaggggacggggttctttccagtcccacccgtgtagggacacctctccccctcatcccccgatgtaccctcgctgaatctgggatgggagagacgaaccgagtctaggcatctgcgtagcagcgccggggagagcggggagcccaggcggagcccagtcgactcccggattcccctgccccgcccccggcacgaggccccgccccggcgccccgcccctcctcgggactcgaccgggctgcgctcactgcccagccggggccccgggagcctccaggctcccgcccgccctgagctgcggcctccgcatggaggggccactcactccaccaccgctgcagggaggcggagccgccgctgttccggagcccggagcccggcaacacccgggacacgagacggcggcgcagcggtacagcgcccgactgctgcaggccggctacgagcccgagagccctagattggacctcgctacacacccgacgacaccccgttcaggtggctccaactcctggggttcaaacagtgcttgctggagtcctgtccgactgacttggcttacccctccttagctgtttcctcctagaactatcttcagtggtcttactggcaggtgttggtgtccagatggatcgccttcgcagggctagcgacttcctgattctcccaggattcatagacttcatagctgatgaggtggacctgacctcagccctgacccggaagatcacgctgaagacgccactgatctcctcccccatggacactgtgacagaggctgacatggccattgccatggctctgatgggaggtattggtttcattcaccacaactgcaccccagagttccaggccaacgaggtgcggaaggtcaagaagtttgaacagggcttcatcacggaccctgtggtgctgagcccctcgcacactgtgggcgatgtgctggaggccaagatgcggcatggcttctctggcatccccatcactgagacgggcaccatgggcagcaagctggtgggcatcgtcacctcccgagacatcgactttcttgctgagaaggaccacaccaccctcctcagtgaggtgatgacgccaaggattgaactggtggtggctccagcaggtgtgacgttgaaagaggcaaatgagatcctgcagcgtagcaagaaagggaagctgcctatcgtcaatgattgcgatgagctggtggccatcatcgcccgcaccgacctgaagaagaaccgagactaccctctggcctccaaggattcccagaagcagctgctctgtggggcagctgtgggcacccgtgaggatgacaaataccgtctggacctgctcacccaggcgggcgtcgacgtcatagtcttggactcgtcccaagggaattcggtgtatcagatcgccatggtgcattacatcaaacagaagtacccccacctccaggtgattggggggaacgtggtgacagcagcccaggccaagaacctgattgatgctggtgtggacgggctgcgcgtgggcatgggctgcggctccatctgcatcacccaggaagtgatggcctgtggtcggccccagggcactgctgtgtacaaggtggctgagtatgcccggcgctttggtgtgcccatcatagccgatggcggcatccagaccgtgggacacgtggtcaaggccctggcccttggagcctccacagtgatgatgggctccctgctggccgccactacggaggcccctggcgagtacttcttctcagacggggtgcggctcaagaagtaccggggcatgggctcactggatgccatggagaagagcagcagcagccagaaacgatacttcagcgagggggataaagtgaagatcgcgcagggtgtctcgggctccatccaggacaaaggatccattcagaagttcgtgccctacctcatagcaggcatccaacacggctgccaggatatcggggcccgcagcctgtctgtccttcggtccatgatgtactcaggagagctcaagtttgagaagcggaccatgtcggcccagattgagggtggtgtccatggcctgcactcttacgaaaagcggctgtactgaggacagcggtggaggccgaggtggtggaggggatgcaccccagtgtccacttttgggcacagcctccctccataactgagtggtccacagatttgcactacgggttctccagctcctttccaggcagagaggaggggaggtcctgaggggactgctgcccctcactcggcatcccctgcagagtcaggactgctcccggggccaggctgccctgggagcccccctccgagcccagccagccaggctctcaggccctgcgcctgcctcaggtctttcttgctgcagcctgctccagcctggcccccaccccaggggcaggcggcccctcctggcttctcctgtagggcacctccctgcccctagcctcccaggaaatggtgctctcctggccctgcctctggcccttcccgggccgctgcccctcagccatgtggcacttctgagctcctgacctaggccaaggggaggtctctgcccccttccccggccctgggctacccttgggtcctgctcctcaggccgctcccctgtccctggccatgggtaggagactgccctggtcatggccgcctgcctgtcattcctgactcaccaccgtccccaggtgaaccattcctcccttctcctcagctgcagtcgaaggctttaactttgcacacttgggatcacagttgcgtcattgtgtattaaatacttggaataaatcaagcaggtctcaa

SEQ ID NO: 291932 - DNA, 1762 bp, Homo sapiens
agcggccgcgcgggtgtttatgtcgggtcgcggggtctcgcggcacatggcggactacctgatcagcggcggcaccggctacgtgcccgaggatgggctcaccgcgcagcagctcttcgccagcgccgacggcctcacctacaacgacttcctgattctcccaggattcatagacttcatagctgatgaggtggacctgacctcagccctgacccggaagatcacgctgaagacgccactgatctcctcccccatggacactgtgacagaggctgacatggccattgccatggctctgatgggaggtattggtttcattcaccacaactgcaccccagagttccaggccaacgaggtgcggaaggtcaagaagtttgaacagggcttcatcacggaccctgtggtgctgagcccctcgcacactgtgggcgatgtgctggaggccaagatgcggcatggcttctctggcatccccatcactgagacgggcaccatgggcagcaagctggtgggcatcgtcacctcccgagacatcgactttcttgctgagaaggaccacaccaccctcctcagtgaggtgatgacgccaaggattgaactggtggtggctccagcaggtgtgacgttgaaagaggcaaatgagatcctgcagcgtagcaagaaagggaagctgcctatcgtcaatgattgcgatgagctggtggccatcatcgcccgcaccgacctgaagaagaaccgagactaccctctggcctccaaggattcccagaagcagctgctctgtggggcagctgtgggcacccgtgaggatgacaaataccgtctggacctgctcacccaggcgggcgtcgacgtcatagtcttggactcgtcccaagggaattcggtgtatcagatcgccatggtgcattacatcaaacagaagtacccccacctccaggtgattggggggaacgtggtgacagcagcccaggccaagaacctgattgatgctggtgtggacgggctgcgcgtgggcatgggctgcggctccatctgcatcacccaggaagtgatggcctgtggtcggccccagggcactgctgtgtacaaggtggctgagtatgcccggcgctttggtgtgcccatcatagccgatggcggcatccagaccgtgggacacgtggtcaaggccctggcccttggagcctccacagtgatgatgggctccctgctggccgccactacggaggcccctggcgagtacttcttctcagacggggtgcggctcaagaagtaccggggcatgggctcactggatgccatggagaagagcagcagcagccagaaacgatacttcagcgagggggataaagtgaagatcgcgcagggtgtctcgggctccatccaggacaaaggatccattcagaagttcgtgccctacctcatagcaggcatccaacacggctgccaggatatcggggcccgcagcctgtctgtccttcggtccatgatgtactcaggagagctcaagtttgagaagcggaccatgtcggcccagattgagggtggtgtccatggcctgcactcttacgaaaagcggctgtactgaggacagcggtggaggccgaggtggtggaggggatgcaccccagtgtccacttttgggcacagcctccctcccttctcctcagctgcagtcgaaggctttaactttgcacacttgggatcacagttgcgtcattgtgtattaaatacttggaataaatcaagcaggtctcaa

SEQ ID NO: 291933 - DNA, 728 bp, Homo sapiens
cggacgcgtgggtcgacccacgcgtccggggaagcaaaccttttggaaactggcttttgggcagacagtaaacgtccagtttgatgctggaagcatgaacagcttcatcaggtaggtactcctcaactctgatgagtttgtcctttcagcctaagggggtggaagggagttgtttgagaatagcaaatacgcatgttgattgcgagtgtgtggagacaaaggcagttcccaccacagttaggtcctggccgttgtttcctcgcctgcgatgctccttgtacgtcctcaccctcctctcccgcctctgccttctgctgggtcaaaggtggcctttttctctccagccttgaattgttccctgttggcttcccaagggcccatctgctggtacagtccacacttccaaagccaagacccgagagggctttcactgccccaagcctctctcctgtgaccttgggattctgtcttggcagaatcctttgtcagcggctcttactctgtccttcctgtttggccacagctctttcaatcaatgggtattctagaaccgcaggatgtcagagctggaagggacgcgataccggtttacacaaggggaaactcctcgaggctctgggagggacggagggttttggtgacagagcgagagctaaaattgaggattcctgaatccagatcttgcctcccatcagccatctttctcccaataaatttttgttttgtgc

SEQ ID NO: 291934 - DNA, 975 bp, Homo sapiens
ggacgcgtgggtcgaccacgcggtcgcccacgcgtccgggattgcagggtcagccatgtcatctgagcctcccccaccaccacagccccccacccatcaagcttcagtcgggctgctggacacccctcggagccgtgagcgctcaccatcccctctgcgcggcaacgtggtcccaagcccactgcccactcgccggacgaggaccttctcggcgacggtgcgggcttcacagggccccgtctacaaaggagtctgcaaatgcttctgccggtccaagggccatggcttcattaccccagctgatggcggccccgacatcttcctgcacatctctgatgtggaaggggagtatgtcccagtggaaggcgacgaggtcacctataaaatgtgctccatcccacccaagaatgagaagctgcaggccgtggaggtcgtcatcactcacctggcaccaggcaccaagcatgagacctggtctggacatgtcatcagctcctaggagatggtggaagcaccccttgtcctgtgcttgtgggagactttgcggggaggaggcagcagacactggagatgacattcttccacacgagacggggcttcagccgggcatggtccctctcaagtatctcctggaggaaggggtatggggggcaggtgtggggtgtggggtgttcccggccatcagcacagcctatgaccattgcaacaacctctcaccatctgaagagcattaaaagcatttaaaaaaaaaaaaaaaaaaaagaaagaaaaagaaaaagaaaacagaggaaagaaagaaagtaaaagaaaaagattaagaaaatctaacgaggtaaatagaataggcgagaaaaaaaacacagacagacaccagctacgcactatataagtcgagggaggagcaaagcgtagtatagaagagagactgcacaaaaaaaaggctcgagataaaagaacatgtgaagacagagggac

SEQ ID NO: 291935 - DNA, 593 bp, Homo sapiens
aggagggtgaggacgtacaaggagcatcgcaggcgaggaaacaacacaacggccaggacctaactgtggtgggaactgcctttgtctccacacactcgcaatcaacatgcgtatttgctattctcaaacaactcccttccacccccttaggctgaaaggacaaaggtggcctttttctctccagccttgaattgttccctgttggcttcccaagggcccatctgctggtacagtccacacttccaaagccaagacccgagagggctttcactgccccaagcctctctcctgtgaccttgggattctgtcttggcagaatcctttgtcagcggctcttactctgtccttcctgtttggccacagctctttcaatcaatgggtattctagaaccgcaggatgtcagagctggaagggacgcgataccggtttacacaaggggaaactcctcgaggctctgggagggacggagggttttggtgacagagcgagagctaaaattgaggattcctgaatccagatcttgcctcccatcagccatctttctcccaataaatttttgttttgtgcttttgtgcaaggcaaaatatgcgtg

SEQ ID NO: 291936 - DNA, 1179 bp, Homo sapiens
aatttgaaaaccccatgggacctgagtcaaaccgatccagggctgctgctgtccctcccggctgtgtggtgttgagtggcgtcctgagttaggcttctccctacttcatctcatacccccatcaccagccctgcgcaggtgccaagtgatgcccacccagctgccccactttgcagattcggaaactgagcccagagatgggaaaggacttacccaagggcctctgactgctggactgtttctctttcccctgaacctcgagctgaggccacgttagagccgacaccttcatattcaatgttcagtgattattgtgtacagcgagtgtcctgctcttgaaaaattgtcaaaagcacagcagcagctagggaattcccgccctccagctggatttaccggtacatactaggggtcacagaaggaatttgatttcataacagcgtggtgacccgggctgtgtggaaattcactgggcctgatggagctggatgcagccttggaaattctccctttccctttgggctcccgcagcaggccccccagtcctgggtgcaggcttgtgacagctgctcagggatccaaacgtggcgcttgagctctctgcgatgtgttccacagttccctggaggcggacactgcgtgagggtcagtttttgcccctgcttccctgtggtgtctggctcccagcagcgtcagggagggtccgtggagtggctgagtttggatctaggtggttggcattaaaatctccctggctttgggttttcttttttgagacagagtcttgctctgtagcccaggctggagtgcagtggtgcgatctcagctcactggaacctccgcctcccaggttcaagcaattctcatgcctcagccttcaagtagatgggattacaggtgcctgccaccatgcccagctaatttttgtattcgtattagagactgggtttccccatgttggccaggctagtctcgaactcctgacattaagtgatccgcctgcctcggcctcccagagtgctgggattgcaggtgtgagccactgcgcccggcccctggctttgggttttctgctcaccttcctccttccctcccacaaatactatgtgtcccaaatgtgccgggatccatgccttgtgctggggacacagaggggaccgatgccatcctggtcatggg

SEQ ID NO: 291937 - DNA, 572 bp, Homo sapiens
ggtggcgggggcctgtaatctcagctactcgggaggctgaggcagtagaattgcttgaaccggggaggcggaggttgcagcgagctgagatcgcgccattgcactccaggctgggcaacaacagtgacttgtctcaaaaacaatagcaacaacaacaacaaaaaacaaaactgaaggtgggactgggaagacgtttgggaaagcagcctcgggtgaaggaggtggaatgagttctacgtcttgactttggggtgccgtggcaggcagcgtggaggttgcctgtcgttcaggttggaggagcctgcccgggctgaggtggccagctggggcccagagccagaacacttgggaggggtggagaggaagcagcagcccttggagaggaagtgattcaaaaccacgtatgcctggatgtgtccggactacggcaacatctgcccaactgccttctcctggcccctgtgggcactccccttccagtagctggagagaccttcccggacagatcatgagcatgccccacacctctccctcgggatcaggttcaagctcaacttcctggctagcctctc

SEQ ID NO: 291938 - DNA, 768 bp, Homo sapiens
aatttgaaaaccccatgggacctgagtcaaaccgatccagggctgctgctgtccctcccggctgtgtggtgttgagtggcgtcctgagttaggcttctccctacttcatctcatacccccatcaccagccctgcgcaggtgccaagtgatgcccacccagctgccccactttgcagattcggaaactgagcccagagatgggaaaggacttacccaagggcctctgactgctggactgtttctctttcccctgaacctcgagctgaggccacgttagagccgacaccttcatattcaatgttcagtgattattgtgtacagcgagtgtcctgctcttgaaaaattgtcaaaagcacagcagcagctagggaattcccgccctccagctggatttaccggtacatactaggggtcacagaaggaatttgatttcataacagcgtggtgacccgggctgtgtggaaattcactgggcctgatggagctggatgcagccttggaaattctccctttccctttgggctcccgcagcaggccccccagtcctgggtgcaggcttgtgacagctgctcagggatccaaacgtggcgcttgagctctctgcgatgtgttccacagttccctggaggcggacactgcgtgagggtcagtttttgcccctgcttccctgtggtgtctggctcccagcagcgtcagggagggtccgtggagtggctgagttgaaccagtggctgcagcatggggatactctagaacagctcatgcacg

SEQ ID NO: 291939 - DNA, 462 bp, Homo sapiens
tctagaagttttacagtttcaggtcctgtgtttaagtctttaatccatgggtagatggcaaaaaggacgaagtcaggatctcaaagaggtatctgtacccccgtgttcactgaagcattattcataatggccaagatacggaaacaactcatgtgtctactgacagaagaatggatcaagaaaatggagtatattctgaccgggcacgctggctcacgcctgtaatcccatcaatttaggaggccaaggcaggtgaatctcttgaggccaggagttcgagaccagcctcggcctcccagagtgctgggattgcaggtgtgagccactgcgcccggcccctggctttgggttttctgctcaccttcctccttccctcccacaaatactatgtgtcccaaatgtgccgggatccatgccttgtgctggggacacagaggggaccgatgccatcctggtcatggg

SEQ ID NO: 291940 - DNA, 481 bp, Homo sapiens
tctagaagttttacagtttcaggtcctgtgtttaagtctttaatccatgggtagatggcaaaaaggacgaagtcaggatctcaaagaggtatctgtacccccgtgttcactgaagcattattcataatggccaagatacggaaacaactcatgtgtctactgacagaagaatggatcaagaaaatggagtatattctgaccgggcacgctggctcacgcctgtaatcccatcaatttaggaggccaaggcaggtgaatctcttgaggccaggagttcgagaccagcctggccaatgtggcaaaaccctgtctctactaaaaatacaaaaattagccgggcgtggtggcaggctcctgtaatcccagccactaatcgggaggctgaggcacgagaatcacttgaaccagggaaccagggaggtggaggttgcagtgagccaagatggtgccactgcactctagcctgggcgacagagcgaga

SEQ ID NO: 291941 - DNA, 2713 bp, Homo sapiens
agcggagtcggagcgaagcggctggcggagcagaacggattgcagggtcagccatgtcatctgagcctcccccaccaccacagccccccacccatcaagcttcagtcgggctgctggacacccctcggagccgtgagcgctcaccatcccctctgcgcggcaacgtggtcccaagcccactgcccactcgccggacgaggaccttctcggcgacggtgcgggcttcacagggccccgtctacaaaggagtctgcaaatgcttctgccggtccaagggccatggcttcattaccccagctgatggcggccccgacatcttcctgcacatctctgatgtggaaggggagtatgtcccagtggaaggcgacgaggtcacctataaaatgtgctccatcccacccaagaatgagaagctgcaggccgtggaggtcgtcatcactcacctggcaccaggcaccaagcatgagacctggtctggacatgtcatcagctcctaggagatggtggaagcaccccttgtcctgtgcttgtgggagactttgcggggaggaggcagcagacactggagatgacattcttccacacgagacggggcttcagccgggcatggtccctctcaagtatctcctggaggaaggggtatggggggcaggtgtggggtgtggggtgttcccggccatcagcacagcctatgaccattgcaacaacctctcaccatctgaagagcattaaaagcatttaaaaaggagaggtgcccactggtggctgagtggaggttccaaccccatcccagggagtggatcaagggtggtatttctccagctgctcagacacatgggctcaacccacagaatccctcttcctcctggagctggaggccccagattcccagatctggccccctggcagcctgacagggaccttgcgtgacttctccaaggcaaatttccacctaagtgccccttgcgcctctcctggggcctgggcaaagcagttttctaattcttggcttggttggttctaggggagctggcttgaagtgggtggggaaaggcgggggtggcggtctttggattggacggatgttgccttttggtgcctttgcagtgggaggcggcatagctgcctgtctggggaagacagttctcccagcactcccacccctgggcacagcaggctggtactgggaggctgaacccctcttagagcctgaccttttcatctgccttctggttgtgtgaccatcactcaacagccatttcacagcccctgtaattatggcggcggggggctggggtggtggtggtgggaagggcttgtggagaggacacagtctttgtttaaaaactttgtcccgatccatccagaaaagagtaggtagcttgcatcctgacagcctggcaaagtcaagaaagttgaaggagaaacatacctttggagagggggttttctttaaaactagtgttaagaaatgcttagggattttttttttcttatttttcataactaaagctttcacccagagccggctctgtttgcactttgctgccgacattgcaaactttttggcagggtgggagactgagtctcattctgtcacccaggctggagtgcagtggcccgatctcagcttactgcaacctctgccctccagggttctggcaattccgcctcagtctcctgagtagctgggattacaggcatgcgccaccacacccggttaatttttgtatttttagtagagaccaggtttcatcatgttgggcaggatggtcttgaacccctgacctcaggtgatctgcccatctcggcctctcaaagtgctgggattacaagtgtgagccatcgcgcccggcctgcaaacttttttgtaggtatttctggtaaacaaatccttaggttatctttgctgtggttgtggtttggctttagtcatgatttcaaagtagaaatagctaggcattattttttgaaatatatgacctatatgtagtcaagaatccactgaacagagggaagcaaaccttttggaaactggcttttgggcagacagtaaacgtccagtttgatgctggaagcatgaacagcttcatcaggtaggtactcctcaactctgatgagtttgtcctttcagcctaagggggtggaagggagttgtttgagaatagcaaatacgcatgttgattgcgagtgtgtggagacaaaggcagttcccaccacagttaggtcctggccgttgtttcctcgcctgcgatgctccttgtacgtcctcaccctcctctcccgcctctgccttctgctgggtcaaaggtggcctttttctctccagccttgaattgttccctgttggcttcccaagggcccatctgctggtacagtccacacttccaaagccaagacccgagagggctttcactgccccaagcctctctcctgtgaccttgggattctgtcttggcagaatcctttgtcagcggctcttactctgtccttcctgtttggccacagctctttcaatcaatgggtattctagaaccgcaggatgtcagagctggaagggacgcgataccggtttacacaaggggaaactcctcgaggctctgggagggacggagggttttggtgacagagcgagagctaaaattgaggattcctgaatccagatcttgcctcccatcagccatctttctcccaataaatttttgttttgtgc

SEQ ID NO: 291942 - DNA, 2738 bp, Homo sapiens
agcggagtcggagcgaagcggctggcggagcagaacggattgcagggtcagccatgtcatctgagcctcccccaccaccacagccccccacccatcaagcttcagtcgggctgctggacacccctcggagccgtgagcgctcaccatcccctctgcgcggcaacgtggtcccaagcccactgcccactcgccggacgaggaccttctcggcgacggtgcgggcttcacagggccccgtctacaaaggagtctgcaaatgcttctgccggtccaagggccatggcttcattaccccagctgatggcggccccgacatcttcctgcacatctctgatgtggaaggggagtatgtcccagtggaaggcgacgaggtcacctataaaatgtgctccatcccacccaagaatgagaagctgcaggccgtggaggtcgtcatcactcacctggcaccaggcaccaagcatgagacctggtctggacatgtcatcagctcctaggagatggtggaagcaccccttgtcctgtgcttgtgggagactttgcggggaggaggcagcagacactggagatgacattcttccacacgagacggggcttcagccgggcatggtccctctcaagtatctcctggaggaaggggtatggggggcaggtgtggggtgtggggtgttcccggccatcagcacagcctatgaccattgcaacaacctctcaccatctgaagagcattaaaagcatttaaaaaggagaggtgcccactggtggctgagtggaggttccaaccccatcccagggagtggatcaagggtggtatttctccagctgctcagacacatgggctcaacccacagaatccctcttcctcctggagctggaggccccagattcccagatctggccccctggcagcctgacagggaccttgcgtgacttctccaaggcaaatttccacctaagtgccccttgcgcctctcctggggcctgggcaaagcagttttctaattcttggcttggttggttctaggggagctggcttgaagtgggtggggaaaggcgggggtggcggtctttggattggacggatgttgccttttggtgcctttgcagtgggaggcggcatagctgcctgtctggggaagacagttctcccagcactcccacccctgggcacagcaggctggtactgggaggctgaacccctcttagagcctgaccttttcatctgccttctggttgtgtgaccatcactcaacagccatttcacagcccctgtaattatggcggcggggggctggggtggtggtggtgggaagggcttgtggagaggacacagtctttgtttaaaaactttgtcccgatccatccagaaaagagtaggtagcttgcatcctgacagcctggcaaagtcaagaaagttgaaggagaaacatacctttggagagggggttttctttaaaactagtgttaagaaatgcttagggattttttttttcttatttttcataactaaagctttcacccagagccggctctgtttgcactttgctgccgacattgcaaactttttggcagggtgggagactgagtctcattctgtcacccaggctggagtgcagtggcccgatctcagcttactgcaacctctgccctccagggttctggcaattccgcctcagtctcctgagtagctgggattacaggcatgcgccaccacacccggttaatttttgtatttttagtagagaccaggtttcatcatgttgggcaggatggtcttgaacccctgacctcaggtgatctgcccatctcggcctctcaaagtgctgggattacaagtgtgagccatcgcgcccggcctgcaaacttttttgtaggtatttctggtaaacaaatccttaggttatctttgctgtggttgtggtttggctttagtcatgatttcaaagtagaaatagctaggcattattttttgaaatatatgacctatatgtagtcaagaatccactgaacagagggaagcaaaccttttggaaactggcttttgggcagacagtaaacgtccagtttgatgctggaagcatgaacagcttcatcaggtaggtactcctcaactctgatgagtttgtcctttcagcctaagggggtggaagggagttgtttgagaatagcaaatacgcatgttgattgcgagtgtgtggagacaaaggcagttcccaccacagttaggtcctggccgttgtttcctcgcctgcgatgctccttgtacgtcctcaccctcctctcccgcctctgccttctgctgggtcaaaggtggcctttttctctccagccttgaattgttccctgttggcttcccaagggcccatctgctggtacagtccacacttccaaagccaagacccgagagggctttcactgccccaagcctctctcctgtgaccttgggattctgtcttggcagaatcctttgtcagcggctcttactctgtccttcctgtttggccacagctctttcaatcaatgggtattctagaaccgcaggatgtcagagctggaagggacgcgataccggtttacacaaggggaaactcctcgaggctctgggagggacggagggttttggtgacagagcgagagctaaaattgaggattcctgaatccagatcttgcctcccatcagccatctttctcccaataaatttttgttttgtgcttttgtgcaaggcaaaatatgcgtg

SEQ ID NO: 291943 - DNA, 2747 bp, Homo sapiens
agcggagtcggagcgaagcggctggcggagcagaacggattgcagggtcagccatgtcatctgagcctcccccaccaccacagccccccacccatcaagcttcagtcgggctgctggacacccctcggagccgtgagcgctcaccatcccctctgcgcggcaacgtggtcccaagcccactgcccactcgccggacgaggaccttctcggcgacggtgcgggcttcacagggccccgtctacaaaggagtctgcaaatgcttctgccggtccaagggccatggcttcattaccccagctgatggcggccccgacatcttcctgcacatctctgatgtggaaggggagtatgtcccagtggaaggcgacgaggtcacctataaaatgtgctccatcccacccaagaatgagaagctgcaggccgtggaggtcgtcatcactcacctggcaccaggcaccaagcatgagacctggtctggacatgtcatcagctcctaggagatggtggaagcaccccttgtcctgtgcttgtgggagactttgcggggaggaggcagcagacactggagatgacattcttccacacgagacggggcttcagccgggcatggtccctctcaagtatctcctggaggaaggggtatggggggcaggtgtggggtgtggggtgttcccggccatcagcacagcctatgaccattgcaacaacctctcaccatctgaagagcattaaaagcatttaaaaaggagaggtgcccactggtggctgagtggaggttccaaccccatcccagggagtggatcaagggtggtatttctccagctgctcagacacatgggctcaacccacagaatccctcttcctcctggagctggaggccccagattcccagatctggccccctggcagcctgacagggaccttgcgtgacttctccaaggcaaatttccacctaagtgccccttgcgcctctcctggggcctgggcaaagcagttttctaattcttggcttggttggttctaggggagctggcttgaagtgggtggggaaaggcgggggtggcggtctttggattggacggatgttgccttttggtgcctttgcagtgggaggcggcatagctgcctgtctggggaagacagttctcccagcactcccacccctgggcacagcaggctggtactgggaggctgaacccctcttagagcctgaccttttcatctgccttctggttgtgtgaccatcactcaacagccatttcacagcccctgtaattatggcggcggggggctggggtggtggtggtgggaagggcttgtggagaggacacagtctttgtttaaaaactttgtcccgatccatccagaaaagagtaggtagcttgcatcctgacagcctggcaaagtcaagaaagttgaaggagaaacatacctttggagagggggttttctttaaaactagtgttaagaaatgcttagggattttttttttcttatttttcataactaaagctttcacccagagccggctctgtttgcactttgctgccgacattgcaaactttttggcagggtgggagactgagtctcattctgtcacccaggctggagtgcagtggcccgatctcagcttactgcaacctctgccctccagggttctggcaattccgcctcagtctcctgagtagctgggattacaggcatgcgccaccacacccggttaatttttgtatttttagtagagaccaggtttcatcatgttgggcaggatggtcttgaacccctgacctcaggtgatctgcccatctcggcctctcaaagtgctgggattacaagtgtgagccatcgcgcccggcctgcaaacttttttgtaggtatttctggtaaacaaatccttaggttatctttgctgtggttgtggtttggctttagtcatgatttcaaagtagaaatagctaggcattattttttgaaatatatgacctatatgtagtcaagaatccactgaacagagggaagcaaaccttttggaaactggcttttgggcagacagtaaacgtccagtttgatgctggaagcatgaacagcttcatcaggtaggtactcctcaactctgatgagtttgtcctttcagcctaagggggtggaagggagttgtttgagaatagcaaatacgcatgttgattgcgagtgtgtggagacaaaggcagttcccaccacagttaggtcctggccgttgtttcctcgcctgcgatgctccttgtacgtcctcaccctcctctcccgcctctgccttctgctgggtcaaaggtggcctttttctctccagccttgaattgttccctgttggcttcccaagggcccatctgctggtacagtccacacttccaaagccaagacccgagagggctttcactgccccaagcctctctcctgtgaccttgggattctgtcttggcagaatcctttgtcagcggctcttactctgtccttcctgtttggccacagctctttcaatcaatgggtattctagaaccgcaggatgtcagagctggaagggacgcgataccggtttacacaaggggaaactcctcgaggctctgggagggacggagggttttggtgacagagcgagagctaaaattgaggattcctgaatccagatcttgcctcccatcagccatctttctcccaataaatttttgttttgtgctttgttgccacagtcgcgttgtcggtgatgcgca

SEQ ID NO: 291944 - DNA, 2719 bp, Homo sapiens
agcggagtcggagcgaagcggctggcggagcagaacggattgcagggtcagccatgtcatctgagcctcccccaccaccacagccccccacccatcaagcttcagtcgggctgctggacacccctcggagccgtgagcgctcaccatcccctctgcgcggcaacgtggtcccaagcccactgcccactcgccggacgaggaccttctcggcgacggtgcgggcttcacagggccccgtctacaaaggagtctgcaaatgcttctgccggtccaagggccatggcttcattaccccagctgatggcggccccgacatcttcctgcacatctctgatgtggaaggggagtatgtcccagtggaaggcgacgaggtcacctataaaatgtgctccatcccacccaagaatgagaagctgcaggccgtggaggtcgtcatcactcacctggcaccaggcaccaagcatgagacctggtctggacatgtcatcagctcctaggagatggtggaagcaccccttgtcctgtgcttgtgggagactttgcggggaggaggcagcagacactggagatgacattcttccacacgagacggggcttcagccgggcatggtccctctcaagtatctcctggaggaaggggtatggggggcaggtgtggggtgtggggtgttcccggccatcagcacagcctatgaccattgcaacaacctctcaccatctgaagagcattaaaagcatttaaaaaggagaggtgcccactggtggctgagtggaggttccaaccccatcccagggagtggatcaagggtggtatttctccagctgctcagacacatgggctcaacccacagaatccctcttcctcctggagctggaggccccagattcccagatctggccccctggcagcctgacagggaccttgcgtgacttctccaaggcaaatttccacctaagtgccccttgcgcctctcctggggcctgggcaaagcagttttctaattcttggcttggttggttctaggggagctggcttgaagtgggtggggaaaggcgggggtggcggtctttggattggacggatgttgccttttggtgcctttgcagtgggaggcggcatagctgcctgtctggggaagacagttctcccagcactcccacccctgggcacagcaggctggtactgggaggctgaacccctcttagagcctgaccttttcatctgccttctggttgtgtgaccatcactcaacagccatttcacagcccctgtaattatggcggcggggggctggggtggtggtggtgggaagggcttgtggagaggacacagtctttgtttaaaaactttgtcccgatccatccagaaaagagtaggtagcttgcatcctgacagcctggcaaagtcaagaaagttgaaggagaaacatacctttggagagggggttttctttaaaactagtgttaagaaatgcttagggattttttttttcttatttttcataactaaagctttcacccagagccggctctgtttgcactttgctgccgacattgcaaactttttggcagggtgggagactgagtctcattctgtcacccaggctggagtgcagtggcccgatctcagcttactgcaacctctgccctccagggttctggcaattccgcctcagtctcctgagtagctgggattacaggcatgcgccaccacacccggttaatttttgtatttttagtagagaccaggtttcatcatgttgggcaggatggtcttgaacccctgacctcaggtgatctgcccatctcggcctctcaaagtgctgggattacaagtgtgagccatcgcgcccggcctgcaaacttttttgtaggtatttctggtaaacaaatccttaggttatctttgctgtggttgtggtttggctttagtcatgatttcaaagtagaaatagctaggcattattttttgaaatatatgacctatatgtagtcaagaatccactgaacagagggaagcaaaccttttggaaactggcttttgggcagacagtaaacgtccagtttgatgctggaagcatgaacagcttcatcaggtaggtactcctcaactctgatgagtttgtcctttcagcctaagggggtggaagggagttgtttgagaatagcaaatacgcatgttgattgcgagtgtgtggagacaaaggcagttcccaccacagttaggtcctggccgttgtttcctcgcctgcgatgctccttgtacgtcctcaccctcctctcccgcctctgccttctgctgggtcaaaggtggcctttttctctccagccttgaattgttccctgttggcttcccaagggcccatctgctggtacagtccacacttccaaagccaagacccgagagggctttcactgccccaagcctctctcctgtgaccttgggattctgtcttggcagaatcctttgtcagcggctcttactctgtccttcctgtttggccacagctctttcaatcaatgggtattctagaaccgcaggatgtcagagctggaagggacgcgataccggtttacacaaggggaaactcctcgaggctctgggagaaagatggctgatgggaggcaagatctggattcaggaatcctcaattttagctctcgctctgtcaccaaaaccctccatcccgtcgacgcggccgcgaatttagtagtagta

SEQ ID NO: 291945 - DNA, 2015 bp, Homo sapiens
agcggagtcggagcgaagcggctggcggagcagaacggattgcagggtcagccatgtcatctgagcctcccccaccaccacagccccccacccatcaagcttcagtcgggctgctggacacccctcggagccgtgagcgctcaccatcccctctgcgcggcaacgtggtcccaagcccactgcccactcgccggacgaggaccttctcggcgacggtgcgggcttcacagggccccgtctacaaaggagtctgcaaatgcttctgccggtccaagggccatggcttcattaccccagctgatggcggccccgacatcttcctgcacatctctgatgtggaaggggagtatgtcccagtggaaggcgacgaggtcacctataaaatgtgctccatcccacccaagaatgagaagctgcaggccgtggaggtcgtcatcactcacctggcaccaggcaccaagcatgagacctggtctggacatgtcatcagctcctaggagatggtggaagcaccccttgtcctgtgcttgtgggagactttgcggggaggaggcagcagacactggagatgacattcttccacacgagacggggcttcagccgggcatggtccctctcaagtatctcctggaggaaggggtatggggggcaggtgtggggtgtggggtgttcccggccatcagcacagcctatgaccattgcaacaacctctcaccatctgaagagcattaaaagcatttaaaaaggagaggtgcccactggtggctgagtggaggttccaaccccatcccagggagtggatcaagggtggtatttctccagctgctcagacacatgggctcaacccacagaatccctcttcctcctggagctggaggccccagattcccagatctggccccctggcagcctgacagggaccttgcgtgacttctccaaggcaaatttccacctaagtgccccttgcgcctctcctggggcctgggcaaagcagttttctaattcttggcttggttggttctaggggagctggcttgaagtgggtggggaaaggcgggggtggcggtctttggattggacggatgttgccttttggtgcctttgcagtgggaggcggcatagctgcctgtctggggaagacagttctcccagcactcccacccctgggcacagcaggctggtactgggaggctgaacccctcttagagcctgaccttttcatctgccttctggttgtgtgaccatcactcaacagccatttcacagcccctgtaattatggcggcggggggctggggtggtggtggtgggaagggcttgtggagaggacacagtctttgtttaaaaactttgtcccgatccatccagaaaagagtaggtagcttgcatcctgacagcctggcaaagtcaagaaagttgaaggagaaacatacctttggagagggggttttctttaaaactagtgttaagaaatgcttagggattttttttttcttatttttcataactaaagctttcacccagagccggctctgtttgcactttgctgccgacattgcaaactttttggcagggtgggagactgagtctcattctgtcacccaggctggagtgcagtggcccgatctcagcttactgcaacctctgccctccagggttctggcaattccgcctcagtctcctgagtagctgggattacaggcatgcgccaccacacccggttaatttttgtatttttagtagagaccaggtttcatcatgttgggcaggatggtcttgaacccctgacctcaggtgatctgcccatctcggcctctcaaagtgctgggattacaagtgtgagccatcgcgcccggcctgcaaacttttttgtaggtatttctggtaaacaaatccttaggtacttggcggggggggggcgtcctgatcacggaaacaccggctttggaacttaccttgtaacccgccgggccctggctgttgcgccaccctgtggcacagacccgggcccaggtc

SEQ ID NO: 291946 - DNA, 2065 bp, Homo sapiens
agcggagtcggagcgaagcggctggcggagcagaacggattgcagggtcagccatgtcatctgagcctcccccaccaccacagccccccacccatcaagcttcagtcgggctgctggacacccctcggagccgtgagcgctcaccatcccctctgcgcggcaacgtggtcccaagcccactgcccactcgccggacgaggaccttctcggcgacggtgcgggcttcacagggccccgtctacaaaggagtctgcaaatgcttctgccggtccaagggccatggcttcattaccccagctgatggcggccccgacatcttcctgcacatctctgatgtggaaggggagtatgtcccagtggaaggcgacgaggtcacctataaaatgtgctccatcccacccaagaatgagaagctgcaggccgtggaggtcgtcatcactcacctggcaccaggcaccaagcatgagacctggtctggacatgtcatcagctcctaggagatggtggaagcaccccttgtcctgtgcttgtgggagactttgcggggaggaggcagcagacactggagatgacattcttccacacgagacggggcttcagccgggcatggtccctctcaagtatctcctggaggaaggggtatggggggcaggtgtggggtgtggggtgttcccggccatcagcacagcctatgaccattgcaacaacctctcaccatctgaagagcattaaaagcatttaaaaaggagaggtgcccactggtggctgagtggaggttccaaccccatcccagggagtggatcaagggtggtatttctccagctgctcagacacatgggctcaacccacagaatccctcttcctcctggagctggaggccccagattcccagatctggccccctggcagcctgacagggaccttgcgtgacttctccaaggcaaatttccacctaagtgccccttgcgcctctcctggggcctgggcaaagcagttttctaattcttggcttggttggttctaggggagctggcttgaagtgggtggggaaaggcgggggtggcggtctttggattggacggatgttgccttttggtgcctttgcagtgggaggcggcatagctgcctgtctggggaagacagttctcccagcactcccacccctgggcacagcaggctggtactgggaggctgaacccctcttagagcctgaccttttcatctgccttctggttgtgtgaccatcactcaacagccatttcacagcccctgtaattatggcggcggggggctggggtggtggtggtgggaagggcttgtggagaggacacagtctttgtttaaaaactttgtcccgatccatccagaaaagagtaggtagcttgcatcctgacagcctggcaaagtcaagaaagttgaaggagaaacatacctttggagagggggttttctttaaaactagtgttaagaaatgcttagggattttttttttcttatttttcataactaaagctttcacccagagccggctctgtttgcactttgctgccgacattgcaaactttttggcagggtgggagactgagtctcattctgtcacccaggctggagtgcagtggcccgatctcaaaaacaatagcaacaacaacaacaaaaaacaaaactgaaggtgggactgggaagacgtttgggaaagcagcctcgggtgaaggaggtggaatgagttctacgtcttgactttggggtgccgtggcaggcagcgtggaggttgcctgtcgttcaggttggaggagcctgcccgggctgaggtggccagctggggcccagagccagaacacttgggaggggtggagaggaagcagcagcccttggagaggaagtgattcaaaaccacgtatgcctggatgtgtccggactacggcaacatctgcccaactgccttctcctggcccctgtgggcactccccttccagtagctggagagaccttcccggacagatcatgagcatgccccacacctctccctcgggatcaggttcaagctcaacttcctggctagcctctc

SEQ ID NO: 291947 - DNA, 3266 bp, Homo sapiens
ccacctgttctctgggtgcagggaaaactcttcccgccctcccagctgcttttgcctttgggcgggagccctggacgggggactcgccggacggtggggcgaggcccggggggcgtcgcacgcgggaagcagagcccggcgggggaggtggggagccgtcctggcgccgcgcgattagccgcatctgggggaggaggagccgccgggcgcgctgggcccgggtgtttgcgcccggatgggggtgggggtgccctaggcgctggagaaaaacttcacccgcgcccacaggccccctttccgcaggctgcgctggcggttcaggtttgcaggccggaagtgaaatgttcttttttgatttttaaaaaggaagcctccggccctatggttttctggggttggagtggatgtgtgtgctgggggaggcggagacgtcccgctccaggcagggccttgggtcttaataggtggggaaatctctgccaaataggaggcctctcggagcctcagtttccccatctgcagactgggctctgacttcttctggcatgagagggtgtgtgagagtaaaaggaggcagctagccccgtgccgggagacacgtcagccatgtcatctgagcctcccccaccaccacagccccccacccatcaagcttcagtcgggctgctggacacccctcggagccgtgagcgctcaccatcccctctgcgcggcaacgtggtcccaagcccactgcccactcgccggacgaggaccttctcggcgacggtgcgggcttcacagggccccgtctacaaaggagtctgcaaatgcttctgccggtccaagggccatggcttcattaccccagctgatggcggccccgacatcttcctgcacatctctgatgtggaaggggagtatgtcccagtggaaggcgacgaggtcacctataaaatgtgctccatcccacccaagaatgagaagctgcaggccgtggaggtcgtcatcactcacctggcaccaggcaccaagcatgagacctggtctggacatgtcatcagctcctaggagatggtggaagcaccccttgtcctgtgcttgtgggagactttgcggggaggaggcagcagacactggagatgacattcttccacacgagacggggcttcagccgggcatggtccctctcaagtatctcctggaggaaggggtatggggggcaggtgtggggtgtggggtgttcccggccatcagcacagcctatgaccattgcaacaacctctcaccatctgaagagcattaaaagcatttaaaaaggagaggtgcccactggtggctgagtggaggttccaaccccatcccagggagtggatcaagggtggtatttctccagctgctcagacacatgggctcaacccacagaatccctcttcctcctggagctggaggccccagattcccagatctggccccctggcagcctgacagggaccttgcgtgacttctccaaggcaaatttccacctaagtgccccttgcgcctctcctggggcctgggcaaagcagttttctaattcttggcttggttggttctaggggagctggcttgaagtgggtggggaaaggcgggggtggcggtctttggattggacggatgttgccttttggtgcctttgcagtgggaggcggcatagctgcctgtctggggaagacagttctcccagcactcccacccctgggcacagcaggctggtactgggaggctgaacccctcttagagcctgaccttttcatctgccttctggttgtgtgaccatcactcaacagccatttcacagcccctgtaattatggcggcggggggctggggtggtggtggtgggaagggcttgtggagaggacacagtctttgtttaaaaactttgtcccgatccatccagaaaagagtaggtagcttgcatcctgacagcctggcaaagtcaagaaagttgaaggagaaacatacctttggagagggggttttctttaaaactagtgttaagaaatgcttagggattttttttttcttatttttcataactaaagctttcacccagagccggctctgtttgcactttgctgccgacattgcaaactttttggcagggtgggagactgagtctcattctgtcacccaggctggagtgcagtggcccgatctcagcttactgcaacctctgccctccagggttctggcaattccgcctcagtctcctgagtagctgggattacaggcatgcgccaccacacccggttaatttttgtatttttagtagagaccaggtttcatcatgttgggcaggatggtcttgaacccctgacctcaggtgatctgcccatctcggcctctcaaagtgctgggattacaagtgtgagccatcgcgcccggcctgcaaacttttttgtaggtatttctggtaaacaaatccttaggttatctttgctgtggttgtggtttggctttagtcatgatttcaaagtagaaatagctaggcattattttttgaaatatatgacctatatgtagtcaagaatccactgaacagagggaagcaaaccttttggaaactggcttttgggcagacagtaaacgtccagtttgatgctggaagcatgaacagcttcatcaggtaggtactcctcaactctgatgagtttgtcctttcagcctaagggggtggaagggagttgtttgagaatagcaaatacgcatgttgattgcgagtgtgtggagacaaaggcagttcccaccacagttaggtcctggccgttgtttcctcgcctgcgatgctccttgtacgtcctcaccctcctctcccgcctctgccttctgctgggtcaaaggtggcctttttctctccagccttgaattgttccctgttggcttcccaagggcccatctgctggtacagtccacacttccaaagccaagacccgagagggctttcactgccccaagcctctctcctgtgaccttgggattctgtcttggcagaatcctttgtcagcggctcttactctgtccttcctgtttggccacagctctttcaatcaatgggtattctagaaccgcaggatgtcagagctggaagggacgcgataccggtttacacaaggggaaactcctcgaggctctgggagggacggagggttttggtgacagagcgagagctaaaattgaggattcctgaatccagatcttgcctcccatcagccatctttctcccaataaatttttgttttgtgc

SEQ ID NO: 291948 - DNA, 2783 bp, Homo sapiens
ggtcatgcgggtgccctggcccccaggccagcagctggggcctttttgaggtgggggctccccggactcaggagttcctccttggccgcggctgtagctgagagaagggacaggaggtcagccatgtcatctgagcctcccccaccaccacagccccccacccatcaagcttcagtcgggctgctggacacccctcggagccgtgagcgctcaccatcccctctgcgcggcaacgtggtcccaagcccactgcccactcgccggacgaggaccttctcggcgacggtgcgggcttcacagggccccgtctacaaaggagtctgcaaatgcttctgccggtccaagggccatggcttcattaccccagctgatggcggccccgacatcttcctgcacatctctgatgtggaaggggagtatgtcccagtggaaggcgacgaggtcacctataaaatgtgctccatcccacccaagaatgagaagctgcaggccgtggaggtcgtcatcactcacctggcaccaggcaccaagcatgagacctggtctggacatgtcatcagctcctaggagatggtggaagcaccccttgtcctgtgcttgtgggagactttgcggggaggaggcagcagacactggagatgacattcttccacacgagacggggcttcagccgggcatggtccctctcaagtatctcctggaggaaggggtatggggggcaggtgtggggtgtggggtgttcccggccatcagcacagcctatgaccattgcaacaacctctcaccatctgaagagcattaaaagcatttaaaaaggagaggtgcccactggtggctgagtggaggttccaaccccatcccagggagtggatcaagggtggtatttctccagctgctcagacacatgggctcaacccacagaatccctcttcctcctggagctggaggccccagattcccagatctggccccctggcagcctgacagggaccttgcgtgacttctccaaggcaaatttccacctaagtgccccttgcgcctctcctggggcctgggcaaagcagttttctaattcttggcttggttggttctaggggagctggcttgaagtgggtggggaaaggcgggggtggcggtctttggattggacggatgttgccttttggtgcctttgcagtgggaggcggcatagctgcctgtctggggaagacagttctcccagcactcccacccctgggcacagcaggctggtactgggaggctgaacccctcttagagcctgaccttttcatctgccttctggttgtgtgaccatcactcaacagccatttcacagcccctgtaattatggcggcggggggctggggtggtggtggtgggaagggcttgtggagaggacacagtctttgtttaaaaactttgtcccgatccatccagaaaagagtaggtagcttgcatcctgacagcctggcaaagtcaagaaagttgaaggagaaacatacctttggagagggggttttctttaaaactagtgttaagaaatgcttagggattttttttttcttatttttcataactaaagctttcacccagagccggctctgtttgcactttgctgccgacattgcaaactttttggcagggtgggagactgagtctcattctgtcacccaggctggagtgcagtggcccgatctcagcttactgcaacctctgccctccagggttctggcaattccgcctcagtctcctgagtagctgggattacaggcatgcgccaccacacccggttaatttttgtatttttagtagagaccaggtttcatcatgttgggcaggatggtcttgaacccctgacctcaggtgatctgcccatctcggcctctcaaagtgctgggattacaagtgtgagccatcgcgcccggcctgcaaacttttttgtaggtatttctggtaaacaaatccttaggttatctttgctgtggttgtggtttggctttagtcatgatttcaaagtagaaatagctaggcattattttttgaaatatatgacctatatgtagtcaagaatccactgaacagagggaagcaaaccttttggaaactggcttttgggcagacagtaaacgtccagtttgatgctggaagcatgaacagcttcatcaggtaggtactcctcaactctgatgagtttgtcctttcagcctaagggggtggaagggagttgtttgagaatagcaaatacgcatgttgattgcgagtgtgtggagacaaaggcagttcccaccacagttaggtcctggccgttgtttcctcgcctgcgatgctccttgtacgtcctcaccctcctctcccgcctctgccttctgctgggtcaaaggtggcctttttctctccagccttgaattgttccctgttggcttcccaagggcccatctgctggtacagtccacacttccaaagccaagacccgagagggctttcactgccccaagcctctctcctgtgaccttgggattctgtcttggcagaatcctttgtcagcggctcttactctgtccttcctgtttggccacagctctttcaatcaatgggtattctagaaccgcaggatgtcagagctggaagggacgcgataccggtttacacaaggggaaactcctcgaggctctgggagggacggagggttttggtgacagagcgagagctaaaattgaggattcctgaatccagatcttgcctcccatcagccatctttctcccaataaatttttgttttgtgc

SEQ ID NO: 291949 - DNA, 3012 bp, Homo sapiens
ggtcatgcgggtgccctggcccccaggccagcagctggggcctttttgaggtgggggctccccggactcaggagttcctccttggccgcggctgtagctgagagaagggacaggaggtaggatgccacctcctccagaagcgtggtgacccgggctgtgtggaaattcactgggcctgatggagctggatgcagccttggaaattctccctttccctttgggctcccgcagcaggccccccagtcctgggtgcaggcttgtgacagctgctcagggatccaaacgtggcgcttgagctctctgcgatgtgttccacagttccctggaggcggacactgcgtgagggtcagccatgtcatctgagcctcccccaccaccacagccccccacccatcaagcttcagtcgggctgctggacacccctcggagccgtgagcgctcaccatcccctctgcgcggcaacgtggtcccaagcccactgcccactcgccggacgaggaccttctcggcgacggtgcgggcttcacagggccccgtctacaaaggagtctgcaaatgcttctgccggtccaagggccatggcttcattaccccagctgatggcggccccgacatcttcctgcacatctctgatgtggaaggggagtatgtcccagtggaaggcgacgaggtcacctataaaatgtgctccatcccacccaagaatgagaagctgcaggccgtggaggtcgtcatcactcacctggcaccaggcaccaagcatgagacctggtctggacatgtcatcagctcctaggagatggtggaagcaccccttgtcctgtgcttgtgggagactttgcggggaggaggcagcagacactggagatgacattcttccacacgagacggggcttcagccgggcatggtccctctcaagtatctcctggaggaaggggtatggggggcaggtgtggggtgtggggtgttcccggccatcagcacagcctatgaccattgcaacaacctctcaccatctgaagagcattaaaagcatttaaaaaggagaggtgcccactggtggctgagtggaggttccaaccccatcccagggagtggatcaagggtggtatttctccagctgctcagacacatgggctcaacccacagaatccctcttcctcctggagctggaggccccagattcccagatctggccccctggcagcctgacagggaccttgcgtgacttctccaaggcaaatttccacctaagtgccccttgcgcctctcctggggcctgggcaaagcagttttctaattcttggcttggttggttctaggggagctggcttgaagtgggtggggaaaggcgggggtggcggtctttggattggacggatgttgccttttggtgcctttgcagtgggaggcggcatagctgcctgtctggggaagacagttctcccagcactcccacccctgggcacagcaggctggtactgggaggctgaacccctcttagagcctgaccttttcatctgccttctggttgtgtgaccatcactcaacagccatttcacagcccctgtaattatggcggcggggggctggggtggtggtggtgggaagggcttgtggagaggacacagtctttgtttaaaaactttgtcccgatccatccagaaaagagtaggtagcttgcatcctgacagcctggcaaagtcaagaaagttgaaggagaaacatacctttggagagggggttttctttaaaactagtgttaagaaatgcttagggattttttttttcttatttttcataactaaagctttcacccagagccggctctgtttgcactttgctgccgacattgcaaactttttggcagggtgggagactgagtctcattctgtcacccaggctggagtgcagtggcccgatctcagcttactgcaacctctgccctccagggttctggcaattccgcctcagtctcctgagtagctgggattacaggcatgcgccaccacacccggttaatttttgtatttttagtagagaccaggtttcatcatgttgggcaggatggtcttgaacccctgacctcaggtgatctgcccatctcggcctctcaaagtgctgggattacaagtgtgagccatcgcgcccggcctgcaaacttttttgtaggtatttctggtaaacaaatccttaggttatctttgctgtggttgtggtttggctttagtcatgatttcaaagtagaaatagctaggcattattttttgaaatatatgacctatatgtagtcaagaatccactgaacagagggaagcaaaccttttggaaactggcttttgggcagacagtaaacgtccagtttgatgctggaagcatgaacagcttcatcaggtaggtactcctcaactctgatgagtttgtcctttcagcctaagggggtggaagggagttgtttgagaatagcaaatacgcatgttgattgcgagtgtgtggagacaaaggcagttcccaccacagttaggtcctggccgttgtttcctcgcctgcgatgctccttgtacgtcctcaccctcctctcccgcctctgccttctgctgggtcaaaggtggcctttttctctccagccttgaattgttccctgttggcttcccaagggcccatctgctggtacagtccacacttccaaagccaagacccgagagggctttcactgccccaagcctctctcctgtgaccttgggattctgtcttggcagaatcctttgtcagcggctcttactctgtccttcctgtttggccacagctctttcaatcaatgggtattctagaaccgcaggatgtcagagctggaagggacgcgataccggtttacacaaggggaaactcctcgaggctctgggagggacggagggttttggtgacagagcgagagctaaaattgaggattcctgaatccagatcttgcctcccatcagccatctttctcccaataaatttttgttttgtgc

SEQ ID NO: 291950 - DNA, 3471 bp, Homo sapiens
ccacctgttctctgggtgcagggaaaactcttcccgccctcccagctgcttttgcctttgggcgggagccctggacgggggactcgccggacggtggggcgaggcccggggggcgtcgcacgcgggaagcagagcccggcgggggaggtggggagccgtcctggcgccgcgcgattagccgcatctgggggaggaggagccgccgggcgcgctgggcccgggtgtttgcgcccggatgggggtgggggtgccctaggcgctggagaaaaacttcacccgcgcccacaggccccctttccgcaggctgcgctggcggttcaggtttgcaggccggaagtgaaatgttcttttttgatttttaaaaaggaagcctccggccctatggttttctggggttggagtggatgtgtgtgctgggggaggcggagacgtcccgctccaggcagggccttgggtcttaataggtggggaaatctctgccaaataggaggcctctcggagcctcagtttccccatctgcagactgggctctgacttcttctggcatgagagggtgtgtgagagtaaaaggaggcagctagccccgtgccgggagacaccgtggtgacccgggctgtgtggaaattcactgggcctgatggagctggatgcagccttggaaattctccctttccctttgggctcccgcagcaggccccccagtcctgggtgcaggcttgtgacagctgctcagggatccaaacgtggcgcttgagctctctgcgatgtgttccacagttccctggaggcggacactgcgtgagggtcagccatgtcatctgagcctcccccaccaccacagccccccacccatcaagcttcagtcgggctgctggacacccctcggagccgtgagcgctcaccatcccctctgcgcggcaacgtggtcccaagcccactgcccactcgccggacgaggaccttctcggcgacggtgcgggcttcacagggccccgtctacaaaggagtctgcaaatgcttctgccggtccaagggccatggcttcattaccccagctgatggcggccccgacatcttcctgcacatctctgatgtggaaggggagtatgtcccagtggaaggcgacgaggtcacctataaaatgtgctccatcccacccaagaatgagaagctgcaggccgtggaggtcgtcatcactcacctggcaccaggcaccaagcatgagacctggtctggacatgtcatcagctcctaggagatggtggaagcaccccttgtcctgtgcttgtgggagactttgcggggaggaggcagcagacactggagatgacattcttccacacgagacggggcttcagccgggcatggtccctctcaagtatctcctggaggaaggggtatggggggcaggtgtggggtgtggggtgttcccggccatcagcacagcctatgaccattgcaacaacctctcaccatctgaagagcattaaaagcatttaaaaaggagaggtgcccactggtggctgagtggaggttccaaccccatcccagggagtggatcaagggtggtatttctccagctgctcagacacatgggctcaacccacagaatccctcttcctcctggagctggaggccccagattcccagatctggccccctggcagcctgacagggaccttgcgtgacttctccaaggcaaatttccacctaagtgccccttgcgcctctcctggggcctgggcaaagcagttttctaattcttggcttggttggttctaggggagctggcttgaagtgggtggggaaaggcgggggtggcggtctttggattggacggatgttgccttttggtgcctttgcagtgggaggcggcatagctgcctgtctggggaagacagttctcccagcactcccacccctgggcacagcaggctggtactgggaggctgaacccctcttagagcctgaccttttcatctgccttctggttgtgtgaccatcactcaacagccatttcacagcccctgtaattatggcggcggggggctggggtggtggtggtgggaagggcttgtggagaggacacagtctttgtttaaaaactttgtcccgatccatccagaaaagagtaggtagcttgcatcctgacagcctggcaaagtcaagaaagttgaaggagaaacatacctttggagagggggttttctttaaaactagtgttaagaaatgcttagggattttttttttcttatttttcataactaaagctttcacccagagccggctctgtttgcactttgctgccgacattgcaaactttttggcagggtgggagactgagtctcattctgtcacccaggctggagtgcagtggcccgatctcagcttactgcaacctctgccctccagggttctggcaattccgcctcagtctcctgagtagctgggattacaggcatgcgccaccacacccggttaatttttgtatttttagtagagaccaggtttcatcatgttgggcaggatggtcttgaacccctgacctcaggtgatctgcccatctcggcctctcaaagtgctgggattacaagtgtgagccatcgcgcccggcctgcaaacttttttgtaggtatttctggtaaacaaatccttaggttatctttgctgtggttgtggtttggctttagtcatgatttcaaagtagaaatagctaggcattattttttgaaatatatgacctatatgtagtcaagaatccactgaacagagggaagcaaaccttttggaaactggcttttgggcagacagtaaacgtccagtttgatgctggaagcatgaacagcttcatcaggtaggtactcctcaactctgatgagtttgtcctttcagcctaagggggtggaagggagttgtttgagaatagcaaatacgcatgttgattgcgagtgtgtggagacaaaggcagttcccaccacagttaggtcctggccgttgtttcctcgcctgcgatgctccttgtacgtcctcaccctcctctcccgcctctgccttctgctgggtcaaaggtggcctttttctctccagccttgaattgttccctgttggcttcccaagggcccatctgctggtacagtccacacttccaaagccaagacccgagagggctttcactgccccaagcctctctcctgtgaccttgggattctgtcttggcagaatcctttgtcagcggctcttactctgtccttcctgtttggccacagctctttcaatcaatgggtattctagaaccgcaggatgtcagagctggaagggacgcgataccggtttacacaaggggaaactcctcgaggctctgggagggacggagggttttggtgacagagcgagagctaaaattgaggattcctgaatccagatcttgcctcccatcagccatctttctcccaataaatttttgttttgtgc

SEQ ID NO: 291951 - DNA, 3312 bp, Homo sapiens
aatttgaaaaccccatgggacctgagtcaaaccgatccagggctgctgctgtccctcccggctgtgtggtgttgagtggcgtcctgagttaggcttctccctacttcatctcatacccccatcaccagccctgcgcaggtgccaagtgatgcccacccagctgccccactttgcagattcggaaactgagcccagagatgggaaaggacttacccaagggcctctgactgctggactgtttctctttcccctgaacctcgagctgaggccacgttagagccgacaccttcatattcaatgttcagtgattattgtgtacagcgagtgtcctgctcttgaaaaattgtcaaaagcacagcagcagctagggaattcccgccctccagctggatttaccggtacatactaggggtcacagaaggaatttgatttcataacagcgtggtgacccgggctgtgtggaaattcactgggcctgatggagctggatgcagccttggaaattctccctttccctttgggctcccgcagcaggccccccagtcctgggtgcaggcttgtgacagctgctcagggatccaaacgtggcgcttgagctctctgcgatgtgttccacagttccctggaggcggacactgcgtgagggtcagccatgtcatctgagcctcccccaccaccacagccccccacccatcaagcttcagtcgggctgctggacacccctcggagccgtgagcgctcaccatcccctctgcgcggcaacgtggtcccaagcccactgcccactcgccggacgaggaccttctcggcgacggtgcgggcttcacagggccccgtctacaaaggagtctgcaaatgcttctgccggtccaagggccatggcttcattaccccagctgatggcggccccgacatcttcctgcacatctctgatgtggaaggggagtatgtcccagtggaaggcgacgaggtcacctataaaatgtgctccatcccacccaagaatgagaagctgcaggccgtggaggtcgtcatcactcacctggcaccaggcaccaagcatgagacctggtctggacatgtcatcagctcctaggagatggtggaagcaccccttgtcctgtgcttgtgggagactttgcggggaggaggcagcagacactggagatgacattcttccacacgagacggggcttcagccgggcatggtccctctcaagtatctcctggaggaaggggtatggggggcaggtgtggggtgtggggtgttcccggccatcagcacagcctatgaccattgcaacaacctctcaccatctgaagagcattaaaagcatttaaaaaggagaggtgcccactggtggctgagtggaggttccaaccccatcccagggagtggatcaagggtggtatttctccagctgctcagacacatgggctcaacccacagaatccctcttcctcctggagctggaggccccagattcccagatctggccccctggcagcctgacagggaccttgcgtgacttctccaaggcaaatttccacctaagtgccccttgcgcctctcctggggcctgggcaaagcagttttctaattcttggcttggttggttctaggggagctggcttgaagtgggtggggaaaggcgggggtggcggtctttggattggacggatgttgccttttggtgcctttgcagtgggaggcggcatagctgcctgtctggggaagacagttctcccagcactcccacccctgggcacagcaggctggtactgggaggctgaacccctcttagagcctgaccttttcatctgccttctggttgtgtgaccatcactcaacagccatttcacagcccctgtaattatggcggcggggggctggggtggtggtggtgggaagggcttgtggagaggacacagtctttgtttaaaaactttgtcccgatccatccagaaaagagtaggtagcttgcatcctgacagcctggcaaagtcaagaaagttgaaggagaaacatacctttggagagggggttttctttaaaactagtgttaagaaatgcttagggattttttttttcttatttttcataactaaagctttcacccagagccggctctgtttgcactttgctgccgacattgcaaactttttggcagggtgggagactgagtctcattctgtcacccaggctggagtgcagtggcccgatctcagcttactgcaacctctgccctccagggttctggcaattccgcctcagtctcctgagtagctgggattacaggcatgcgccaccacacccggttaatttttgtatttttagtagagaccaggtttcatcatgttgggcaggatggtcttgaacccctgacctcaggtgatctgcccatctcggcctctcaaagtgctgggattacaagtgtgagccatcgcgcccggcctgcaaacttttttgtaggtatttctggtaaacaaatccttaggttatctttgctgtggttgtggtttggctttagtcatgatttcaaagtagaaatagctaggcattattttttgaaatatatgacctatatgtagtcaagaatccactgaacagagggaagcaaaccttttggaaactggcttttgggcagacagtaaacgtccagtttgatgctggaagcatgaacagcttcatcaggtaggtactcctcaactctgatgagtttgtcctttcagcctaagggggtggaagggagttgtttgagaatagcaaatacgcatgttgattgcgagtgtgtggagacaaaggcagttcccaccacagttaggtcctggccgttgtttcctcgcctgcgatgctccttgtacgtcctcaccctcctctcccgcctctgccttctgctgggtcaaaggtggcctttttctctccagccttgaattgttccctgttggcttcccaagggcccatctgctggtacagtccacacttccaaagccaagacccgagagggctttcactgccccaagcctctctcctgtgaccttgggattctgtcttggcagaatcctttgtcagcggctcttactctgtccttcctgtttggccacagctctttcaatcaatgggtattctagaaccgcaggatgtcagagctggaagggacgcgataccggtttacacaaggggaaactcctcgaggctctgggagggacggagggttttggtgacagagcgagagctaaaattgaggattcctgaatccagatcttgcctcccatcagccatctttctcccaataaatttttgttttgtgc

SEQ ID NO: 291952 - DNA, 3411 bp, Homo sapiens
agcggagtcggagcgaagcggctggcggagcagaacggattgcagggtcagccatgtcatctgagcctcccccaccaccacagccccccacccatcaagcttcagtcgggctgctggacacccctcggagccgtgagcgctcaccatcccctctgcgcggcaacgtggtcccaagcccactgcccactcgccggacgaggaccttctcggcgtgagtctggagcaggctggggacgcgttctcagatggatctcttgcctgaggccagagattcactgtgtctctggccatttttgggcctatgtcccggactgccaaataggcagacctggggctgggccgtgggctgagggtgagaaactaggaaggcgccttgtaaattcagggtactgcccagcccagaagaacctgttaccagctgggagtggcaatgggtgggcagttgctggggtcagaatcgctgggctttaaccacacatgagagtctggttccctgtgagactgtgaattctgcagctgcaaaatgggcacagcaccagggctgcaaaggacccacataatgcctggcagatgcaggtctcaggccttgcgagtggaggatgcttgtgttattaatagtaaatcattagtttctggagggatgttcagtgatgttttagttcaactccctctttccaggagggaaaacaggcccgagaaaattggccagggtcatccaaagagtcctttcccccagcgtctttgtgagcggctcccagggttgagggttgtgcagtcctcagcctgtgtgactgtacatggcggtcctggccagggcttgatggggcacagctgtgggcaggggctggaatgagctttgtgtgcccaggagcgctgatggggcccctgacatttccccctctctgtcaggacggtgcgggcttcacagggccccgtctacaaaggagtctgcaaatgcttctgccggtccaagggccatggcttcattaccccagctgatggcggccccgacatcttcctgcacatctctgatgtggaaggggagtatgtcccagtggaaggcgacgaggtcacctataaaatgtgctccatcccacccaagaatgagaagctgcaggccgtggaggtcgtcatcactcacctggcaccaggcaccaagcatgagacctggtctggacatgtcatcagctcctaggagatggtggaagcaccccttgtcctgtgcttgtgggagactttgcggggaggaggcagcagacactggagatgacattcttccacacgagacggggcttcagccgggcatggtccctctcaagtatctcctggaggaaggggtatggggggcaggtgtggggtgtggggtgttcccggccatcagcacagcctatgaccattgcaacaacctctcaccatctgaagagcattaaaagcatttaaaaaggagaggtgcccactggtggctgagtggaggttccaaccccatcccagggagtggatcaagggtggtatttctccagctgctcagacacatgggctcaacccacagaatccctcttcctcctggagctggaggccccagattcccagatctggccccctggcagcctgacagggaccttgcgtgacttctccaaggcaaatttccacctaagtgccccttgcgcctctcctggggcctgggcaaagcagttttctaattcttggcttggttggttctaggggagctggcttgaagtgggtggggaaaggcgggggtggcggtctttggattggacggatgttgccttttggtgcctttgcagtgggaggcggcatagctgcctgtctggggaagacagttctcccagcactcccacccctgggcacagcaggctggtactgggaggctgaacccctcttagagcctgaccttttcatctgccttctggttgtgtgaccatcactcaacagccatttcacagcccctgtaattatggcggcggggggctggggtggtggtggtgggaagggcttgtggagaggacacagtctttgtttaaaaactttgtcccgatccatccagaaaagagtaggtagcttgcatcctgacagcctggcaaagtcaagaaagttgaaggagaaacatacctttggagagggggttttctttaaaactagtgttaagaaatgcttagggattttttttttcttatttttcataactaaagctttcacccagagccggctctgtttgcactttgctgccgacattgcaaactttttggcagggtgggagactgagtctcattctgtcacccaggctggagtgcagtggcccgatctcagcttactgcaacctctgccctccagggttctggcaattccgcctcagtctcctgagtagctgggattacaggcatgcgccaccacacccggttaatttttgtatttttagtagagaccaggtttcatcatgttgggcaggatggtcttgaacccctgacctcaggtgatctgcccatctcggcctctcaaagtgctgggattacaagtgtgagccatcgcgcccggcctgcaaacttttttgtaggtatttctggtaaacaaatccttaggttatctttgctgtggttgtggtttggctttagtcatgatttcaaagtagaaatagctaggcattattttttgaaatatatgacctatatgtagtcaagaatccactgaacagagggaagcaaaccttttggaaactggcttttgggcagacagtaaacgtccagtttgatgctggaagcatgaacagcttcatcaggtaggtactcctcaactctgatgagtttgtcctttcagcctaagggggtggaagggagttgtttgagaatagcaaatacgcatgttgattgcgagtgtgtggagacaaaggcagttcccaccacagttaggtcctggccgttgtttcctcgcctgcgatgctccttgtacgtcctcaccctcctctcccgcctctgccttctgctgggtcaaaggtggcctttttctctccagccttgaattgttccctgttggcttcccaagggcccatctgctggtacagtccacacttccaaagccaagacccgagagggctttcactgccccaagcctctctcctgtgaccttgggattctgtcttggcagaatcctttgtcagcggctcttactctgtccttcctgtttggccacagctctttcaatcaatgggtattctagaaccgcaggatgtcagagctggaagggacgcgataccggtttacacaaggggaaactcctcgaggctctgggagggacggagggttttggtgacagagcgagagctaaaattgaggattcctgaatccagatcttgcctcccatcagccatctttctcccaataaatttttgttttgtgc

SEQ ID NO: 291953 - DNA, 2655 bp, Homo sapiens
agcggagtcggagcgaagcggctggcggagcagaacggattgcagggtcagccatgtcatctgagcctcccccaccaccacagccccccacccatcaagcttcagtcgggctgctggacacccctcggagccgtgagcgctcaccatcccctctgcgcggcaacgtggtcccaagcccactgcccactcgccggacgaggaccttctcggcgacggtgcgggcttcacagggccccgtctacaaaggagtctgcaaatgcttctgccggtccaagggccatggcttcattaccccagctgatggcggccccgacatcttcctgcacatctctgatgtggaaggggagtatgtcccagtggaaggcgacgaggtcacctatctcacctggcaccaggcaccaagcatgagacctggtctggacatgtcatcagctcctaggagatggtggaagcaccccttgtcctgtgcttgtgggagactttgcggggaggaggcagcagacactggagatgacattcttccacacgagacggggcttcagccgggcatggtccctctcaagtatctcctggaggaaggggtatggggggcaggtgtggggtgtggggtgttcccggccatcagcacagcctatgaccattgcaacaacctctcaccatctgaagagcattaaaagcatttaaaaaggagaggtgcccactggtggctgagtggaggttccaaccccatcccagggagtggatcaagggtggtatttctccagctgctcagacacatgggctcaacccacagaatccctcttcctcctggagctggaggccccagattcccagatctggccccctggcagcctgacagggaccttgcgtgacttctccaaggcaaatttccacctaagtgccccttgcgcctctcctggggcctgggcaaagcagttttctaattcttggcttggttggttctaggggagctggcttgaagtgggtggggaaaggcgggggtggcggtctttggattggacggatgttgccttttggtgcctttgcagtgggaggcggcatagctgcctgtctggggaagacagttctcccagcactcccacccctgggcacagcaggctggtactgggaggctgaacccctcttagagcctgaccttttcatctgccttctggttgtgtgaccatcactcaacagccatttcacagcccctgtaattatggcggcggggggctggggtggtggtggtgggaagggcttgtggagaggacacagtctttgtttaaaaactttgtcccgatccatccagaaaagagtaggtagcttgcatcctgacagcctggcaaagtcaagaaagttgaaggagaaacatacctttggagagggggttttctttaaaactagtgttaagaaatgcttagggattttttttttcttatttttcataactaaagctttcacccagagccggctctgtttgcactttgctgccgacattgcaaactttttggcagggtgggagactgagtctcattctgtcacccaggctggagtgcagtggcccgatctcagcttactgcaacctctgccctccagggttctggcaattccgcctcagtctcctgagtagctgggattacaggcatgcgccaccacacccggttaatttttgtatttttagtagagaccaggtttcatcatgttgggcaggatggtcttgaacccctgacctcaggtgatctgcccatctcggcctctcaaagtgctgggattacaagtgtgagccatcgcgcccggcctgcaaacttttttgtaggtatttctggtaaacaaatccttaggttatctttgctgtggttgtggtttggctttagtcatgatttcaaagtagaaatagctaggcattattttttgaaatatatgacctatatgtagtcaagaatccactgaacagagggaagcaaaccttttggaaactggcttttgggcagacagtaaacgtccagtttgatgctggaagcatgaacagcttcatcaggtaggtactcctcaactctgatgagtttgtcctttcagcctaagggggtggaagggagttgtttgagaatagcaaatacgcatgttgattgcgagtgtgtggagacaaaggcagttcccaccacagttaggtcctggccgttgtttcctcgcctgcgatgctccttgtacgtcctcaccctcctctcccgcctctgccttctgctgggtcaaaggtggcctttttctctccagccttgaattgttccctgttggcttcccaagggcccatctgctggtacagtccacacttccaaagccaagacccgagagggctttcactgccccaagcctctctcctgtgaccttgggattctgtcttggcagaatcctttgtcagcggctcttactctgtccttcctgtttggccacagctctttcaatcaatgggtattctagaaccgcaggatgtcagagctggaagggacgcgataccggtttacacaaggggaaactcctcgaggctctgggagggacggagggttttggtgacagagcgagagctaaaattgaggattcctgaatccagatcttgcctcccatcagccatctttctcccaataaatttttgttttgtgc

SEQ ID NO: 291954 - DNA, 2897 bp, Homo sapiens
aatttgaaaaccccatgggacctgagtcaaaccgatccagggctgctgctgtccctcccggctgtgtggtgttgagtggcgtcctgagttaggcttctccctacttcatctcatacccccatcaccagccctgcgcaggtgccaagtgatgcccacccagctgccccactttgcagattcggaaactgagcccagagatgggaaaggacttacccaagggcctctgactgctggactgtttctctttcccctgaacctcgagctgaggccacgttagagccgacaccttcatattcaatgttcagtgattattgtgtacagcgagtgtcctgctcttgaaaaattgtcaaaagcacagcagcagctagggaattcccgccctccagctggatttaccggtacatactaggggtcacagaaggaatttgatttcataacagcgtggtgacccgggctgtgtggaaattcactgggcctgatggagctggatgcagccttggaaattctccctttccctttgggctcccgcagcaggccccccagtcctgggtgcaggcttgtgacagctgctcagggatccaaacgtggcgcttgagctctctgcgatgtgttccacagttccctcacctggcaccaggcaccaagcatgagacctggtctggacatgtcatcagctcctaggagatggtggaagcaccccttgtcctgtgcttgtgggagactttgcggggaggaggcagcagacactggagatgacattcttccacacgagacggggcttcagccgggcatggtccctctcaagtatctcctggaggaaggggtatggggggcaggtgtggggtgtggggtgttcccggccatcagcacagcctatgaccattgcaacaacctctcaccatctgaagagcattaaaagcatttaaaaaggagaggtgcccactggtggctgagtggaggttccaaccccatcccagggagtggatcaagggtggtatttctccagctgctcagacacatgggctcaacccacagaatccctcttcctcctggagctggaggccccagattcccagatctggccccctggcagcctgacagggaccttgcgtgacttctccaaggcaaatttccacctaagtgccccttgcgcctctcctggggcctgggcaaagcagttttctaattcttggcttggttggttctaggggagctggcttgaagtgggtggggaaaggcgggggtggcggtctttggattggacggatgttgccttttggtgcctttgcagtgggaggcggcatagctgcctgtctggggaagacagttctcccagcactcccacccctgggcacagcaggctggtactgggaggctgaacccctcttagagcctgaccttttcatctgccttctggttgtgtgaccatcactcaacagccatttcacagcccctgtaattatggcggcggggggctggggtggtggtggtgggaagggcttgtggagaggacacagtctttgtttaaaaactttgtcccgatccatccagaaaagagtaggtagcttgcatcctgacagcctggcaaagtcaagaaagttgaaggagaaacatacctttggagagggggttttctttaaaactagtgttaagaaatgcttagggattttttttttcttatttttcataactaaagctttcacccagagccggctctgtttgcactttgctgccgacattgcaaactttttggcagggtgggagactgagtctcattctgtcacccaggctggagtgcagtggcccgatctcagcttactgcaacctctgccctccagggttctggcaattccgcctcagtctcctgagtagctgggattacaggcatgcgccaccacacccggttaatttttgtatttttagtagagaccaggtttcatcatgttgggcaggatggtcttgaacccctgacctcaggtgatctgcccatctcggcctctcaaagtgctgggattacaagtgtgagccatcgcgcccggcctgcaaacttttttgtaggtatttctggtaaacaaatccttaggttatctttgctgtggttgtggtttggctttagtcatgatttcaaagtagaaatagctaggcattattttttgaaatatatgacctatatgtagtcaagaatccactgaacagagggaagcaaaccttttggaaactggcttttgggcagacagtaaacgtccagtttgatgctggaagcatgaacagcttcatcaggtaggtactcctcaactctgatgagtttgtcctttcagcctaagggggtggaagggagttgtttgagaatagcaaatacgcatgttgattgcgagtgtgtggagacaaaggcagttcccaccacagttaggtcctggccgttgtttcctcgcctgcgatgctccttgtacgtcctcaccctcctctcccgcctctgccttctgctgggtcaaaggtggcctttttctctccagccttgaattgttccctgttggcttcccaagggcccatctgctggtacagtccacacttccaaagccaagacccgagagggctttcactgccccaagcctctctcctgtgaccttgggattctgtcttggcagaatcctttgtcagcggctcttactctgtccttcctgtttggccacagctctttcaatcaatgggtattctagaaccgcaggatgtcagagctggaagggacgcgataccggtttacacaaggggaaactcctcgaggctctgggagggacggagggttttggtgacagagcgagagctaaaattgaggattcctgaatccagatcttgcctcccatcagccatctttctcccaataaatttttgttttgtgc

SEQ ID NO: 291955 - DNA, 973 bp, Homo sapiens
agcggagtcggagcgaagcggctggcggagcagaacggattgcagggtcagccatgtcatctgagcctcccccaccaccacagccccccacccatcaagcttcagtcgggctgctggacacccctcggagccgtgagcgctcaccatcccctctgcgcggcaacgtggtcccaagcccactgcccactcgccggacgaggaccttctcggcgacggtgcgggcttcacagggccccgtctacaaaggagtctgcaaatgcttctgccggtccaagggccatggcttcattaccccagctgatggcggccccgacatcttcctgcacatctctgatgtggaaggggagtatgtcccagtggaaggcgacgaggtcacctataaaatgtgctccatcccacccaagaatgagaagctgcaggccgtggaggtcgtcatcactcacctggcaccaggcaccaagcatgagacctggtctggacatgtcatcagctcctaggagatggtggaagcaccccttgtcctgtgcttgtgggagactttgcggggaggaggcagcagacactggagatgacattcttccacacgagacggggcttcagccgggcatggtccctctcaagtatctcctggaggaaggggtatggggggcaggtgtggggtgtggggtgttcccggccatcagcacagcctatgaccattgcaacaacctctcaccatctgaagagcattaaaagcatttaaaaaaaaaaaaaaaaaaaagaaagaaaaagaaaaagaaaacagaggaaagaaagaaagtaaaagaaaaagattaagaaaatctaacgaggtaaatagaataggcgagaaaaaaaacacagacagacaccagctacgcactatataagtcgagggaggagcaaagcgtagtatagaagagagactgcacaaaaaaaaggctcgagataaaagaacatgtgaagacagagggac

SEQ ID NO: 291956 - DNA, 2011 bp, Homo sapiens
gctaggtacgagctggtgtggaatcggcaccgaggaaagaaaaggagaggtgcccactggtggctgagtggaggttccaaccccatcccagggagtggatcaagggtggtatttctccagctgctcagacacatgggctcaacccacagaatccctcttcctcctggagctggaggccccagattcccagatctggccccctggcagcctgacagggaccttgcgtgacttctccaaggcaaatttccacctaagtgccccttgcgcctctcctggggcctgggcaaagcagttttctaattcttggcttggttggttctaggggagctggcttgaagtgggtggggaaaggcgggggtggcggtctttggattggacggatgttgccttttggtgcctttgcagtgggaggcggcatagctgcctgtctggggaagacagttctcccagcactcccacccctgggcacagcaggctggtactgggaggctgaacccctcttagagcctgaccttttcatctgccttctggttgtgtgaccatcactcaacagccatttcacagcccctgtaattatggcggcggggggctggggtggtggtggtgggaagggcttgtggagaggacacagtctttgtttaaaaactttgtcccgatccatccagaaaagagtaggtagcttgcatcctgacagcctggcaaagtcaagaaagttgaaggagaaacatacctttggagagggggttttctttaaaactagtgttaagaaatgcttagggattttttttttcttatttttcataactaaagctttcacccagagccggctctgtttgcactttgctgccgacattgcaaactttttggcagggtgggagactgagtctcattctgtcacccaggctggagtgcagtggcccgatctcagcttactgcaacctctgccctccagggttctggcaattccgcctcagtctcctgagtagctgggattacaggcatgcgccaccacacccggttaatttttgtatttttagtagagaccaggtttcatcatgttgggcaggatggtcttgaacccctgacctcaggtgatctgcccatctcggcctctcaaagtgctgggattacaagtgtgagccatcgcgcccggcctgcaaacttttttgtaggtatttctggtaaacaaatccttaggttatctttgctgtggttgtggtttggctttagtcatgatttcaaagtagaaatagctaggcattattttttgaaatatatgacctatatgtagtcaagaatccactgaacagagggaagcaaaccttttggaaactggcttttgggcagacagtaaacgtccagtttgatgctggaagcatgaacagcttcatcaggtaggtactcctcaactctgatgagtttgtcctttcagcctaagggggtggaagggagttgtttgagaatagcaaatacgcatgttgattgcgagtgtgtggagacaaaggcagttcccaccacagttaggtcctggccgttgtttcctcgcctgcgatgctccttgtacgtcctcaccctcctctcccgcctctgccttctgctgggtcaaaggtggcctttttctctccagccttgaattgttccctgttggcttcccaagggcccatctgctggtacagtccacacttccaaagccaagacccgagagggctttcactgccccaagcctctctcctgtgaccttgggattctgtcttggcagaatcctttgtcagcggctcttactctgtccttcctgtttggccacagctctttcaatcaatgggtattctagaaccgcaggatgtcagagctggaagggacgcgataccggtttacacaaggggaaactcctcgaggctctgggagggacggagggttttggtgacagagcgagagctaaaattgaggattcctgaatccagatcttgcctcccatcagccatctttctcccaataaatttttgttttgtgc

SEQ ID NO: 291957 - DNA, 1422 bp, Homo sapiens
tagctagtacgaggctggggttaatcggccgaggggacacagtctttgtttaaaaactttgtcccgatccatccagaaaagagtaggtagcttgcatcctgacagcctggcaaagtcaagaaagttgaaggagaaacatacctttggagagggggttttctttaaaactagtgttaagaaatgcttagggattttttttttcttatttttcataactaaagctttcacccagagccggctctgtttgcactttgctgccgacattgcaaactttttggcagggtgggagactgagtctcattctgtcacccaggctggagtgcagtggcccgatctcagcttactgcaacctctgccctccagggttctggcaattccgcctcagtctcctgagtagctgggattacaggcatgcgccaccacacccggttaatttttgtatttttagtagagaccaggtttcatcatgttgggcaggatggtcttgaacccctgacctcaggtgatctgcccatctcggcctctcaaagtgctgggattacaagtgtgagccatcgcgcccggcctgcaaacttttttgtaggtatttctggtaaacaaatccttaggttatctttgctgtggttgtggtttggctttagtcatgatttcaaagtagaaatagctaggcattattttttgaaatatatgacctatatgtagtcaagaatccactgaacagagggaagcaaaccttttggaaactggcttttgggcagacagtaaacgtccagtttgatgctggaagcatgaacagcttcatcaggtaggtactcctcaactctgatgagtttgtcctttcagcctaagggggtggaagggagttgtttgagaatagcaaatacgcatgttgattgcgagtgtgtggagacaaaggcagttcccaccacagttaggtcctggccgttgtttcctcgcctgcgatgctccttgtacgtcctcaccctcctctcccgcctctgccttctgctgggtcaaaggtggcctttttctctccagccttgaattgttccctgttggcttcccaagggcccatctgctggtacagtccacacttccaaagccaagacccgagagggctttcactgccccaagcctctctcctgtgaccttgggattctgtcttggcagaatcctttgtcagcggctcttactctgtccttcctgtttggccacagctctttcaatcaatgggtattctagaaccgcaggatgtcagagctggaagggacgcgataccggtttacacaaggggaaactcctcgaggctctgggagggacggagggttttggtgacagagcgagagctaaaattgaggattcctgaatccagatcttgcctcccatcagccatctttctcccaataaatttttgttttgtgc

SEQ ID NO: 291958 - DNA, 1959 bp, Homo sapiens
ccacctgttctctgggtgcagggaaaactcttcccgccctcccagctgcttttgcctttgggcgggagccctggacgggggactcgccggacggtggggcgaggcccggggggcgtcgcacgcgggaagcagagcccggcgggggaggtggggagccgtcctggcgccgcgcgattagccgcatctgggggaggaggagccgccgggcgcgctgggcccgggtgtttgcgcccggatgggggtgggggtgccctaggcgctggagaaaaacttcacccgcgcccacaggccccctttccgcaggctgcgctggcggttcaggtttgcaggccggaagtgaaatgttcttttttgatttttaaaaaggaagcctccggccctatggttttctggggttggagtggatgtgtgtgctgggggaggcggagacgtcccgctccaggcagggccttgggtcttaataggtggggaaatctctgccaaataggaggcctctcggagcctcagtttccccatctgcagactgggctctgacttcttctggcatgagagggtgtgtgagagtaaaaggaggcagctagccccgtgccgggagacaccgtggtgacccgggctgtgtggaaattcactgggcctgatggagctggatgcagccttggaaattctccctttccctttgggctcccgcagcaggccccccagtcctgggtgcaggcttgtgacagctgctcagggatccaaacgtggcgcttgagctctctgcgatgtgttccacagttccctggaggcggacactgcgtgagggtcagccatgtcatctgagcctcccccaccaccacagccccccacccatcaagcttcagtcgggctgctggacacccctcggagccgtgagcgctcaccatcccctctgcgcggcaacgtggtcccaagcccactgcccactcgccggacgaggaccttctcggcgtgagtctggagcaggctggggacgcgttctcagatggatctcttgcctgaggccagagattcactgtgtctctggccatttttgggcctatgtcccggactgccaaataggcagacctggggctgggccgtgggctgagggtgagaaactaggaaggcgccttgtaaattcagggtactgcccagcccagaagaacctgttaccagctgggagtggcaatgggtgggcagttgctggggtcagaatcgctgggctttaaccacacatgagagtctggttccctgtgagactgtgaattctgcagctgcaaaatgggcacagcaccagggctgcaaaggacccacataatgcctggcagatgcaggtctcaggccttgcgagtggaggatgcttgtgttattaatagtaaatcattagtttctggagggatttgtttgagaatagcaaatacgcatgttgattgcgagtgtgtggagacaaaggcagttcccaccacagttaggtcctggccgttgtttcctcgcctgcgatgctccttgtacgtcctcaccctcctctcccgcctctgccttctgctgggtcaaaggtggcctttttctctccagccttgaattgttccctgttggcttcccaagggcccatctgctggtacagtccacacttccaaagccaagacccgagagggctttcactgccccaagcctctctcctgtgaccttgggattctgtcttggcagaatcctttgtcagcggctcttactctgtccttcctgtttggccacagctctttcaatcaatgggtattctagaaccgcaggatgtcagagctggaagggacgcgataccggtttacacaaggggaaactcctcgaggctctgggagggacggagggttttggtgacagagcgagagctaaaattgaggattcctgaatccagatcttgcctcccatcagccatctttctcccaataaatttttgttttgtgc

SEQ ID NO: 291959 - DNA, 1848 bp, Homo sapiens
ggcacgagtggacaaccatcagggagccaggacacagaggggcagagcaagtcagcattggcgccccttcctcagatccctatcatcttgggaaacagtagcccagaggttcaggaagatgttaacttaaatgttcggggtgccccagtctgttcagcatggctgaaatccacactccgtattcttccttgaagaaactgttatctttactcaatggcttcgtggctgtgtctggcatcatcctagttggcctgggcattggtggtaaatgtggaggggcctctctgacgaatgtcctcgggctgtcctccgcatacctccttcacgttggcaacctgtgcctggtgatgggatgcatcacggtactgcttggctgtgccgggtggtatggagcgactaaagagagcagaggcacgctcttgttttgcatcctgtcaatggttattgtcctcatcatggaagttacagctgccacagtggtccttcttttctttccaattgttggagatgtggccttggaacacaccttcgtgaccctgaggaagaattacagaggttacaacgagccagacgactattctacacagtggaacttggtcatggagaagctaaagtgctgtggggtgaataactacacagatttttctggctcttccttcgaaatgacaacgggccacacctaccccaggagttgctgtaaatccatcggaagtgtgtcctgtgacggacgcgatgtgtctccaaacgtcatccaccagaagggctgtttccataaactcctaaaaatcaccaagactcagagcttcaccctgagtgggagctctctgggagctgcagtgatacagaggtgggggtctcgctatgttgcgcaggctggtcttgaactgctggcctaaagcgatccccccgcctaggcctcccaaagtgctgggtttaccagcgtgagccaccacgctgggcttcctgcatccttttaaggttcctgagggtctgcctgagaggagctgtccctgaatctccatgcagccccacctgccacatcaccaagacatacaatctttgccagcaacacttcctccttgcagattacaagcatagctaatgccaccaccagacaagaccgattcgctggcctccatttcttcaacccagtgcctgtcatgaaacttgtggaggtcattaaaacaccaatgaccagccagaagacatttgaatctttggtagactttagcaaaaccctaggaaagcatcctgtttcttgcaaggacactcctgggtttattgtgaaccgcctcctggttccatacctcatggaagcaatcaggctgtatgaacgagggcctcctggctttccctgtgggcttctgagaaaggtttctggaactcccaccacccccactacagtcccagccagagcaattgcatggccggcccagattgatatcctggatctctgcttttgattaaaaggtgacgcatccaaagaagacattgacactgctatgaaattaggagccggttaccccatgggcccatttgagcttctagattatgtcggactggatactacgaagttcatcgtggatgggtggcatgaaatggatgcagagaacccattacatcagcccagcccatccttaaataagctggtagcagagaacaagttcggcaagaagactggagaaggattttacaaatacaagtgatgtgcagcttctccggttctgagaagaacacctgagagcgctttccagccagtgccccgagtgcctgtgggaatgctctttggtcagacattccctcacacagtacagtttaataaatgtgcattttgattgtaaaaaaaaa

SEQ ID NO: 291960 - DNA, 952 bp, Homo sapiens
ggcacgagtggacaaccatcagggagccaggacacagaggggcagagcaagtcagcattggcgccccttcctcagatccctatcatcttgggaaacagtagcccagaggttcaggaagatgttaacttaaatgttcggggtgccccagtctgttcagcatggctgaaatccacactccgtattcttccttgaagaaactgttatctttactcaatggcttcgtggctgtgtctggcatcatcctagttggcctgggcattggtggtaaatgtggaggggcctctctgacgaatgtcctcgggctgtcctccgcatacctccttcacgttggcaacctgtgcctggtgatgggatgcatcacggtactgcttggctgtgccgggtggtatggagcgactaaagagagcagaggcacgctcttgtttgttggagatgtggccttggaacacaccttcgtgaccctgaggaagaattacagaggttacaacgagccagacgactattctacacagtggaacttggtcatggagaagctaaagtgctgtggggtgaataactacacagatttttctggctcttccttcgaaatgacaacgggccacacctaccccaggagttgctgtaaatccatcggaagtgtgtcctgtgacggacgcgatgtgtctccaaacgtcatccaccagaagggctgtttccataaactcctaaaaatcaccaagactcagagcttcaccctgagtgggagctctctgggagctgcagtgatacagttgccaggaattcttgccactttgctgctgtttatcaagctgggctgacacccaggcctggagaagatgagacacctgggcccatctggctgctggagattcagtctcagttttatttctctgtggcactcactgcttctggaggggagactgttaataaaagatttgggaacccccaaaca

SEQ ID NO: 291961 - DNA, 1070 bp, Homo sapiens
ggcacgagtggacaaccatcagggagccaggacacagaggggcagagcaagtcagcattggcgccccttcctcagatccctatcatcttgggaaacagtagcccagaggttcaggaagatgttaacttaaatgttcggggtgccccagtctgttcagcatggctgaaatccacactccgtattcttccttgaagaaactgttatctttactcaatggcttcgtggctgtgtctggcatcatcctagttggcctgggcattggtggtaaatgtggaggggcctctctgacgaatgtcctcgggctgtcctccgcatacctccttcacgttggcaacctgtgcctggtgatgggatgcatcacggtactgcttggctgtgccgggtggtatggagcgactaaagagagcagaggcacgctcttgtttgttggagatgtggccttggaacacaccttcgtgaccctgaggaagaattacagaggttacaacgagccagacgactattctacacagtggaacttggtcatggagaagctaaagtgctgtggggtgaataactacacagatttttctggctcttccttcgaaatgacaacgggccacacctaccccaggagttgctgtaaatccatcggaagtgtgtcctgtgacggacgcgatgtgtctccaaacgtcatccaccagaagaaactgaggctcggggaggggacatcactagttcaagatcacagagctttggcagagttggaatttgaagccccattggcctgagtccattgccggcaccacactacctgccttctagagaccctaaatggagcaataaccatgaaaagtgatcatcctagcgggagtgagggccagccacgtgatggagcactcactttggctgtttccataaactcctaaaaatcaccaagactcagagcttcaccctgagtgggagctctctgggagctgcagtgatacaggtaagacccagcctctctagggtctttgagctgttttattaagcacctactgtatgccaaacactgttctggtcactgggacacaggagtgaacaaaact

SEQ ID NO: 291962 - DNA, 448 bp, Homo sapiens
gcggagagagaggcaggtctagatgcagatggtctgtttcccctaacaacagcaacggcggcgaggagaaatcctggtctccgccagctcccggccagactcgtaatcaggccactaacgacagcggggagcgtaaaagttctcttccctacccacctcgcgtgatgcggtgacacagaatgaaattcacaacacacatggagaaaaggaaaacaaccaatccttccccagaacggaacagctaagagccaacgctactgaaaaccatggggcaggcatctccaccgagtgcagggaagaggccaggagaagacccaggaaataaatttaaaaagggacagcctttgagctggtccctgaccgagaattccacataagagattccatttacctacttcaataacatggatcgtaaaactcttattcaataaagatatgaaatagaaga

SEQ ID NO: 291963 - DNA, 492 bp, Homo sapiens
gcggccgctcctacctcccctcacctactctgtccccacccccactccgctcccacctcccgcccgccacgggccggttacctgctcgtcgaagcggctgaccacggcctggacccattccaccggcctgtgcgcggccatgtcctccccgcggccggggggcggcggagggaagggtgggccggcgccctgggccgggaagagggcggggagcggaggctgagagacaaggtctgactctgtgcagtggagtgcagtggctcaatcatagctcactccagcctcagactcctgggccgaagtgatcctcccacctcaagctcctgaatagctgggactacagctgggcatggtggcatgtgcctgtggttccagttacttgggaagctgaggtgggaggatcgcttgagcccaggaggtcaaggctacagtgagctgtgatggtgtcattgcattccagcactccagcccgggcatcagagttagaccttg

SEQ ID NO: 291964 - DNA, 563 bp, Homo sapiens
ggatcattttcttcttccggaagaagaaaatgatccggatcattttcttcttccggacagtagacaccctgcccgtgcagagagatgtcatgggggcacctgctctccctgatagatgctgagagcatccagaaacttccagaccagccctctcaccacacccagaagaggcctttcccatctggagagaagcttccagaccagcccttcacacaccacagccaggaggggcctttcccacctggagagaaacttccagaccagcccctcataccacagccaagaggggcctttctcacctggagagaaatttccagaccatcccctctcaccacagccaggagaggcctttcccaccggaagaagaaaatgatccggatcattttcttcttccgggatgtctttttttctgacctgtgtttgccctctacttgtgaccactgcacatgtcgacagtaggtagctgaatggtggaagaaaaacaagaaggggtctacataaggggaacatcatttaaagctcataagatccccttgtggccggaagaagaaaatgatccgggg

SEQ ID NO: 291965 - DNA, 1199 bp, Homo sapiens
ggcgatgacattattaactctgcacacgtcagatctcgattccccaagagacgctgtcggctctggtcccacgggtgggcccgctcccctgcagacacactcaccttattcctgattttgacgcgctggtacaggtgctccgggaacgccttccgcggaatgaagcggcccatgcccttgttgacgttgatgtttccgtcttcaaagacgatcttgccctggctgatgaccactagtggggagccgtggcactccataccctcgaagatgttgtactccaccgcctgcaccaacagcctcagcgttacttcccaggatttgctctgccccaaacgagctgttcataacagcgattttgcctaacattatatcataagcgtgttccaatgtttttttttctctctaaaaataccttttattgactgtaatattccactgtatggtccacagtgtatataaccaacaactcaccgttgcgcatgtaggctgccggtggctttctataatcaaatcaatattgttctggggcatcacaaagaggaagggggtcccccggggttatgcaatgtggctgctttgactgtactggacataaaaataagtaaaatgttcttcattttacttaaaatgtgtctttaaataaaatttttttctctaggtttctaaaatcaaattactgggtgaaagaatagagctgttttaaagcacgtgtgccatatggccaaattattttcccaagggttcagatcaattgacacgatatcggcacttaccccctccagcattgggtaatgccatttttttctttctctgctaatttgaaagacaaaataacatttcctttaaaacacacattcggccgggcacggtggctcatgcctgtacccccaactactcgggaggctgaggtatgagaactgcttgaatctgggaggtggaggttgcagtgagccgagatcgtgccactgcactccagcctgggggacagagcgagactctgtctccagaaaaaaacaaaacaaaaaactcaccttctttccattattcttcaagtgaatacttgacagttgtgtgtcaactgtcaccagccaactgctttttattattttaaaagtaggtcacatacatggttgaaaacaatcaactggtaaaaaagatattggatagaaaggtaagtctgtgttctacttgagtctgag

SEQ ID NO: 291966 - DNA, 1061 bp, Homo sapiens
aagcctccctggcctccacagagtccactgctccctcttctgtgcccctcagtccctgggctccccccaccttcagccctgaccaccttgtggtgttcttgtcaaaatccccagtaaaatccgacattcctgagacaggtgatcaaacacttactgagtgcctactgtgtgcaggcgcacatttggtgctttaacatgttactgcatttagggcacacaatcatactatgaagggggtgtttgtactcccaacttacgggtgagcaatttgaggttcaggccacgtgtcttgcgggacacaggtgttgggtggggaagccaggattgaagcccaaactggttggttttcaaagcccatgatcttaggcacactgtcccacactccaaaggtattttacatattgtgtgtgtacacatttgtatatgcatgtgcatatgtgtgtgcatgtgcatgtgaactccgcaagctggatttacttccctcattggcgataggtggatctgaagggggggggggtggtgtgcagaggttcttaattttaatctttcaaaaccaaccatccattctacttttacctattctcttgcataaagatgtaaaattctagcagcaaacccagtgcctggagctcaacaaatatttattaaatgagtaaatcatgaagggtggataatgctgaaaggtgggaaggatagagtccttatcagggaggggaagttgagccggcggaactgaggaaaatcaaaaagagaaagcaaataagctgtaagtctgcctttcttcatggtctacaacacagccttcctgtactcaacttatcaccagatcctcagctaacagaaaaacgtaagtaagttagctcactgcaaccacagcattatcagtactgcacaaagccctcttcggcacacagcacaagcaccatcctataaaatctccagcaagcctttgtttccttgcagtcggctcctttcttgctgacctacccactgtaccctttcatactttttctaatacatctgactttctttaccgaaaaaaaaacacaagggcggccgct

SEQ ID NO: 291967 - DNA, 610 bp, Homo sapiens
aaagggatttaaaaaagaaacgcacacaaacaagaaacaaaatgcacaatcctagcaagcaggattgttgaagtgagtaaccacatgcctgctctgtccctctgtcccgagttcaggtgtggatggaggagtgtgcgctgtccagcgtgctgcagacacacctgcgggaggaccacgagggcaccatccgcggcgtcttgggccgactgggcggcctcactgaagagtccacgcggtgtgtcctgcaggggcatgacctgctgttgcgctcagccctccggaggctggcactccgcggcaacgccctggccaccctgacgcagatgcggctatcggggaagaagcacctcctgcaggagctgcgggaacagcgtgcactggagcaggggtcctcccagtgcctggacgagcatcagtggcagctgctcagggccctggtaagaccagcatggtggccccacccattccagacaggcggtgcccctgcagcaggccccagcttccagcaggtttgccagaacccgaatcctatcacccttggtgctgcagggtgcggtattcattcgccggggctgccatagcaaggtcccacagaccgggcagcttacac

SEQ ID NO: 291968 - DNA, 353 bp, Homo sapiens
ggggcctaatgggaggggtttgggtcatgaaggacagaccactcatgaatggcttggtgtcagccttacagtaatgagtaaattcttgctctattagctctcggaagaactggttgttaaagagcacctctgccttcttcctctgttgccatgtgatctctttcgctcccgactggactcctatgttcgctctctgcccttcttctccgcccgggctggctgaagcaacctacctcaaggtctcaggagaattcatgtctgcctggggcccttccgaacctgtgccaactaagggcccccactgagccgcccgcgccctcttcccagcccaggggaccatctagaacaccgca

SEQ ID NO: 291969 - DNA, 7855 bp, Homo sapiens
ccctccggctcggcgaagcagggaaggggagagaagcaggagtcgggagactgcacaggccagaaagtctgcggagcgggccgcgcccctggcccgcccgggctccaagtcccgcgtcgccgccctggcggggacggtgcagcaggcggcgggatgcggcggggcggcagcctgagcgccccggatggcccgcggcggggcggcctgcaagagcgacgcgcggctgctgctggggcgggacgcgctgcggccggcgcccgccctgctggcccccgccgtgctgctgggcgccgcgctcggcctcggcctcggcctttggcttggctgccgcgcgggccgccagcgcacgcgacaccagaaagacgacactcaaaatctgctcaagaatttggagtctaatgcgcagaccccctcggaaactggctccccatcaaggaggaggaagagagaagtgcagatgtcgaaggacaaggaagctgttgatgaatgtgagccgccttccaacagcaatatcacagcattcgccctgaaggccaaagtcatctaccccatcaatcagaagttccggcctctggccgatggctcctccaacccgtctctgcatgaaaacttaaagcaggctgttttgccacaccagccggtagaggcctctccttccagcagtctggggagcctgagccagggtgagaaggacgactgcagctcctcatccagcgtccactcggccaccagcgatgacaggtttctcagccgcaccttcctccgggtgaacgccttccctgaagtgctggcctgcgagagtgtagacgttgacctgtgtatctacagccttcacttaaaagacctgctgcatttggacacggcactgaggcaggaaaagcatatgatgtttattcagatttttaaaatgtgcctccttgaccttcttcctaaaaagaagtcagatgatgaattataccagaagatcctttcaaaacaagaaaaagatttggaggaactagaaaagggacttcaggtcaaactgtcaaacacagaaatgtcgggggctggtgactctgagtacatcaccctggctgatgtggaaaagaaggagagagaatactctgaacagctaatcgataatatggaagctttctggaaacagatggcaaatatccagcactttcttgtggaccagtttaagtgttccagctccaaagcccgacagctgatgatgactctgacggaaagaatgattgcagccgaagggctattgtgcgattctcaggagctgcaggctctggacgccctggagaggacgatggggcgggcgcacatggcaaaagtgattgagtttctgaagctgcaagtccaggaggagaccaggtgccggctggctgccatctcccacggcctggagctgctggctggtgaggggaagctgtccgggcggcagaaggaggagctgctcacgcagcagcacaaggccttctggcaggaggcagagcgcttcagccgggagtttgtccagcgaggcaaagacctggtcacggcgtctctggctcaccaggtggagggaacggcaaaactcacgctggcccaagaggaggaacagagaagcttcctggctgaggcccagccgactgctgacccggaaaagtttctcgaggcttttcatgaggtcctggagaggcagaggctgatgcagtgtgacctggaggaagaggagaatgtcagagccaccgaggctgtggttgcactctgccaggagctgtacttcagcaccgtggacactttccagaagttcgtggatgccctgttccttcagacgctccctggcatgactggcctccccccggaagagtgtgactacttgaggcaggaagtccaggagaacgctgcctggcagctggggaagtcaaatcgcttccggaggcagcagtggaaactcttccaggagctcctagagcaagaccagcaggtgtggatggaggagtgtgcgctgtccagcgtgctgcagacacacctgcgggaggaccacgagggcaccatccgcggcgtcttgggccgactgggcggcctcactgaagagtccacgcggtgtgtcctgcaggggcatgacctgctgttgcgctcagccctccggaggctggcactccgcggcaacgccctggccaccctgacgcagatgcggctatcggggaagaagcacctcctgcaggagctgcgggaacagcgtgcactggagcaggggtcctcccagtgcctggacgagcatcagtggcagctgctcagggccctggaggcgcgtgtgctggaggaggccagccggctagaggaggaagcacagcagacacggctgcagctccagcagcggctcctggccgaggcccaggaggtggggcagcttctgcagcagcacatggagtgcgccattgggcaggcgctgctggtgcatgcacggaatgcagccaccaagagccgggccaaggacagggatgacttcaagaggacactgatggaggcggcagtggagagcgtctacgtgaccagcgctggtgtcagccgcctggtgcaggcgtattaccagcaaatcggaaggatcatggaggaccacgaggagagaaaactgcagcacctgaagaccctgcagggtgagaggatggaaaattacaaactgcggaaaaagcaagaactcagcaacccttcgtcgggcagcaggacggcaggtggcgctcatgagacctcccaggcggtccaccagaggatgctgtcccagcagaagaggttcctggcccagttcccagtgcaccagcagatgcgtctgcacgcccagcagcagcaggcaggagtcatggaccttctggaagcccagctggagacccagctacaggaagctgaacagaacttcatctccgagctggcagccttggcccgagtgccccttgctgaaagcaaactgttgcctgctaagcgtgggctgctagagaagcccctaaggactaaaaggaagaagcccctgccccaggaaagaggggacctgggggtgcccaacaatgaggaccttgcctccggggaccagacctcaggctcactcagcagcaaaaggctgagtcagcaagaaagtgaagctggggacagtgggaactcaaagaagatgctaaagagaagaagcaacttgtagtttaagaccagtcggtgggacaagacctgaagccctgggtctgggtgtgaattccaccttccctcctgcagtgctgagaggcagcgaggacggagaggacagcggcatctctaggctcttctgagagggacagagaaagaatagaaatgtgccctaaaagcataaatgagtatcacctgagaaaattaggcattcccgtcttggaaacacgtctctgtgagtttgcatttcatttggcttggagccctggctcgatgcctcatggatctttctccccaaggagggacgtcttgaggggtccgagcctcaggccaaggacccctgatgcagactctggaatccctggcccaaaggcctgtctgggcccatctggggctgaggacacacagatacataatgacacctgcagaaatgtattctctgaggacacttagaatatgaggaagagggtgtggcccaaccctcacttcacctggggaggggcttcttccggacagtagacaccctgcccgtgcagagagatgtcatgggggcacctgctctccctgatagatgctgagagcatccagaaacttccagaccagccctctcaccacacccagaagaggcctttcccatctggagagaagcttccagaccagcccttcacacaccacagccaggaggggcctttcccacctggagagaaacttccagaccagcccctcataccacagccaagaggggcctttctcacctggagagaaatttccagaccatcccctctcaccacagccaggagaggcctttcccaccggaagaagaaacttccagaccagcccctcacaccacagccaagagaagcctttccagcctggagagaaacttccagaccagccctctcactacagccaggagaggcctttcccgcctggaaacttccggacaagcctctcacacaccacagccaggagaggcctttcccacctggacagaaacttccagaccagcccctctcaccacagccaggagaggcctttaccacctggagagaagcttccagaccagcccctcacaccacagccaggagaggcctttcccacctggagagaaacttccagaccagcccctcataccacagccaagaggggcctttctcacctggagagaaacttccagaccagcccctcacaccaccgccaggagaggcctttcccaccgggagagaaacttccagaccagcccctcacaccacagccaggagaggcctttcccaccgggagagaaacttccagaccagccctctcactacagccagaagaggcctttcccaccgggagaggaacttccagaccagcccctcacaccacagccaggagaggcctttcccgcctggagagaagcttcaggccagctcctcacaccacagccaggagagaccttttctgcctggagagaaactttcagaccagccccacacaccacagccaggagaggccgttcctgcctggagagaagcttccagaccagcccttcacaccacagccaggagaggcctttcccacctggagagaaacttccagaccagcccctctcaccacagccaggagaggccgttcccacctggagggaaaattgctcctttgatggaggttagggactgtcaccctcagcactgtgaacataccgggcgagatcattcttcaggggaaggagctgcccagagcatcacaggatgttccagtgtccctggtctctgcccaccagatgccagcactcccaccattcgtggcaaccaaggatgtctccagacactgccccgtgtccatggggttatcacccactgtgctgagtcaaagggtgccttgccctggtctaatccaggacatagccgtggatacgtccaaaaatccccagaacctagtgagccctctggctctgggagcccctatctcaggaattttcagggtcatttgtgacttttcatttcttaaaacctgaaatagactctcttagaaacaagtgactccttcccagtggccaaaacttaatcatcagagcgcttccttcagttcctcacccatcagccagtgggctctccaaagttaaccaacagctccctcttgtggttcactaaaaaacttggttattccatggagttgtgcaaagctatggcttccttggtgcaatattcttaaaacctgctttgcatagaaatcacttttgcccaggctggagtgcagtggcgtgatctcggctcatggcaatctccatctcccgggttcaagcgattttcctgcctcagcctccccagtagctgggactacagacgtgtgccaccacgcctggctaaatcttttttgtattttattttagtagagacggggtttcaccatactggccaggctgctctcgaactcctgacctcatcgtccacctgcctcggcctccccaaagtgctgagattaggcgttagccaccgcgcccggccagaaatcacttttatattgtcacatgggccctctgcacagagtccgatggctcctcccggggaagcctgattttgtgacgtgtgtatagtaaatgcaggccctctggcagcaccataattggtcggttaccctgagcccagagctctgaaagcatctgtggaatgatcacgggacccttctcctctgagaaggctcccggctgcctccccgccaccgagcttgtagcctgaatgcctggctgtcgcatggagcattttgcttctggggtgtcttccttagccaaagggaacgtgtcatttgctcgaccctggcccacccttgccgcccagctgttgtgctgggcacagtctggggcacaggcctccatgatgaagacgcgtgggctgtcggtgctttcatccgtcacaaactggcacctgtacctgccagcaggagcatgatggggacttccatgctggaattgctccctgattaaaatgagatatggctatttggaagacactgcattttagccagtgtacctgggcacagactcggggctgccctgaagctgatgaaggcttgaaggacggaagggctgagccacatgaaggcagcactcagggccaggggagagagaagaggatcagcagtgcagccccaggatgcctcgcagacgtgccttctgccatgattgtgaagttctagccacgtggaactatgtaaaattctagcagcaaacccagtgcctggagctcaacaaatatttattaaatgagtaaatcatgaagggtggataatgctgaaaggtgggaaggatagagtccttatcagggaggggaagttgagccggcggaactgaggaaaatcaaaaagagaaagcaaataagctgtaagtctgcctttcttcatggtctacaacacagccttcctgtactcaacttatcaccagatcctcagctaacagaaaaacctctcggaagaactggttgttaaagagcacctctgccttcttcctctgttgccatgtgatctctgcacacgctagctctccttcgccttctgccatgctggaagtagcctgaggccctcaccagaagcagacgctggcaccgtgctgcttgtacagcctgcagagccgtgagccaagtaaacctctttaattacccagcctcaggtgctccgggaacgccttccgcggaatgaagcggcccatgcccttgttgacgttgatgtttccgtcttcaaagacgatcttgccctggctgatgaccactagtggggagccgtggcactccataccctcgaagatgttgtactccaccgcctgcaccaacagcctcagcgttacttcccaggatttgctctgccccaaacgagctgttcataacagcgattttgcctaacattatatcataagcgtgttccaatgtttttttttctctctaaaaataccttttattgactgtaatattccactgtatggtccacagtgtatataaccaacaactcaccgttgcgcatgtaggctgccggtggctttctataatcaaatcaatattgttctggggcatcacaaagaggaagggggtcccccggggttatgcaatgtggctgctttgactgtactggacataaaaataagtaaaatgttcttcattttacttaaaatgtgtctttaaataaaatttttttctctaggtttctaaaatcaaattactgggtgaaagaatagagctgttttaaagcacgtgtgccatatggccaaattattttcccaagggttcagatcaattgacacgatatcggcacttaccccctccagcattgggtaatgccatttttttctttctctgctaatttgaaagacaaaataacatttcctttaaaacacacattcggccgggcacggtggctcatgcctgtacccccaactactcgggaggctgaggtatgagaactgcttgaatctgggaggtggaggttgcagtgagccgagatcgtgccactgcactccagcctgggggacagagcgagactctgtctccagaaaaaaacaaaacaaaaaactcaccttctttccattattcttcaagtgaatacttgacagttgtgtgtcaactgtcaccagccaactgctttttattattttaaaagtaggtcacatacatggttgaaaacaatcaactggtaaaaaagatattggatagaaaggtaagtctgtgttctacttgagtctgag

SEQ ID NO: 291970 - DNA, 8039 bp, Homo sapiens
ccctccggctcggcgaagcagggaaggggagagaagcaggagtcgggagactgcacaggccagaaagtctgcggagcgggccgcgcccctggcccgcccgggctccaagtcccgcgtcgccgccctggcggggacggtgcagcaggcggcgggatgcggcggggcggcagcctgagcgccccggatggcccgcggcggggcggcctgcaagagcgacgcgcggctgctgctggggcgggacgcgctgcggccggcgcccgccctgctggcccccgccgtgctgctgggcgccgcgctcggcctcggcctcggcctttggcttggctgccgcgcgggccgccagcgcacgcgacaccagaaagacgacactcaaaatctgctcaagaatttggagtctaatgcgcagaccccctcggaaactggctccccatcaaggaggaggaagagagaagtgcagatgtcgaaggacaaggaagctgttgatgaatgtgagccgccttccaacagcaatatcacagcattcgccctgaaggccaaagtcatctaccccatcaatcagaagttccggcctctggccgatggctcctccaacccgtctctgcatgaaaacttaaagcaggctgttttgccacaccagccggtagaggcctctccttccagcagtctggggagcctgagccagggtgagaaggacgactgcagctcctcatccagcgtccactcggccaccagcgatgacaggtttctcagccgcaccttcctccgggtgaacgccttccctgaagtgctggcctgcgagagtgtagacgttgacctgtgtatctacagccttcacttaaaagacctgctgcatttggacacggcactgaggcaggaaaagcatatgatgtttattcagatttttaaaatgtgcctccttgaccttcttcctaaaaagaagtcagatgatgaattataccagaagatcctttcaaaacaagaaaaagatttggaggaactagaaaagggacttcaggtcaaactgtcaaacacagaaatgtcgggggctggtgactctgagtacatcaccctggctgatgtggaaaagaaggagagagaatactctgaacagctaatcgataatatggaagctttctggaaacagatggcaaatatccagcactttcttgtggaccagtttaagtgttccagctccaaagcccgacagctgatgatgactctgacggaaagaatgattgcagccgaagggctattgtgcgattctcaggagctgcaggctctggacgccctggagaggacgatggggcgggcgcacatggcaaaagtgattgagtttctgaagctgcaagtccaggaggagaccaggtgccggctggctgccatctcccacggcctggagctgctggctggtgaggggaagctgtccgggcggcagaaggaggagctgctcacgcagcagcacaaggccttctggcaggaggcagagcgcttcagccgggagtttgtccagcgaggcaaagacctggtcacggcgtctctggctcaccaggtggagggaacggcaaaactcacgctggcccaagaggaggaacagagaagcttcctggctgaggcccagccgactgctgacccggaaaagtttctcgaggcttttcatgaggtcctggagaggcagaggctgatgcagtgtgacctggaggaagaggagaatgtcagagccaccgaggctgtggttgcactctgccaggagctgtacttcagcaccgtggacactttccagaagttcgtggatgccctgttccttcagacgctccctggcatgactggcctccccccggaagagtgtgactacttgaggcaggaagtccaggagaacgctgcctggcagctggggaagtcaaatcgcttccggaggcagcagtggaaactcttccaggagctcctagagcaagaccagcaggtgtggatggaggagtgtgcgctgtccagcgtgctgcagacacacctgcgggaggaccacgagggcaccatccgcggcgtcttgggccgactgggcggcctcactgaagagtccacgcggtgtgtcctgcaggggcatgacctgctgttgcgctcagccctccggaggctggcactccgcggcaacgccctggccaccctgacgcagatgcggctatcggggaagaagcacctcctgcaggagctgcgggaacagcgtgcactggagcaggggtcctcccagtgcctggacgagcatcagtggcagctgctcagggccctggaggcgcgtgtgctggaggaggccagccggctagaggaggaagcacagcagacacggctgcagctccagcagcggctcctggccgaggcccaggaggtggggcagcttctgcagcagcacatggagtgcgccattgggcaggcgctgctggtgcatgcacggaatgcagccaccaagagccgggccaaggacagggatgacttcaagaggacactgatggaggcggcagtggagagcgtctacgtgaccagcgctggtgtcagccgcctggtgcaggcgtattaccagcaaatcggaaggatcatggaggaccacgaggagagaaaactgcagcacctgaagaccctgcagggtgagaggatggaaaattacaaactgcggaaaaagcaagaactcagcaacccttcgtcgggcagcaggacggcaggtggcgctcatgagacctcccaggcggtccaccagaggatgctgtcccagcagaagaggttcctggcccagttcccagtgcaccagcagatgcgtctgcacgcccagcagcagcaggcaggagtcatggaccttctggaagcccagctggagacccagctacaggaagctgaacagaacttcatctccgagctggcagccttggcccgagtgccccttgctgaaagcaaactgttgcctgctaagcgtgggctgctagagaagcccctaaggactaaaaggaagaagcccctgccccaggaaagaggggacctgggggtgcccaacaatgaggaccttgcctccggggaccagacctcaggctcactcagcagcaaaaggctgagtcagcaagaaagtgaagctggggacagtgggaactcaaagaagatgctaaagagaagaagcaacttgtagtttaagaccagtcggtgggacaagacctgaagccctgggtctgggtgtgaattccaccttccctcctgcagtgctgagaggcagcgaggacggagaggacagcggcatctctaggctcttctgagagggacagagaaagaatagaaatgtgccctaaaagcataaatgagtatcacctgagaaaattaggcattcccgtcttggaaacacgtctctgtgagtttgcatttcatttggcttggagccctggctcgatgcctcatggatctttctccccaaggagggacgtcttgaggggtccgagcctcaggccaaggacccctgatgcagactctggaatccctggcccaaaggcctgtctgggcccatctggggctgaggacacacagatacataatgacacctgcagaaatgtattctctgaggacacttagaatatgaggaagagggtgtggcccaaccctcacttcacctggggaggggcttcttccggacagtagacaccctgcccgtgcagagagatgtcatgggggcacctgctctccctgatagatgctgagagcatccagaaacttccagaccagccctctcaccacacccagaagaggcctttcccatctggagagaagcttccagaccagcccttcacacaccacagccaggaggggcctttcccacctggagagaaacttccagaccagcccctcataccacagccaagaggggcctttctcacctggagagaaatttccagaccatcccctctcaccacagccaggagaggcctttcccaccggaagaagaaacttccagaccagcccctcacaccacagccaagagaagcctttccagcctggagagaaacttccagaccagccctctcactacagccaggagaggcctttcccgcctggaaacttccggacaagcctctcacacaccacagccaggagaggcctttcccacctggacagaaacttccagaccagcccctctcaccacagccaggagaggcctttaccacctggagagaagcttccagaccagcccctcacaccacagccaggagaggcctttcccacctggagagaaacttccagaccagcccctcataccacagccaagaggggcctttctcacctggagagaaacttccagaccagcccctcacaccaccgccaggagaggcctttcccaccgggagagaaacttccagaccagcccctcacaccacagccaggagaggcctttcccaccgggagagaaacttccagaccagccctctcactacagccagaagaggcctttcccaccgggagaggaacttccagaccagcccctcacaccacagccaggagaggcctttcccgcctggagagaagcttcaggccagctcctcacaccacagccaggagagaccttttctgcctggagagaaactttcagaccagccccacacaccacagccaggagaggccgttcctgcctggagagaagcttccagaccagcccttcacaccacagccaggagaggcctttcccacctggagagaaacttccagaccagcccctctcaccacagccaggagaggccgttcccacctggagggaaaattgctcctttgatggaggttagggactgtcaccctcagcactgtgaacataccgggcgagatcattcttcaggggaaggagctgcccagagcatcacaggatgttccagtgtccctggtctctgcccaccagatgccagcactcccaccattcgtggcaaccaaggatgtctccagacactgccccgtgtccatggggttatcacccactgtgctgagtcaaagggtgccttgccctggtctaatccaggacatagccgtggatacgtccaaaaatccccagaacctagtgagccctctggctctgggagcccctatctcaggaattttcagggtcatttgtgacttttcatttcttaaaacctgaaatagactctcttagaaacaagtgactccttcccagtggccaaaacttaatcatcagagcgcttccttcagttcctcacccatcagccagtgggctctccaaagttaaccaacagctccctcttgtggttcactaaaaaacttggttattccatggagttgtgcaaagctatggcttccttggtgcaatattcttaaaacctgctttgcatagaaatcacttttgcccaggctggagtgcagtggcgtgatctcggctcatggcaatctccatctcccgggttcaagcgattttcctgcctcagcctccccagtagctgggactacagacgtgtgccaccacgcctggctaaatcttttttgtattttattttagtagagacggggtttcaccatactggccaggctgctctcgaactcctgacctcatcgtccacctgcctcggcctccccaaagtgctgagattaggcgttagccaccgcgcccggccagaaatcacttttatattgtcacatgggccctctgcacagagtccgatggctcctcccggggaagcctgattttgtgacgtgtgtatagtaaatgcaggccctctggcagcaccataattggtcggttaccctgagcccagagctctgaaagcatctgtggaatgatcacgggacccttctcctctgagaaggctcccggctgcctccccgccaccgagcttgtagcctgaatgcctggctgtcgcatggagcattttgcttctggggtgtcttccttagccaaagggaacgtgtcatttgctcgaccctggcccacccttgccgcccagctgttgtgctgggcacagtctggggcacaggcctccatgatgaagacgcgtgggctgtcggtgctttcatccgtcacaaactggcacctgtacctgccagcaggagcatgatggggacttccatgctggaattgctccctgattaaaatgagatatggctatttggaagacactgcattttagccagtgtacctgggcacagactcggggctgccctgaagctgatgaaggcttgaaggacggaagggctgagccacatgaaggcagcactcagggccaggggagagagaagaggatcagcagtgcagccccaggatgcctcgcagacgtgccttctgccatgattgtgaagttctagccacgtggaactatgtaaaattctagcagcaaacccagtgcctggagctcaacaaatatttattaaatgagtaaatcatgaagggtggataatgctgaaaggtgggaaggatagagtccttatcagggaggggaagttgagccggcggaactgaggaaaatcaaaaagagaaagcaaataagctgtaagtctgcctttcttcatggtctacaacacagccttcctgtactcaacttatcaccagatcctcagctaacagaaaaacctctcggaagaactggttgttaaagagcacctctgccttcttcctctgttgccatgtgatctctgcacacgctagctctccttcgccttctgccatgctggaagtagcctgaggccctcaccagaagcagacgctggcaccgtgctgcttgtacagcctgcagagccgtgagccaagtaaacctctttaattacccagcctcagtgcaaagcatctgtgcgacttggtgtctttgacctggtgctacaccttatggaagctggggagagaccaaaaccagatgcagagcctcccagtccgggctggagcctgggaatgcaggaaggtctctggacttctccatctcaattggtcacttaggaagcatacaaagaacaggaccacacaggtgctccgggaacgccttccgcggaatgaagcggcccatgcccttgttgacgttgatgtttccgtcttcaaagacgatcttgccctggctgatgaccactagtggggagccgtggcactccataccctcgaagatgttgtactccaccgcctgcaccaacagcctcagcgttacttcccaggatttgctctgccccaaacgagctgttcataacagcgattttgcctaacattatatcataagcgtgttccaatgtttttttttctctctaaaaataccttttattgactgtaatattccactgtatggtccacagtgtatataaccaacaactcaccgttgcgcatgtaggctgccggtggctttctataatcaaatcaatattgttctggggcatcacaaagaggaagggggtcccccggggttatgcaatgtggctgctttgactgtactggacataaaaataagtaaaatgttcttcattttacttaaaatgtgtctttaaataaaatttttttctctaggtttctaaaatcaaattactgggtgaaagaatagagctgttttaaagcacgtgtgccatatggccaaattattttcccaagggttcagatcaattgacacgatatcggcacttaccccctccagcattgggtaatgccatttttttctttctctgctaatttgaaagacaaaataacatttcctttaaaacacacattcggccgggcacggtggctcatgcctgtacccccaactactcgggaggctgaggtatgagaactgcttgaatctgggaggtggaggttgcagtgagccgagatcgtgccactgcactccagcctgggggacagagcgagactctgtctccagaaaaaaacaaaacaaaaaactcaccttctttccattattcttcaagtgaatacttgacagttgtgtgtcaactgtcaccagccaactgctttttattattttaaaagtaggtcacatacatggttgaaaacaatcaactggtaaaaaagatattggatagaaaggtaagtctgtgttctacttgagtctgag

SEQ ID NO: 291971 - DNA, 7574 bp, Homo sapiens
ccctccggctcggcgaagcagggaaggggagagaagcaggagtcgggagactgcacaggccagaaagtctgcggagcgggccgcgcccctggcccgcccgggctccaagtcccgcgtcgccgccctggcggggacggtgcagcaggcggcgggatgcggcggggcggcagcctgagcgccccggatggcccgcggcggggcggcctgcaagagcgacgcgcggctgctgctggggcgggacgcgctgcggccggcgcccgccctgctggcccccgccgtgctgctgggcgccgcgctcggcctcggcctcggcctttggcttggctgccgcgcgggccgccagcgcacgcgacaccagaaagacgacactcaaaatctgctcaagaatttggagtctaatgcgcagaccccctcggaaactggctccccatcaaggaggaggaagagagaagtgcagatgtcgaaggacaaggaagctgttgatgaatgtgagccgccttccaacagcaatatcacagcattcgccctgaaggccaaagtcatctaccccatcaatcagaagttccggcctctggccgatggctcctccaacccgtctctgcatgaaaacttaaagcaggctgttttgccacaccagccggtagaggcctctccttccagcagtctggggagcctgagccagggtgagaaggacgactgcagctcctcatccagcgtccactcggccaccagcgatgacaggtttctcagccgcaccttcctccgggtgaacgccttccctgaagtgctggcctgcgagagtgtagacgttgacctgtgtatctacagccttcacttaaaagacctgctgcatttggacacggcactgaggcaggaaaagcatatgatgtttattcagatttttaaaatgtgcctccttgaccttcttcctaaaaagaagtcagatgatgaattataccagaagatcctttcaaaacaagaaaaagatttggaggaactagaaaagggacttcaggtcaaactgtcaaacacagaaatgtcgggggctggtgactctgagtacatcaccctggctgatgtggaaaagaaggagagagaatactctgaacagctaatcgataatatggaagctttctggaaacagatggcaaatatccagcactttcttgtggaccagtttaagtgttccagctccaaagcccgacagctgatgatgactctgacggaaagaatgattgcagccgaagggctattgtgcgattctcaggagctgcaggctctggacgccctggagaggacgatggggcgggcgcacatggcaaaagtgattgagtttctgaagctgcaagtccaggaggagaccaggtgccggctggctgccatctcccacggcctggagctgctggctggtgaggggaagctgtccgggcggcagaaggaggagctgctcacgcagcagcacaaggccttctggcaggaggcagagcgcttcagccgggagtttgtccagcgaggcaaagacctggtcacggcgtctctggctcaccaggtggagggaacggcaaaactcacgctggcccaagaggaggaacagagaagcttcctggctgaggcccagccgactgctgacccggaaaagtttctcgaggcttttcatgaggtcctggagaggcagaggctgatgcagtgtgacctggaggaagaggagaatgtcagagccaccgaggctgtggttgcactctgccaggagctgtacttcagcaccgtggacactttccagaagttcgtggatgccctgttccttcagacgctccctggcatgactggcctccccccggaagagtgtgactacttgaggcaggaagtccaggagaacgctgcctggcagctggggaagtcaaatcgcttccggaggcagcagtggaaactcttccaggagctcctagagcaagaccagcaggtgtggatggaggagtgtgcgctgtccagcgtgctgcagacacacctgcgggaggaccacgagggcaccatccgcggcgtcttgggccgactgggcggcctcactgaagagtccacgcggtgtgtcctgcaggggcatgacctgctgttgcgctcagccctccggaggctggcactccgcggcaacgccctggccaccctgacgcagatgcggctatcggggaagaagcacctcctgcaggagctgcgggaacagcgtgcactggagcaggggtcctcccagtgcctggacgagcatcagtggcagctgctcagggccctggaggcgcgtgtgctggaggaggccagccggctagaggaggaagcacagcagacacggctgcagctccagcagcggctcctggccgaggcccaggaggtggggcagcttctgcagcagcacatggagtgcgccattgggcaggcgctgctggtgcatgcacggaatgcagccaccaagagccgggccaaggacagggatgacttcaagaggacactgatggaggcggcagtggagagcgtctacgtgaccagcgctggtgtcagccgcctggtgcaggcgtattaccagcaaatcggaaggatcatggaggaccacgaggagagaaaactgcagcacctgaagaccctgcagggtgagaggatggaaaattacaaactgcggaaaaagcaagaactcagcaacccttcgtcgggcagcaggacggcaggtggcgctcatgagacctcccaggcggtccaccagaggatgctgtcccagcagaagaggttcctggcccagttcccagtgcaccagcagatgcgtctgcacgcccagcagcagcaggcaggagtcatggaccttctggaagcccagctggagacccagctacaggaagctgaacagaacttcatctccgagctggcagccttggcccgagtgccccttgctgaaagcaaactgttgcctgctaagcgtgggctgctagagaagcccctaaggactaaaaggaagaagcccctgccccaggaaagaggggacctgggggtgcccaacaatgaggaccttgcctccggggaccagacctcaggctcactcagcagcaaaaggctgagtcagcaagaaagtgaagctggggacagtgggaactcaaagaagatgctaaagagaagaagcaacttgtagtttaagaccagtcggtgggacaagacctgaagccctgggtctgggtgtgaattccaccttccctcctgcagtgctgagaggcagcgaggacggagaggacagcggcatctctaggctcttctgagagggacagagaaagaatagaaatgtgccctaaaagcataaatgagtatcacctgagaaaattaggcattcccgtcttggaaacacgtctctgtgagtttgcatttcatttggcttggagccctggctcgatgcctcatggatctttctccccaaggagggacgtcttgaggggtccgagcctcaggccaaggacccctgatgcagactctggaatccctggcccaaaggcctgtctgggcccatctggggctgaggacacacagatacataatgacacctgcagaaatgtattctctgaggacacttagaatatgaggaagagggtgtggcccaaccctcacttcacctggggaggggcttcttccggacagtagacaccctgcccgtgcagagagatgtcatgggggcacctgctctccctgatagatgctgagagcatccagaaacttccagaccagccctctcaccacacccagaagaggcctttcccatctggagagaagcttccagaccagcccttcacacaccacagccaggaggggcctttcccacctggagagaaacttccagaccagcccctcataccacagccaagaggggcctttctcacctggagagaaatttccagaccatcccctctcaccacagccaggagaggcctttcccaccggaagaagaaacttccagaccagcccctcacaccacagccaagagaagcctttccagcctggagagaaacttccagaccagccctctcactacagccaggagaggcctttcccgcctggaaacttccggacaagcctctcacacaccacagccaggagaggcctttcccacctggacagaaacttccagaccagcccctctcaccacagccaggagaggcctttaccacctggagagaagcttccagaccagcccctcacaccacagccaggagaggcctttcccacctggagagaaacttccagaccagcccctcataccacagccaagaggggcctttctcacctggagagaaacttccagaccagcccctcacaccaccgccaggagaggcctttcccaccgggagagaaacttccagaccagcccctcacaccacagccaggagaggcctttcccaccgggagagaaacttccagaccagccctctcactacagccagaagaggcctttcccaccgggagaggaacttccagaccagcccctcacaccacagccaggagaggcctttcccgcctggagagaagcttcaggccagctcctcacaccacagccaggagagaccttttctgcctggagagaaactttcagaccagccccacacaccacagccaggagaggccgttcctgcctggagagaagcttccagaccagcccttcacaccacagccaggagaggcctttcccacctggagagaaacttccagaccagcccctctcaccacagccaggagaggccgttcccacctggagggaaaattgctcctttgatggaggttagggactgtcaccctcagcactgtgaacataccgggcgagatcattcttcaggggaaggagctgcccagagcatcacaggatgttccagtgtccctggtctctgcccaccagatgccagcactcccaccattcgtggcaaccaaggatgtctccagacactgccccgtgtccatggggttatcacccactgtgctgagtcaaagggtgccttgccctggtctaatccaggacatagccgtggatacgtccaaaaatccccagaacctagtgagccctctggctctgggagcccctatctcaggaattttcagggtcatttgtgacttttcatttcttaaaacctgaaatagactctcttagaaacaagtgactccttcccagtggccaaaacttaatcatcagagcgcttccttcagttcctcacccatcagccagtgggctctccaaagttaaccaacagctccctcttgtggttcactaaaaaacttggttattccatggagttgtgcaaagctatggcttccttggtgcaatattcttaaaacctgctttgcatagaaatcacttttgcccaggctggagtgcagtggcgtgatctcggctcatggcaatctccatctcccgggttcaagcgattttcctgcctcagcctccccagtagctgggactacagacgtgtgccaccacgcctggctaaatcttttttgtattttattttagtagagacggggtttcaccatactggccaggctgctctcgaactcctgacctcatcgtccacctgcctcggcctccccaaagtgctgagattaggcgttagccaccgcgcccggccagaaatcacttttatattgtcacatgggccctctgcacagagtccgatggctcctcccggggaagcctgattttgtgacgtgtgtatagtaaatgcaggccctctggcagcaccataattggtcggttaccctgagcccagagctctgaaagcatctgtggaatgatcacgggacccttctcctctgagaaggctcccggctgcctccccgccaccgagcttgtagcctgaatgcctggctgtcgcatggagcattttgcttctggggtgtcttccttagccaaagggaacgtgtcatttgctcgaccctggcccacccttgccgcccagctgttgtgctgggcacagtctggggcacaggcctccatgatgaagacgcgtgggctgtcggtgctttcatccgtcacaaactggcacctgtacctgccagcaggagcatgatggggacttccatgctggaattgctccctgattaaaatgagatatggctatttggaagacactgcattttagccagtgtacctgggcacagactcggggctgccctgaagctgatgaaggcttgaaggacggaagggctgagccacatgaaggcagcactcagggccaggggagagagaagaggatcagcagtgcagccccaggatgcctcgcagacgtgccttctgccatgattgtgaagttctagccacgtggaactctctcggaagaactggttgttaaagagcacctctgccttcttcctctgttgccatgtgatctctgcacacgctagctctccttcgccttctgccatgctggaagtagcctgaggccctcaccagaagcagacgctggcaccgtgctgcttgtacagcctgcagagccgtgagccaagtgctccgggaacgccttccgcggaatgaagcggcccatgcccttgttgacgttgatgtttccgtcttcaaagacgatcttgccctggctgatgaccactagtggggagccgtggcactccataccctcgaagatgttgtactccaccgcctgcaccaacagcctcagcgttacttcccaggatttgctctgccccaaacgagctgttcataacagcgattttgcctaacattatatcataagcgtgttccaatgtttttttttctctctaaaaataccttttattgactgtaatattccactgtatggtccacagtgtatataaccaacaactcaccgttgcgcatgtaggctgccggtggctttctataatcaaatcaatattgttctggggcatcacaaagaggaagggggtcccccggggttatgcaatgtggctgctttgactgtactggacataaaaataagtaaaatgttcttcattttacttaaaatgtgtctttaaataaaatttttttctctaggtttctaaaatcaaattactgggtgaaagaatagagctgttttaaagcacgtgtgccatatggccaaattattttcccaagggttcagatcaattgacacgatatcggcacttaccccctccagcattgggtaatgccatttttttctttctctgctaatttgaaagacaaaataacatttcctttaaaacacacattcggccgggcacggtggctcatgcctgtacccccaactactcgggaggctgaggtatgagaactgcttgaatctgggaggtggaggttgcagtgagccgagatcgtgccactgcactccagcctgggggacagagcgagactctgtctccagaaaaaaacaaaacaaaaaactcaccttctttccattattcttcaagtgaatacttgacagttgtgtgtcaactgtcaccagccaactgctttttattattttaaaagtaggtcacatacatggttgaaaacaatcaactggtaaaaaagatattggatagaaaggtaagtctgtgttctacttgagtctgag

SEQ ID NO: 291972 - DNA, 6918 bp, Homo sapiens
ccctccggctcggcgaagcagggaaggggagagaagcaggagtcgggagactgcacaggccagaaagtctgcggagcgggccgcgcccctggcccgcccgggctccaagtcccgcgtcgccgccctggcggggacggtgcagcaggcggcgggatgcggcggggcggcagcctgagcgccccggatggcccgcggcggggcggcctgcaagagcgacgcgcggctgctgctggggcgggacgcgctgcggccggcgcccgccctgctggcccccgccgtgctgctgggcgccgcgctcggcctcggcctcggcctttggcttggctgccgcgcgggccgccagcgcacgcgacaccagaaagacgacactcaaaatctgctcaagaatttggagtctaatgcgcagaccccctcggaaactggctccccatcaaggaggaggaagagagaagtgcagatgtcgaaggacaaggaagctgttgatgaatgtgagccgccttccaacagcaatatcacagcattcgccctgaaggccaaagtcatctaccccatcaatcagaagttccggcctctggccgatggctcctccaacccgtctctgcatgaaaacttaaagcaggctgttttgccacaccagccggtagaggcctctccttccagcagtctggggagcctgagccagggtgagaaggacgactgcagctcctcatccagcgtccactcggccaccagcgatgacaggtttctcagccgcaccttcctccgggtgaacgccttccctgaagtgctggcctgcgagagtgtagacgttgacctgtgtatctacagccttcacttaaaagacctgctgcatttggacacggcactgaggcaggaaaagcatatgatgtttattcagatttttaaaatgtgcctccttgaccttcttcctaaaaagaagtcagatgatgaattataccagaagatcctttcaaaacaagaaaaagatttggaggaactagaaaagggacttcaggtcaaactgtcaaacacagaaatgtcgggggctggtgactctgagtacatcaccctggctgatgtggaaaagaaggagagagaatactctgaacagctaatcgataatatggaagctttctggaaacagatggcaaatatccagcactttcttgtggaccagtttaagtgttccagctccaaagcccgacagctgatgatgactctgacggaaagaatgattgcagccgaagggctattgtgcgattctcaggagctgcaggctctggacgccctggagaggacgatggggcgggcgcacatggcaaaagtgattgagtttctgaagctgcaagtccaggaggagaccaggtgccggctggctgccatctcccacggcctggagctgctggctggtgaggggaagctgtccgggcggcagaaggaggagctgctcacgcagcagcacaaggccttctggcaggaggcagagcgcttcagccgggagtttgtccagcgaggcaaagacctggtcacggcgtctctggctcaccaggtggagggaacggcaaaactcacgctggcccaagaggaggaacagagaagcttcctggctgaggcccagccgactgctgacccggaaaagtttctcgaggcttttcatgaggtcctggagaggcagaggctgatgcagtgtgacctggaggaagaggagaatgtcagagccaccgaggctgtggttgcactctgccaggagctgtacttcagcaccgtggacactttccagaagttcgtggatgccctgttccttcagacgctccctggcatgactggcctccccccggaagagtgtgactacttgaggcaggaagtccaggagaacgctgcctggcagctggggaagtcaaatcgcttccggaggcagcagtggaaactcttccaggagctcctagagcaagaccagcaggtgtggatggaggagtgtgcgctgtccagcgtgctgcagacacacctgcgggaggaccacgagggcaccatccgcggcgtcttgggccgactgggcggcctcactgaagagtccacgcggtgtgtcctgcaggggcatgacctgctgttgcgctcagccctccggaggctggcactccgcggcaacgccctggccaccctgacgcagatgcggctatcggggaagaagcacctcctgcaggagctgcgggaacagcgtgcactggagcaggggtcctcccagtgcctggacgagcatcagtggcagctgctcagggccctggaggcgcgtgtgctggaggaggccagccggctagaggaggaagcacagcagacacggctgcagctccagcagcggctcctggccgaggcccaggaggtggggcagcttctgcagcagcacatggagtgcgccattgggcaggcgctgctggtgcatgcacggaatgcagccaccaagagccgggccaaggacagggatgacttcaagaggacactgatggaggcggcagtggagagcgtctacgtgaccagcgctggtgtcagccgcctggtgcaggcgtattaccagcaaatcggaaggatcatggaggaccacgaggagagaaaactgcagcacctgaagaccctgcagggtgagaggatggaaaattacaaactgcggaaaaagcaagaactcagcaacccttcgtcgggcagcaggacggcaggtggcgctcatgagacctcccaggcggtccaccagaggatgctgtcccagcagaagaggttcctggcccagttcccagtgcaccagcagatgcgtctgcacgcccagcagcagcaggcaggagtcatggaccttctggaagcccagctggagacccagctacaggaagctgaacagaacttcatctccgagctggcagccttggcccgagtgccccttgctgaaagcaaactgttgcctgctaagcgtgggctgctagagaagcccctaaggactaaaaggaagaagcccctgccccaggaaagaggggacctgggggtgcccaacaatgaggaccttgcctccggggaccagacctcaggctcactcagcagcaaaaggctgagtcagcaagaaagtgaagctggggacagtgggaactcaaagaagatgctaaagagaagaagcaacttgtagtttaagaccagtcggtgggacaagacctgaagccctgggtctgggtgtgaattccaccttccctcctgcagtgctgagaggcagcgaggacggagaggacagcggcatctctaggctcttctgagagggacagagaaagaatagaaatgtgccctaaaagcataaatgagtatcacctgagaaaattaggcattcccgtcttggaaacacgtctctgtgagtttgcatttcatttggcttggagccctggctcgatgcctcatggatctttctccccaaggagggacgtcttgaggggtccgagcctcaggccaaggacccctgatgcagactctggaatccctggcccaaaggcctgtctgggcccatctggggctgaggacacacagatacataatgacacctgcagaaatgtattctctgaggacacttagaatatgaggaagagggtgtggcccaaccctcacttcacctggggaggggcttcttccggacagtagacaccctgcccgtgcagagagatgtcatgggggcacctgctctccctgatagatgctgagagcatccagaaacttccagaccagccctctcaccacacccagaagaggcctttcccatctggagagaagcttccagaccagcccttcacacaccacagccaggaggggcctttcccacctggagagaaacttccagaccagcccctcataccacagccaagaggggcctttctcacctggagagaaatttccagaccatcccctctcaccacagccaggagaggcctttcccaccggaagaagaaacttccagaccagcccctcacaccacagccaagagaagcctttccagcctggagagaaacttccagaccagccctctcactacagccaggagaggcctttcccgcctggaaacttccggacaagcctctcacacaccacagccaggagaggcctttcccacctggacagaaacttccagaccagcccctctcaccacagccaggagaggcctttaccacctggagagaagcttccagaccagcccctcacaccacagccaggagaggcctttcccacctggagagaaacttccagaccagcccctcataccacagccaagaggggcctttctcacctggagagaaacttccagaccagcccctcacaccaccgccaggagaggcctttcccaccgggagagaaacttccagaccagcccctcacaccacagccaggagaggcctttcccaccgggagagaaacttccagaccagccctctcactacagccagaagaggcctttcccaccgggagaggaacttccagaccagcccctcacaccacagccaggagaggcctttcccgcctggagagaagcttcaggccagctcctcacaccacagccaggagagaccttttctgcctggagagaaactttcagaccagccccacacaccacagccaggagaggccgttcctgcctggagagaagcttccagaccagcccttcacaccacagccaggagaggcctttcccacctggagagaaacttccagaccagcccctctcaccacagccaggagaggccgttcccacctggagggaaaattgctcctttgatggaggttagggactgtcaccctcagcactgtgaacataccgggcgagatcattcttcaggggaaggagctgcccagagcatcacaggatgttccagtgtccctggtctctgcccaccagatgccagcactcccaccattcgtggcaaccaaggatgtctccagacactgccccgtgtccatggggttatcacccactgtgctgagtcaaagggtgccttgccctggtctaatccaggacatagccgtggatacgtccaaaaatccccagaacctagtgagccctctggctctgggagcccctatctcaggaattttcagggtcatttgtgacttttcatttcttaaaacctgaaatagactctcttagaaacaagtgactccttcccagtggccaaaacttaatcatcagagcgcttccttcagttcctcacccatcagccagtgggctctccaaagttaaccaacagctccctcttgtggttcactaaaaaacttggttattccatggagttgtgcaaagctatggcttccttggtgcaatattcttaaaacctgctttgcatagaaatcacttttgcccaggctggagtgcagtggcgtgatctcggctcatggcaatctccatctcccgggttcaagcgattttcctgcctcagcctccccagtagctgggactacagacgtgtgccaccacgcctggctaaatcttttttgtattttattttagtagagacggggtttcaccatactggccaggctgctctcgaactcctgacctcatcgtccacctgcctcggcctccccaaagtgctgagattaggcgttagccaccgcgcccggccagaaatcacttttatattgtcacatgggccctctgcacagagtccgatggctcctcccggggaagcctgattttgtgacgtgtgtatagtaaatgcaggccctctggcagcaccataattggtcggttaccctgagcccagagctctgaaagcatctgtggaatgatcacgggacccttctcctctgagaaggctcccggctgcctccccgccaccgagcttgtagcctgaatgcctggctgtcgcatggagcattttgcttctggggtgtcttccttagccaaagggaacgtgtcatttgctcgaccctggcccacccttgccgcccagctgttgtgctgggcacagtctggggcacaggcctccatgatgaagacgcgtgggctgtcggtgctttcatccgtcacaaactggcacctgtacctgccagcaggagcatgatggggacttccatgctggaattgctccctgattaaaatgagatatggctatttggaagacactgcattttagccagtgtacctgggcacagactcggggctgccctgaagctgatgaaggcttgaaggacggaagggctgagccacatgaaggcagcactcagggccaggggagagagaagaggatcagcagtgcagccccaggatgcctcgcagacgtgccttctgccatgattgtgaagttctagccacgtggaactatgtaaaattctagcagcaaacccagtgcctggagctcaacaaatatttattaaatgagtaaatcatgaagggtggataatgctgaaaggtgggaaggatagagtccttatcagggaggggaagttgagccggcggaactgaggaaaatcaaaaagagaaagcaaataagctgtaagtctgcctttcttcatggtctacaacacagccttcctgtactcaacttatcaccagatcctcagctaacagaaaaacctctcggaagaactggttgttaaagagcacctctgccttcttcctctgttgccatgtgatctctgcacacgctagctctccttcgccttctgccatgctggaagtagcctgaggccctcaccagaagcagacgctggcaccgtgctgcttgtacagcctgcagagccgtgagccaagtaaacctctttaattacccagcctcagggccagacccgagggtttctgagccgtgactctggctaagcccttcactgctctgggctgcaaaaggaggatcacagcacctcccgtgggtgggcaggattacttaagatgacgcaggacagcgccca

SEQ ID NO: 291973 - DNA, 4634 bp, Homo sapiens
ccctccggctcggcgaagcagggaaggggagagaagcaggagtcgggagactgcacaggccagaaagtctgcggagcgggccgcgcccctggcccgcccgggctccaagtcccgcgtcgccgccctggcggggacggtgcagcaggcggcgggatgcggcggggcggcagcctgagcgccccggatggcccgcggcggggcggcctgcaagagcgacgcgcggctgctgctggggcgggacgcgctgcggccggcgcccgccctgctggcccccgccgtgctgctgggcgccgcgctcggcctcggcctcggcctttggcttggctgccgcgcgggccgccagcgcacgcgacaccagaaagacgacactcaaaatctgctcaagaatttggagtctaatgcgcagaccccctcggaaactggctccccatcaaggaggaggaagagagaagtgcagatgtcgaaggacaaggaagctgttgatgaatgtgagccgccttccaacagcaatatcacagcattcgccctgaaggccaaagtcatctaccccatcaatcagaagttccggcctctggccgatggctcctccaacccgtctctgcatgaaaacttaaagcaggctgttttgccacaccagccggtagaggcctctccttccagcagtctggggagcctgagccagggtgagaaggacgactgcagctcctcatccagcgtccactcggccaccagcgatgacaggtttctcagccgcaccttcctccgggtgaacgccttccctgaagtgctggcctgcgagagtgtagacgttgacctgtgtatctacagccttcacttaaaagacctgctgcatttggacacggcactgaggcaggaaaagcatatgatgtttattcagatttttaaaatgtgcctccttgaccttcttcctaaaaagaagtcagatgatgaattataccagaagatcctttcaaaacaagaaaaagatttggaggaactagaaaagggacttcaggtcaaactgtcaaacacagaaatgtcgggggctggtgactctgagtacatcaccctggctgatgtggaaaagaaggagagagaatactctgaacagctaatcgataatatggaagctttctggaaacagatggcaaatatccagcactttcttgtggaccagtttaagtgttccagctccaaagcccgacagctgatgatgactctgacggaaagaatgattgcagccgaagggctattgtgcgattctcaggagctgcaggctctggacgccctggagaggacgatggggcgggcgcacatggcaaaagtgattgagtttctgaagctgcaagtccaggaggagaccaggtgccggctggctgccatctcccacggcctggagctgctggctggtgaggggaagctgtccgggcggcagaaggaggagctgctcacgcagcagcacaaggccttctggcaggaggcagagcgcttcagccgggagtttgtccagcgaggcaaagacctggtcacggcgtctctggctcaccaggtggagggaacggcaaaactcacgctggcccaagaggaggaacagagaagcttcctggctgaggcccagccgactgctgacccggaaaagtttctcgaggcttttcatgaggtcctggagaggcagaggctgatgcagtgtgacctggaggaagaggagaatgtcagagccaccgaggctgtggttgcactctgccaggagctgtacttcagcaccgtggacactttccagaagttcgtggatgccctgttccttcagacgctccctggcatgactggcctccccccggaagagtgtgactacttgaggcaggaagtccaggagaacgctgcctggcagctggggaagtcaaatcgcttccggaggcagcagtggaaactcttccaggagctcctagagcaagaccagcaggtgtggatggaggagtgtgcgctgtccagcgtgctgcagacacacctgcgggaggaccacgagggcaccatccgcggcgtcttgggccgactgggcggcctcactgaagagtccacgcggtgtgtcctgcaggggcatgacctgctgttgcgctcagccctccggaggctggcactccgcggcaacgccctggccaccctgacgcagatgcggctatcggggaagaagcacctcctgcaggagctgcgggaacagcgtgcactggagcaggggtcctcccagtgcctggacgagcatcagtggcagctgctcagggccctggaggcgcgtgtgctggaggaggccagccggctagaggaggaagcacagcagacacggctgcagctccagcagcggctcctggccgaggcccaggaggtggggcagcttctgcagcagcacatggagtgcgccattgggcaggcgctgctggtgcatgcacggaatgcagccaccaagagccgggccaaggacagggatgacttcaagaggacactgatggaggcggcagtggagagcgtctacgtgaccagcgctggtgtcagccgcctggtgcaggcgtattaccagcaaatcggaaggatcatggaggaccacgaggagagaaaactgcagcacctgaagaccctgcagggtgagaggatggaaaattacaaactgcggaaaaagcaagaactcagcaacccttcgtcgggcagcaggacggcaggtggcgctcatgagacctcccaggcggtccaccagaggatgctgtcccagcagaagaggttcctggcccagttcccagtgcaccagcagatgcgtctgcacgcccagcagcagcaggcaggagtcatggaccttctggaagcccagctggagacccagctacaggaagctgaacagaacttcatctccgagctggcagccttggcccgagtgccccttgctgaaagcaaactgttgcctgctaagcgtgggctgctagagaagcccctaaggactaaaaggaagaagcccctgccccaggaaagaggggacctgggggtgcccaacaatgaggaccttgcctccggggaccagacctcaggctcactcagcagcaaaaggctgagtcagcaagaaagtgaagctggggacagtgggaactcaaagaagatgctaaagagaagaagcaacttgtagtttaagaccagtcggtgggacaagacctgaagccctgggtctgggtgtgaattccaccttccctcctgcagtgctgagaggcagcgaggacggagaggacagcggcatctctaggctcttctgagagggacagagaaagaatagaaatgtgccctaaaagcataaatgagtatcacctgagaaaattaggcattcccgtcttggaaacacgtctctgtgagtttgcatttcatttggcttggagccctggctcgatgcctcatggatctttctccccaaggagggacgtcttgaggggtccgagcctcaggccaaggacccctgatgcagactctggaatccctggcccaaaggcctgtctgggcccatctggggctgaggacacacagatacataatgacacctgcagaaatgtattctctgaggacacttagaatatgaggaagagggtgtggcccaaccctcacttcacctggggaggggcttcttccggacagtagacaccctgcccgtgcagagagatgtcatgggggcacctgctctccctgatagatgctgagagcatccagaaacttccagaccagccctctcaccacacccagaagaggcctttcccatctggagagaagcttccagaccagcccttcacacaccacagccaggaggggcctttcccacctggagagaaacttccagaccagcccctcataccacagccaagaggggcctttctcacctggagagaaatttccagaccatcccctctcaccacagccaggagaggcctttcccaccggaagaagaaacttccagaccagcccctcacaccacagccaagagaagcctttccagcctggagagaaacttccagaccagccctctcactacagccaggagaggcctttcccgcctggaaacttccggacaagcctctcacacaccacagccaggagaggcctttcccacctggacagaaacttccagaccagcccctctcaccacagccaggagaggcctttaccacctggagagaagcttccagaccagcccctcacaccacagccaggagaggcctttcccacctggagagaaacttccagaccagcccctcataccacagccaagaggggcctttctcacctggagagaaacttccagaccagcccctcacaccaccgccaggagaggcctttcccaccgggagagaaacttccagaccagcccctcacaccacagccaggagaggcctttcccaccgggagagaaacttccagaccagccctctcactacagccagaagaggcctttcccaccgggagaggaacttccagaccagcccctcacaccacagccaggagaggcctttcccgcctggagagaagcttcaggccagctcctcacaccacagccaggagagaccttttctgcctggagagaaactttcagaccaggcgtagtgtatgctcggatt

SEQ ID NO: 291974 - DNA, 7085 bp, Homo sapiens
ttctagaggatcccggtatccccatacagagtgtagacgttgacctgtgtatctacagccttcacttaaaagacctgctgcatttggacacggcactgaggcaggaaaagcatatgatgtttattcagatttttaaaatgtgcctccttgaccttcttcctaaaaagaagtcagatgatgaattataccagaagatcctttcaaaacaagaaaaagatttggaggaactagaaaagggacttcaggtcaaactgtcaaacacagaaatgtcgggggctggtgactctgagtacatcaccctggctgatgtggaaaagaaggagagagaatactctgaacagctaatcgataatatggaagctttctggaaacagatggcaaatatccagcactttcttgtggaccagtttaagtgttccagctccaaagcccgacagctgatgatgactctgacggaaagaatgattgcagccgaagggctattgtgcgattctcaggagctgcaggctctggacgccctggagaggacgatggggcgggcgcacatggcaaaagtgattgagtttctgaagctgcaagtccaggaggagaccaggtgccggctggctgccatctcccacggcctggagctgctggctggtgaggggaagctgtccgggcggcagaaggaggagctgctcacgcagcagcacaaggccttctggcaggaggcagagcgcttcagccgggagtttgtccagcgaggcaaagacctggtcacggcgtctctggctcaccaggtggagggaacggcaaaactcacgctggcccaagaggaggaacagagaagcttcctggctgaggcccagccgactgctgacccggaaaagtttctcgaggcttttcatgaggtcctggagaggcagaggctgatgcagtgtgacctggaggaagaggagaatgtcagagccaccgaggctgtggttgcactctgccaggagctgtacttcagcaccgtggacactttccagaagttcgtggatgccctgttccttcagacgctccctggcatgactggcctccccccggaagagtgtgactacttgaggcaggaagtccaggagaacgctgcctggcagctggggaagtcaaatcgcttccggaggcagcagtggaaactcttccaggagctcctagagcaagaccagcaggtgtggatggaggagtgtgcgctgtccagcgtgctgcagacacacctgcgggaggaccacgagggcaccatccgcggcgtcttgggccgactgggcggcctcactgaagagtccacgcggtgtgtcctgcaggggcatgacctgctgttgcgctcagccctccggaggctggcactccgcggcaacgccctggccaccctgacgcagatgcggctatcggggaagaagcacctcctgcaggagctgcgggaacagcgtgcactggagcaggggtcctcccagtgcctggacgagcatcagtggcagctgctcagggccctggaggcgcgtgtgctggaggaggccagccggctagaggaggaagcacagcagacacggctgcagctccagcagcggctcctggccgaggcccaggaggtggggcagcttctgcagcagcacatggagtgcgccattgggcaggcgctgctggtgcatgcacggaatgcagccaccaagagccgggccaaggacagggatgacttcaagaggacactgatggaggcggcagtggagagcgtctacgtgaccagcgctggtgtcagccgcctggtgcaggcgtattaccagcaaatcggaaggatcatggaggaccacgaggagagaaaactgcagcacctgaagaccctgcagggtgagaggatggaaaattacaaactgcggaaaaagcaagaactcagcaacccttcgtcgggcagcaggacggcaggtggcgctcatgagacctcccaggcggtccaccagaggatgctgtcccagcagaagaggttcctggcccagttcccagtgcaccagcagatgcgtctgcacgcccagcagcagcaggcaggagtcatggaccttctggaagcccagctggagacccagctacaggaagctgaacagaacttcatctccgagctggcagccttggcccgagtgccccttgctgaaagcaaactgttgcctgctaagcgtgggctgctagagaagcccctaaggactaaaaggaagaagcccctgccccaggaaagaggggacctgggggtgcccaacaatgaggaccttgcctccggggaccagacctcaggctcactcagcagcaaaaggctgagtcagcaagaaagtgaagctggggacagtgggaactcaaagaagatgctaaagagaagaagcaacttgtagtttaagaccagtcggtgggacaagacctgaagccctgggtctgggtgtgaattccaccttccctcctgcagtgctgagaggcagcgaggacggagaggacagcggcatctctaggctcttctgagagggacagagaaagaatagaaatgtgccctaaaagcataaatgagtatcacctgagaaaattaggcattcccgtcttggaaacacgtctctgtgagtttgcatttcatttggcttggagccctggctcgatgcctcatggatctttctccccaaggagggacgtcttgaggggtccgagcctcaggccaaggacccctgatgcagactctggaatccctggcccaaaggcctgtctgggcccatctggggctgaggacacacagatacataatgacacctgcagaaatgtattctctgaggacacttagaatatgaggaagagggtgtggcccaaccctcacttcacctggggaggggcttcttccggacagtagacaccctgcccgtgcagagagatgtcatgggggcacctgctctccctgatagatgctgagagcatccagaaacttccagaccagccctctcaccacacccagaagaggcctttcccatctggagagaagcttccagaccagcccttcacacaccacagccaggaggggcctttcccacctggagagaaacttccagaccagcccctcataccacagccaagaggggcctttctcacctggagagaaatttccagaccatcccctctcaccacagccaggagaggcctttcccaccggaagaagaaacttccagaccagcccctcacaccacagccaagagaagcctttccagcctggagagaaacttccagaccagccctctcactacagccaggagaggcctttcccgcctggaaacttccggacaagcctctcacacaccacagccaggagaggcctttcccacctggacagaaacttccagaccagcccctctcaccacagccaggagaggcctttaccacctggagagaagcttccagaccagcccctcacaccacagccaggagaggcctttcccacctggagagaaacttccagaccagcccctcataccacagccaagaggggcctttctcacctggagagaaacttccagaccagcccctcacaccaccgccaggagaggcctttcccaccgggagagaaacttccagaccagcccctcacaccacagccaggagaggcctttcccaccgggagagaaacttccagaccagccctctcactacagccagaagaggcctttcccaccgggagaggaacttccagaccagcccctcacaccacagccaggagaggcctttcccgcctggagagaagcttcaggccagctcctcacaccacagccaggagagaccttttctgcctggagagaaactttcagaccagccccacacaccacagccaggagaggccgttcctgcctggagagaagcttccagaccagcccttcacaccacagccaggagaggcctttcccacctggagagaaacttccagaccagcccctctcaccacagccaggagaggccgttcccacctggagggaaaattgctcctttgatggaggttagggactgtcaccctcagcactgtgaacataccgggcgagatcattcttcaggggaaggagctgcccagagcatcacaggatgttccagtgtccctggtctctgcccaccagatgccagcactcccaccattcgtggcaaccaaggatgtctccagacactgccccgtgtccatggggttatcacccactgtgctgagtcaaagggtgccttgccctggtctaatccaggacatagccgtggatacgtccaaaaatccccagaacctagtgagccctctggctctgggagcccctatctcaggaattttcagggtcatttgtgacttttcatttcttaaaacctgaaatagactctcttagaaacaagtgactccttcccagtggccaaaacttaatcatcagagcgcttccttcagttcctcacccatcagccagtgggctctccaaagttaaccaacagctccctcttgtggttcactaaaaaacttggttattccatggagttgtgcaaagctatggcttccttggtgcaatattcttaaaacctgctttgcatagaaatcacttttgcccaggctggagtgcagtggcgtgatctcggctcatggcaatctccatctcccgggttcaagcgattttcctgcctcagcctccccagtagctgggactacagacgtgtgccaccacgcctggctaaatcttttttgtattttattttagtagagacggggtttcaccatactggccaggctgctctcgaactcctgacctcatcgtccacctgcctcggcctccccaaagtgctgagattaggcgttagccaccgcgcccggccagaaatcacttttatattgtcacatgggccctctgcacagagtccgatggctcctcccggggaagcctgattttgtgacgtgtgtatagtaaatgcaggccctctggcagcaccataattggtcggttaccctgagcccagagctctgaaagcatctgtggaatgatcacgggacccttctcctctgagaaggctcccggctgcctccccgccaccgagcttgtagcctgaatgcctggctgtcgcatggagcattttgcttctggggtgtcttccttagccaaagggaacgtgtcatttgctcgaccctggcccacccttgccgcccagctgttgtgctgggcacagtctggggcacaggcctccatgatgaagacgcgtgggctgtcggtgctttcatccgtcacaaactggcacctgtacctgccagcaggagcatgatggggacttccatgctggaattgctccctgattaaaatgagatatggctatttggaagacactgcattttagccagtgtacctgggcacagactcggggctgccctgaagctgatgaaggcttgaaggacggaagggctgagccacatgaaggcagcactcagggccaggggagagagaagaggatcagcagtgcagccccaggatgcctcgcagacgtgccttctgccatgattgtgaagttctagccacgtggaactatgtaaaattctagcagcaaacccagtgcctggagctcaacaaatatttattaaatgagtaaatcatgaagggtggataatgctgaaaggtgggaaggatagagtccttatcagggaggggaagttgagccggcggaactgaggaaaatcaaaaagagaaagcaaataagctgtaagtctgcctttcttcatggtctacaacacagccttcctgtactcaacttatcaccagatcctcagctaacagaaaaacctctcggaagaactggttgttaaagagcacctctgccttcttcctctgttgccatgtgatctctgcacacgctagctctccttcgccttctgccatgctggaagtagcctgaggccctcaccagaagcagacgctggcaccgtgctgcttgtacagcctgcagagccgtgagccaagtaaacctctttaattacccagcctcaggtgctccgggaacgccttccgcggaatgaagcggcccatgcccttgttgacgttgatgtttccgtcttcaaagacgatcttgccctggctgatgaccactagtggggagccgtggcactccataccctcgaagatgttgtactccaccgcctgcaccaacagcctcagcgttacttcccaggatttgctctgccccaaacgagctgttcataacagcgattttgcctaacattatatcataagcgtgttccaatgtttttttttctctctaaaaataccttttattgactgtaatattccactgtatggtccacagtgtatataaccaacaactcaccgttgcgcatgtaggctgccggtggctttctataatcaaatcaatattgttctggggcatcacaaagaggaagggggtcccccggggttatgcaatgtggctgctttgactgtactggacataaaaataagtaaaatgttcttcattttacttaaaatgtgtctttaaataaaatttttttctctaggtttctaaaatcaaattactgggtgaaagaatagagctgttttaaagcacgtgtgccatatggccaaattattttcccaagggttcagatcaattgacacgatatcggcacttaccccctccagcattgggtaatgccatttttttctttctctgctaatttgaaagacaaaataacatttcctttaaaacacacattcggccgggcacggtggctcatgcctgtacccccaactactcgggaggctgaggtatgagaactgcttgaatctgggaggtggaggttgcagtgagccgagatcgtgccactgcactccagcctgggggacagagcgagactctgtctccagaaaaaaacaaaacaaaaaactcaccttctttccattattcttcaagtgaatacttgacagttgtgtgtcaactgtcaccagccaactgctttttattattttaaaagtaggtcacatacatggttgaaaacaatcaactggtaaaaaagatattggatagaaaggtaagtctgtgttctacttgagtctgag

SEQ ID NO: 291975 - DNA, 7348 bp, Homo sapiens
gaaacgtcatttttatttctctcccttccctctctccattggttttctcttggaagtcccaggcacctatgtctctgacaccaactgttctcttatggccattagtgggtttcaaacagctcatttgatcccttcttataaacctggagtgagcgtaaggacctcagcatgctgcagaatgagagtttgaggcagggtgtgctgtggcttgtactgatgagggacgtgccaatattcttactcttcatttccgataccctgaaagtcttttccgcttctcattttattttgcagtgtagacgttgacctgtgtatctacagccttcacttaaaagacctgctgcatttggacacggcactgaggcaggaaaagcatatgatgtttattcagatttttaaaatgtgcctccttgaccttcttcctaaaaagaagtcagatgatgaattataccagaagatcctttcaaaacaagaaaaagatttggaggaactagaaaagggacttcaggtcaaactgtcaaacacagaaatgtcgggggctggtgactctgagtacatcaccctggctgatgtggaaaagaaggagagagaatactctgaacagctaatcgataatatggaagctttctggaaacagatggcaaatatccagcactttcttgtggaccagtttaagtgttccagctccaaagcccgacagctgatgatgactctgacggaaagaatgattgcagccgaagggctattgtgcgattctcaggagctgcaggctctggacgccctggagaggacgatggggcgggcgcacatggcaaaagtgattgagtttctgaagctgcaagtccaggaggagaccaggtgccggctggctgccatctcccacggcctggagctgctggctggtgaggggaagctgtccgggcggcagaaggaggagctgctcacgcagcagcacaaggccttctggcaggaggcagagcgcttcagccgggagtttgtccagcgaggcaaagacctggtcacggcgtctctggctcaccaggtggagggaacggcaaaactcacgctggcccaagaggaggaacagagaagcttcctggctgaggcccagccgactgctgacccggaaaagtttctcgaggcttttcatgaggtcctggagaggcagaggctgatgcagtgtgacctggaggaagaggagaatgtcagagccaccgaggctgtggttgcactctgccaggagctgtacttcagcaccgtggacactttccagaagttcgtggatgccctgttccttcagacgctccctggcatgactggcctccccccggaagagtgtgactacttgaggcaggaagtccaggagaacgctgcctggcagctggggaagtcaaatcgcttccggaggcagcagtggaaactcttccaggagctcctagagcaagaccagcaggtgtggatggaggagtgtgcgctgtccagcgtgctgcagacacacctgcgggaggaccacgagggcaccatccgcggcgtcttgggccgactgggcggcctcactgaagagtccacgcggtgtgtcctgcaggggcatgacctgctgttgcgctcagccctccggaggctggcactccgcggcaacgccctggccaccctgacgcagatgcggctatcggggaagaagcacctcctgcaggagctgcgggaacagcgtgcactggagcaggggtcctcccagtgcctggacgagcatcagtggcagctgctcagggccctggaggcgcgtgtgctggaggaggccagccggctagaggaggaagcacagcagacacggctgcagctccagcagcggctcctggccgaggcccaggaggtggggcagcttctgcagcagcacatggagtgcgccattgggcaggcgctgctggtgcatgcacggaatgcagccaccaagagccgggccaaggacagggatgacttcaagaggacactgatggaggcggcagtggagagcgtctacgtgaccagcgctggtgtcagccgcctggtgcaggcgtattaccagcaaatcggaaggatcatggaggaccacgaggagagaaaactgcagcacctgaagaccctgcagggtgagaggatggaaaattacaaactgcggaaaaagcaagaactcagcaacccttcgtcgggcagcaggacggcaggtggcgctcatgagacctcccaggcggtccaccagaggatgctgtcccagcagaagaggttcctggcccagttcccagtgcaccagcagatgcgtctgcacgcccagcagcagcaggcaggagtcatggaccttctggaagcccagctggagacccagctacaggaagctgaacagaacttcatctccgagctggcagccttggcccgagtgccccttgctgaaagcaaactgttgcctgctaagcgtgggctgctagagaagcccctaaggactaaaaggaagaagcccctgccccaggaaagaggggacctgggggtgcccaacaatgaggaccttgcctccggggaccagacctcaggctcactcagcagcaaaaggctgagtcagcaagaaagtgaagctggggacagtgggaactcaaagaagatgctaaagagaagaagcaacttgtagtttaagaccagtcggtgggacaagacctgaagccctgggtctgggtgtgaattccaccttccctcctgcagtgctgagaggcagcgaggacggagaggacagcggcatctctaggctcttctgagagggacagagaaagaatagaaatgtgccctaaaagcataaatgagtatcacctgagaaaattaggcattcccgtcttggaaacacgtctctgtgagtttgcatttcatttggcttggagccctggctcgatgcctcatggatctttctccccaaggagggacgtcttgaggggtccgagcctcaggccaaggacccctgatgcagactctggaatccctggcccaaaggcctgtctgggcccatctggggctgaggacacacagatacataatgacacctgcagaaatgtattctctgaggacacttagaatatgaggaagagggtgtggcccaaccctcacttcacctggggaggggcttcttccggacagtagacaccctgcccgtgcagagagatgtcatgggggcacctgctctccctgatagatgctgagagcatccagaaacttccagaccagccctctcaccacacccagaagaggcctttcccatctggagagaagcttccagaccagcccttcacacaccacagccaggaggggcctttcccacctggagagaaacttccagaccagcccctcataccacagccaagaggggcctttctcacctggagagaaatttccagaccatcccctctcaccacagccaggagaggcctttcccaccggaagaagaaacttccagaccagcccctcacaccacagccaagagaagcctttccagcctggagagaaacttccagaccagccctctcactacagccaggagaggcctttcccgcctggaaacttccggacaagcctctcacacaccacagccaggagaggcctttcccacctggacagaaacttccagaccagcccctctcaccacagccaggagaggcctttaccacctggagagaagcttccagaccagcccctcacaccacagccaggagaggcctttcccacctggagagaaacttccagaccagcccctcataccacagccaagaggggcctttctcacctggagagaaacttccagaccagcccctcacaccaccgccaggagaggcctttcccaccgggagagaaacttccagaccagcccctcacaccacagccaggagaggcctttcccaccgggagagaaacttccagaccagccctctcactacagccagaagaggcctttcccaccgggagaggaacttccagaccagcccctcacaccacagccaggagaggcctttcccgcctggagagaagcttcaggccagctcctcacaccacagccaggagagaccttttctgcctggagagaaactttcagaccagccccacacaccacagccaggagaggccgttcctgcctggagagaagcttccagaccagcccttcacaccacagccaggagaggcctttcccacctggagagaaacttccagaccagcccctctcaccacagccaggagaggccgttcccacctggagggaaaattgctcctttgatggaggttagggactgtcaccctcagcactgtgaacataccgggcgagatcattcttcaggggaaggagctgcccagagcatcacaggatgttccagtgtccctggtctctgcccaccagatgccagcactcccaccattcgtggcaaccaaggatgtctccagacactgccccgtgtccatggggttatcacccactgtgctgagtcaaagggtgccttgccctggtctaatccaggacatagccgtggatacgtccaaaaatccccagaacctagtgagccctctggctctgggagcccctatctcaggaattttcagggtcatttgtgacttttcatttcttaaaacctgaaatagactctcttagaaacaagtgactccttcccagtggccaaaacttaatcatcagagcgcttccttcagttcctcacccatcagccagtgggctctccaaagttaaccaacagctccctcttgtggttcactaaaaaacttggttattccatggagttgtgcaaagctatggcttccttggtgcaatattcttaaaacctgctttgcatagaaatcacttttgcccaggctggagtgcagtggcgtgatctcggctcatggcaatctccatctcccgggttcaagcgattttcctgcctcagcctccccagtagctgggactacagacgtgtgccaccacgcctggctaaatcttttttgtattttattttagtagagacggggtttcaccatactggccaggctgctctcgaactcctgacctcatcgtccacctgcctcggcctccccaaagtgctgagattaggcgttagccaccgcgcccggccagaaatcacttttatattgtcacatgggccctctgcacagagtccgatggctcctcccggggaagcctgattttgtgacgtgtgtatagtaaatgcaggccctctggcagcaccataattggtcggttaccctgagcccagagctctgaaagcatctgtggaatgatcacgggacccttctcctctgagaaggctcccggctgcctccccgccaccgagcttgtagcctgaatgcctggctgtcgcatggagcattttgcttctggggtgtcttccttagccaaagggaacgtgtcatttgctcgaccctggcccacccttgccgcccagctgttgtgctgggcacagtctggggcacaggcctccatgatgaagacgcgtgggctgtcggtgctttcatccgtcacaaactggcacctgtacctgccagcaggagcatgatggggacttccatgctggaattgctccctgattaaaatgagatatggctatttggaagacactgcattttagccagtgtacctgggcacagactcggggctgccctgaagctgatgaaggcttgaaggacggaagggctgagccacatgaaggcagcactcagggccaggggagagagaagaggatcagcagtgcagccccaggatgcctcgcagacgtgccttctgccatgattgtgaagttctagccacgtggaactatgtaaaattctagcagcaaacccagtgcctggagctcaacaaatatttattaaatgagtaaatcatgaagggtggataatgctgaaaggtgggaaggatagagtccttatcagggaggggaagttgagccggcggaactgaggaaaatcaaaaagagaaagcaaataagctgtaagtctgcctttcttcatggtctacaacacagccttcctgtactcaacttatcaccagatcctcagctaacagaaaaacctctcggaagaactggttgttaaagagcacctctgccttcttcctctgttgccatgtgatctctgcacacgctagctctccttcgccttctgccatgctggaagtagcctgaggccctcaccagaagcagacgctggcaccgtgctgcttgtacagcctgcagagccgtgagccaagtaaacctctttaattacccagcctcaggtgctccgggaacgccttccgcggaatgaagcggcccatgcccttgttgacgttgatgtttccgtcttcaaagacgatcttgccctggctgatgaccactagtggggagccgtggcactccataccctcgaagatgttgtactccaccgcctgcaccaacagcctcagcgttacttcccaggatttgctctgccccaaacgagctgttcataacagcgattttgcctaacattatatcataagcgtgttccaatgtttttttttctctctaaaaataccttttattgactgtaatattccactgtatggtccacagtgtatataaccaacaactcaccgttgcgcatgtaggctgccggtggctttctataatcaaatcaatattgttctggggcatcacaaagaggaagggggtcccccggggttatgcaatgtggctgctttgactgtactggacataaaaataagtaaaatgttcttcattttacttaaaatgtgtctttaaataaaatttttttctctaggtttctaaaatcaaattactgggtgaaagaatagagctgttttaaagcacgtgtgccatatggccaaattattttcccaagggttcagatcaattgacacgatatcggcacttaccccctccagcattgggtaatgccatttttttctttctctgctaatttgaaagacaaaataacatttcctttaaaacacacattcggccgggcacggtggctcatgcctgtacccccaactactcgggaggctgaggtatgagaactgcttgaatctgggaggtggaggttgcagtgagccgagatcgtgccactgcactccagcctgggggacagagcgagactctgtctccagaaaaaaacaaaacaaaaaactcaccttctttccattattcttcaagtgaatacttgacagttgtgtgtcaactgtcaccagccaactgctttttattattttaaaagtaggtcacatacatggttgaaaacaatcaactggtaaaaaagatattggatagaaaggtaagtctgtgttctacttgagtctgag

SEQ ID NO: 291976 - DNA, 4233 bp, Homo sapiens
aatcgagctcgccccggttattttcttcttccggacagtagacaccctgcccgtgcagagagatgtcatgggggcacctgctctccctgatagatgctgagagcatccagaaacttccagaccagccctctcaccacacccagaagaggcctttcccatctggagagaagcttccagaccagcccttcacacaccacagccaggaggggcctttcccacctggagagaaacttccagaccagcccctcataccacagccaagaggggcctttctcacctggagagaaatttccagaccatcccctctcaccacagccaggagaggcctttcccaccggaagaagaaacttccagaccagcccctcacaccacagccaagagaagcctttccagcctggagagaaacttccagaccagccctctcactacagccaggagaggcctttcccgcctggaaacttccggacaagcctctcacacaccacagccaggagaggcctttcccacctggacagaaacttccagaccagcccctctcaccacagccaggagaggcctttaccacctggagagaagcttccagaccagcccctcacaccacagccaggagaggcctttcccacctggagagaaacttccagaccagcccctcataccacagccaagaggggcctttctcacctggagagaaacttccagaccagcccctcacaccaccgccaggagaggcctttcccaccgggagagaaacttccagaccagcccctcacaccacagccaggagaggcctttcccaccgggagagaaacttccagaccagccctctcactacagccagaagaggcctttcccaccgggagaggaacttccagaccagcccctcacaccacagccaggagaggcctttcccgcctggagagaagcttcaggccagctcctcacaccacagccaggagagaccttttctgcctggagagaaactttcagaccagccccacacaccacagccaggagaggccgttcctgcctggagagaagcttccagaccagcccttcacaccacagccaggagaggcctttcccacctggagagaaacttccagaccagcccctctcaccacagccaggagaggccgttcccacctggagggaaaattgctcctttgatggaggttagggactgtcaccctcagcactgtgaacataccgggcgagatcattcttcaggggaaggagctgcccagagcatcacaggatgttccagtgtccctggtctctgcccaccagatgccagcactcccaccattcgtggcaaccaaggatgtctccagacactgccccgtgtccatggggttatcacccactgtgctgagtcaaagggtgccttgccctggtctaatccaggacatagccgtggatacgtccaaaaatccccagaacctagtgagccctctggctctgggagcccctatctcaggaattttcagggtcatttgtgacttttcatttcttaaaacctgaaatagactctcttagaaacaagtgactccttcccagtggccaaaacttaatcatcagagcgcttccttcagttcctcacccatcagccagtgggctctccaaagttaaccaacagctccctcttgtggttcactaaaaaacttggttattccatggagttgtgcaaagctatggcttccttggtgcaatattcttaaaacctgctttgcatagaaatcacttttgcccaggctggagtgcagtggcgtgatctcggctcatggcaatctccatctcccgggttcaagcgattttcctgcctcagcctccccagtagctgggactacagacgtgtgccaccacgcctggctaaatcttttttgtattttattttagtagagacggggtttcaccatactggccaggctgctctcgaactcctgacctcatcgtccacctgcctcggcctccccaaagtgctgagattaggcgttagccaccgcgcccggccagaaatcacttttatattgtcacatgggccctctgcacagagtccgatggctcctcccggggaagcctgattttgtgacgtgtgtatagtaaatgcaggccctctggcagcaccataattggtcggttaccctgagcccagagctctgaaagcatctgtggaatgatcacgggacccttctcctctgagaaggctcccggctgcctccccgccaccgagcttgtagcctgaatgcctggctgtcgcatggagcattttgcttctggggtgtcttccttagccaaagggaacgtgtcatttgctcgaccctggcccacccttgccgcccagctgttgtgctgggcacagtctggggcacaggcctccatgatgaagacgcgtgggctgtcggtgctttcatccgtcacaaactggcacctgtacctgccagcaggagcatgatggggacttccatgctggaattgctccctgattaaaatgagatatggctatttggaagacactgcattttagccagtgtacctgggcacagactcggggctgccctgaagctgatgaaggcttgaaggacggaagggctgagccacatgaaggcagcactcagggccaggggagagagaagaggatcagcagtgcagccccaggatgcctcgcagacgtgccttctgccatgattgtgaagttctagccacgtggaactatgtaaaattctagcagcaaacccagtgcctggagctcaacaaatatttattaaatgagtaaatcatgaagggtggataatgctgaaaggtgggaaggatagagtccttatcagggaggggaagttgagccggcggaactgaggaaaatcaaaaagagaaagcaaataagctgtaagtctgcctttcttcatggtctacaacacagccttcctgtactcaacttatcaccagatcctcagctaacagaaaaacctctcggaagaactggttgttaaagagcacctctgccttcttcctctgttgccatgtgatctctgcacacgctagctctccttcgccttctgccatgctggaagtagcctgaggccctcaccagaagcagacgctggcaccgtgctgcttgtacagcctgcagagccgtgagccaagtaaacctctttaattacccagcctcaggtgctccgggaacgccttccgcggaatgaagcggcccatgcccttgttgacgttgatgtttccgtcttcaaagacgatcttgccctggctgatgaccactagtggggagccgtggcactccataccctcgaagatgttgtactccaccgcctgcaccaacagcctcagcgttacttcccaggatttgctctgccccaaacgagctgttcataacagcgattttgcctaacattatatcataagcgtgttccaatgtttttttttctctctaaaaataccttttattgactgtaatattccactgtatggtccacagtgtatataaccaacaactcaccgttgcgcatgtaggctgccggtggctttctataatcaaatcaatattgttctggggcatcacaaagaggaagggggtcccccggggttatgcaatgtggctgctttgactgtactggacataaaaataagtaaaatgttcttcattttacttaaaatgtgtctttaaataaaatttttttctctaggtttctaaaatcaaattactgggtgaaagaatagagctgttttaaagcacgtgtgccatatggccaaattattttcccaagggttcagatcaattgacacgatatcggcacttaccccctccagcattgggtaatgccatttttttctttctctgctaatttgaaagacaaaataacatttcctttaaaacacacattcggccgggcacggtggctcatgcctgtacccccaactactcgggaggctgaggtatgagaactgcttgaatctgggaggtggaggttgcagtgagccgagatcgtgccactgcactccagcctgggggacagagcgagactctgtctccagaaaaaaacaaaacaaaaaactcaccttctttccattattcttcaagtgaatacttgacagttgtgtgtcaactgtcaccagccaactgctttttattattttaaaagtaggtcacatacatggttgaaaacaatcaactggtaaaaaagatattggatagaaaggtaagtctgtgttctacttgagtctgag

SEQ ID NO: 291977 - DNA, 3832 bp, Homo sapiens
ccctccggctcggcgaagcagggaaggggagagaagcaggagtcgggagactgcacaggccagaaagtctgcggagcgggccgcgcccctggcccgcccgggctccaagtcccgcgtcgccgccctggcggggacggtgcagcaggcggcgggatgcggcggggcggcagcctgagcgccccggatggcccgcggcggggcggcctgcaagagcgacgcgcggctgctgctggggcgggacgcgctgcggccggcgcccgccctgctggcccccgccgtgctgctgggcgccgcgctcggcctcggcctcggcctttggcttggctgccgcgcgggccgccagcgcacgcgacaccagaaagacgacactcaaaatctgctcaagaatttggagtctaatgcgcagaccccctcggaaactggctccccatcaaggaggaggaagagagaagtgcagatgtcgaaggacaaggaagctgttgatgaatgtgagccgccttccaacagcaatatcacagcattcgccctgaaggccaaagtcatctaccccatcaatcagaagttccggcctctggccgatggctcctccaacccgtctctgcatgaaaacttaaagcaggctgttttgccacaccagccggtagaggcctctccttccagcagtctggggagcctgagccagggtgagaaggacgactgcagctcctcatccagcgtccactcggccaccagcgatgacaggtttctcagccgcaccttcctccgggtgaacgccttccctgaagtgctggcctgcgagagtgtagacgttgacctgtgtatctacagccttcacttaaaagacctgctgcatttggacacggcactgaggcaggaaaagcatatgatgtttattcagatttttaaaatgtgcctccttgaccttcttcctaaaaagaagtcagatgatgaattataccagaagatcctttcaaaacaagaaaaagatttggaggaactagaaaagggacttcaggtcaaactgtcaaacacagaaatgtcgggggctggtgactctgagtacatcaccctggctgatgtggaaaagaaggagagagaatactctgaacagctaatcgataatatggaagctttctggaaacagatggcaaatatccagcactttcttgtggaccagtttaagtgttccagctccaaagcccgacagctgatgatgactctgacggaaagaatgattgcagccgaagggctattgtgcgattctcaggagctgcaggctctggacgccctggagaggacgatggggcgggcgcacatggcaaaagtgattgagtttctgaagctgcaagtccaggaggagaccaggtgccggctggctgccatctcccacggcctggagctgctggctggtgaggggaagctgtccgggcggcagaaggaggagctgctcacgcagcagcacaaggccttctggcaggaggcagagcgcttcagccgggagtttgtccagcgaggcaaagacctggtcacggcgtctctggctcaccaggtggagggaacggcaaaactcacgctggcccaagaggaggaacagagaagcttcctggctgaggcccagccgactgctgacccggaaaagtttctcgaggcttttcatgaggtcctggagaggcagaggctgatgcagtgtgacctggaggaagaggagaatgtcagagccaccgaggctgtggttgcactctgccaggagctgtacttcagcaccgtggacactttccagaagttcgtggatgccctgttccttcagacgctccctggcatgactggcctccccccggaagagtgtgactacttgaggcaggaagtccaggagaacgctgcctggcagctggggaagtcaaatcgcttccggaggcagcagtggaaactcttccaggagctcctagagcaagaccagcaggtgtggatggaggagtgtgcgctgtccagcgtgctgcagacacacctgcgggaggaccacgagggcaccatccgcggcgtcttgggccgactgggcggcctcactgaagagtccacgcggtgtgtcctgcaggggcatgacctgctgttgcgctcagccctccggaggctggcactccgcggcaacgccctggccaccctgacgcagatgcggctatcggggaagaagcacctcctgcaggagctgcgggaacagcgtgcactggagcaggggtcctcccagtgcctggacgagcatcagtggcagctgctcagggccctggaggcgcgtgtgctggaggaggccagccggctagaggaggaagcacagcagacacggctgcagctccagcagcggctcctggccgaggcccaggaggtggggcagcttctgcagcagcacatggagtgcgccattgggcaggcgctgctggtgcatgcacggaatgcagccaccaagagccgggccaaggacagggatgacttcaagaggacactgatggaggcggcagtggagagcgtctacgtgaccagcgctggtgtcagccgcctggtgcaggcgtattaccagcaaatcggaaggatcatggaggaccacgaggagagaaaactgcagcacctgaagaccctgcagggtgagaggatggaaaattacaaactgcggaaaaagcaagaactcagcaacccttcgtcgggcagcaggacggcaggtggcgctcatgagacctcccaggcggtccaccagaggatgctgtcccagcagaagaggttcctggcccagttcccagtgcaccagcagatgcgtctgcacgcccagcagcagcaggcaggagtcatggaccttctggaagcccagctggagacccagctacaggaagctgaacagaacttcatctccgagctggcagccttggcccgagtgccccttgctgaaagcaaactgttgcctgctaagcgtgggctgctagagaagcccctaaggactaaaaggaagaagcccctgccccaggaaagaggggacctgggggtgcccaacaatgaggaccttgcctccggggaccagacctcaggctcactcagcagcaaaaggctgagtcagcaagaaagtgaagctggggacagtgggaactcaaagaagatgctaaagagaagaagcaacttgtagtttaagaccagtcggtgggacaagacctgaagccctgggtctgggtgtgaattccaccttccctcctgcagtgctgagaggcagcgaggacggagaggacagcggcatctctaggctcttctgagagggacagagaaagaatagaaatgtgccctaaaagcataaatgagtatcacctgagaaaattaggcattcccgtcttggaaacacgtctctgtgagtttgcatttcatttggcttggagccctggctcgatgcctcatggatctttctccccaaggagggacgtcttgaggggtccgagcctcaggccaaggacccctgatgcagactctggaatccctggcccaaaggcctgtctgggcccatctggggctgaggacacacagatacataatgacacctgcagaaatgtattctctgaggacacttagaatatgaggaagagggtgtggcccaaccctcacttcacctggggaggggcttcttccggacagtagacaccctgcccgtgcagagagatgtcatgggggcacctgctctccctgatagatgctgagagcatccagaaacttccagaccagccctctcaccacacccagaagaggcctttcccatctggataaggcaactgctaacaaccttcacaggagaactttggcaataaca

SEQ ID NO: 291978 - DNA, 2116 bp, Homo sapiens
aagcctccctggcctccacagagtccactgctccctcttctgtgcccctcagtccctgggctccccccaccttcagccctgaccaccttgtggtgttcttgtcaaaatccccagtaaaatccgacattcctgagacaggtgatcaaacacttactgagtgcctactgtgtgcaggcgcacatttggtgctttaacatgttactgcatttagggcacacaatcatactatgaagggggtgtttgtactcccaacttacgggtgagcaatttgaggttcaggccacgtgtcttgcgggacacaggtgttgggtggggaagccaggattgaagcccaaactggttggttttcaaagcccatgatcttaggcacactgtcccacactccaaaggtattttacatattgtgtgtgtacacatttgtatatgcatgtgcatatgtgtgtgcatgtgcatgtgaactccgcaagctggatttacttccctcattggcgataggtggatctgaagggggggggggtggtgtgcagaggttcttaattttaatctttcaaaaccaaccatccattctacttttacctattctcttgcataaagatgtaaaattctagcagcaaacccagtgcctggagctcaacaaatatttattaaatgagtaaatcatgaagggtggataatgctgaaaggtgggaaggatagagtccttatcagggaggggaagttgagccggcggaactgaggaaaatcaaaaagagaaagcaaataagctgtaagtctgcctttcttcatggtctacaacacagccttcctgtactcaacttatcaccagatcctcagctaacagaaaaacctctcggaagaactggttgttaaagagcacctctgccttcttcctctgttgccatgtgatctctgcacacgctagctctccttcgccttctgccatgctggaagtagcctgaggccctcaccagaagcagacgctggcaccgtgctgcttgtacagcctgcagagccgtgagccaagtaaacctctttaattacccagcctcaggtgctccgggaacgccttccgcggaatgaagcggcccatgcccttgttgacgttgatgtttccgtcttcaaagacgatcttgccctggctgatgaccactagtggggagccgtggcactccataccctcgaagatgttgtactccaccgcctgcaccaacagcctcagcgttacttcccaggatttgctctgccccaaacgagctgttcataacagcgattttgcctaacattatatcataagcgtgttccaatgtttttttttctctctaaaaataccttttattgactgtaatattccactgtatggtccacagtgtatataaccaacaactcaccgttgcgcatgtaggctgccggtggctttctataatcaaatcaatattgttctggggcatcacaaagaggaagggggtcccccggggttatgcaatgtggctgctttgactgtactggacataaaaataagtaaaatgttcttcattttacttaaaatgtgtctttaaataaaatttttttctctaggtttctaaaatcaaattactgggtgaaagaatagagctgttttaaagcacgtgtgccatatggccaaattattttcccaagggttcagatcaattgacacgatatcggcacttaccccctccagcattgggtaatgccatttttttctttctctgctaatttgaaagacaaaataacatttcctttaaaacacacattcggccgggcacggtggctcatgcctgtacccccaactactcgggaggctgaggtatgagaactgcttgaatctgggaggtggaggttgcagtgagccgagatcgtgccactgcactccagcctgggggacagagcgagactctgtctccagaaaaaaacaaaacaaaaaactcaccttctttccattattcttcaagtgaatacttgacagttgtgtgtcaactgtcaccagccaactgctttttattattttaaaagtaggtcacatacatggttgaaaacaatcaactggtaaaaaagatattggatagaaaggtaagtctgtgttctacttgagtctgag

SEQ ID NO: 291979 - DNA, 2238 bp, Homo sapiens
tactaaattagcgaccgcgtcgaccttttatattgtcacatgggccctctgcacagagtccgatggctcctcccggggaagcctgattttgtgacgtgtgtatagtaaatgcaggccctctggcagcaccataattggtcggttaccctgagcccagagctctgaaagcatctgtggaatgatcacgggacccttctcctctgagaaggctcccggctgcctccccgccaccgagcttgtagcctgaatgcctggctgtcgcatggagcattttgcttctggggtgtcttccttagccaaagggaacgtgtcatttgctcgaccctggcccacccttgccgcccagctgttgtgctgggcacagtctggggcacaggcctccatgatgaagacgcgtgggctgtcggtgctttcatccgtcacaaactggcacctgtacctgccagcaggagcatgatggggacttccatgctggaattgctccctgattaaaatgagatatggctatttggaagacactgcattttagccagtgtacctgggcacagactcggggctgccctgaagctgatgaaggcttgaaggacggaagggctgagccacatgaaggcagcactcagggccaggggagagagaagaggatcagcagtgcagccccaggatgcctcgcagacgtgccttctgccatgattgtgaagttctagccacgtggaactatgtaaaattctagcagcaaacccagtgcctggagctcaacaaatatttattaaatgagtaaatcatgaagggtggataatgctgaaaggtgggaaggatagagtccttatcagggaggggaagttgagccggcggaactgaggaaaatcaaaaagagaaagcaaataagctgtaagtctgcctttcttcatggtctacaacacagccttcctgtactcaacttatcaccagatcctcagctaacagaaaaacctctcggaagaactggttgttaaagagcacctctgccttcttcctctgttgccatgtgatctctgcacacgctagctctccttcgccttctgccatgctggaagtagcctgaggccctcaccagaagcagacgctggcaccgtgctgcttgtacagcctgcagagccgtgagccaagtaaacctctttaattacccagcctcaggtgctccgggaacgccttccgcggaatgaagcggcccatgcccttgttgacgttgatgtttccgtcttcaaagacgatcttgccctggctgatgaccactagtggggagccgtggcactccataccctcgaagatgttgtactccaccgcctgcaccaacagcctcagcgttacttcccaggatttgctctgccccaaacgagctgttcataacagcgattttgcctaacattatatcataagcgtgttccaatgtttttttttctctctaaaaataccttttattgactgtaatattccactgtatggtccacagtgtatataaccaacaactcaccgttgcgcatgtaggctgccggtggctttctataatcaaatcaatattgttctggggcatcacaaagaggaagggggtcccccggggttatgcaatgtggctgctttgactgtactggacataaaaataagtaaaatgttcttcattttacttaaaatgtgtctttaaataaaatttttttctctaggtttctaaaatcaaattactgggtgaaagaatagagctgttttaaagcacgtgtgccatatggccaaattattttcccaagggttcagatcaattgacacgatatcggcacttaccccctccagcattgggtaatgccatttttttctttctctgctaatttgaaagacaaaataacatttcctttaaaacacacattcggccgggcacggtggctcatgcctgtacccccaactactcgggaggctgaggtatgagaactgcttgaatctgggaggtggaggttgcagtgagccgagatcgtgccactgcactccagcctgggggacagagcgagactctgtctccagaaaaaaacaaaacaaaaaactcaccttctttccattattcttcaagtgaatacttgacagttgtgtgtcaactgtcaccagccaactgctttttattattttaaaagtaggtcacatacatggttgaaaacaatcaactggtaaaaaagatattggatagaaaggtaagtctgtgttctacttgagtctgag

SEQ ID NO: 291980 - DNA, 2260 bp, Homo sapiens
gtcgcgctcggagcgcgtatattatttgggatatgtgtcacataggtcccttgctgatggagagtgcgactgactcgtcccgcgggaaaccctgatacttgtgacgtagtgtataagatcatagtggattcgccctcttagtactgcagctcataattggtcggttaccctgagcccagagctctgaaagcatctgtggaatgatcacgggacccttctcctctgagaaggctcccggctgcctccccgccaccgagcttgtagcctgaatgcctggctgtcgcatggagcattttgcttctggggtgtcttccttagccaaagggaacgtgtcatttgctcgaccctggcccacccttgccgcccagctgttgtgctgggcacagtctggggcacaggcctccatgatgaagacgcgtgggctgtcggtgctttcatccgtcacaaactggcacctgtacctgccagcaggagcatgatggggacttccatgctggaattgctccctgattaaaatgagatatggctatttggaagacactgcattttagccagtgtacctgggcacagactcggggctgccctgaagctgatgaaggcttgaaggacggaagggctgagccacatgaaggcagcactcagggccaggggagagagaagaggatcagcagtgcagccccaggatgcctcgcagacgtgccttctgccatgattgtgaagttctagccacgtggaactatgtaaaattctagcagcaaacccagtgcctggagctcaacaaatatttattaaatgagtaaatcatgaagggtggataatgctgaaaggtgggaaggatagagtccttatcagggaggggaagttgagccggcggaactgaggaaaatcaaaaagagaaagcaaataagctgtaagtctgcctttcttcatggtctacaacacagccttcctgtactcaacttatcaccagatcctcagctaacagaaaaacctctcggaagaactggttgttaaagagcacctctgccttcttcctctgttgccatgtgatctctgcacacgctagctctccttcgccttctgccatgctggaagtagcctgaggccctcaccagaagcagacgctggcaccgtgctgcttgtacagcctgcagagccgtgagccaagtaaacctctttaattacccagcctcaggtgctccgggaacgccttccgcggaatgaagcggcccatgcccttgttgacgttgatgtttccgtcttcaaagacgatcttgccctggctgatgaccactagtggggagccgtggcactccataccctcgaagatgttgtactccaccgcctgcaccaacagcctcagcgttacttcccaggatttgctctgccccaaacgagctgttcataacagcgattttgcctaacattatatcataagcgtgttccaatgtttttttttctctctaaaaataccttttattgactgtaatattccactgtatggtccacagtgtatataaccaacaactcaccgttgcgcatgtaggctgccggtggctttctataatcaaatcaatattgttctggggcatcacaaagaggaagggggtcccccggggttatgcaatgtggctgctttgactgtactggacataaaaataagtaaaatgttcttcattttacttaaaatgtgtctttaaataaaatttttttctctaggtttctaaaatcaaattactgggtgaaagaatagagctgttttaaagcacgtgtgccatatggccaaattattttcccaagggttcagatcaattgacacgatatcggcacttaccccctccagcattgggtaatgccatttttttctttctctgctaatttgaaagacaaaataacatttcctttaaaacacacattcggccgggcacggtggctcatgcctgtacccccaactactcgggaggctgaggtatgagaactgcttgaatctgggaggtggaggttgcagtgagccgagatcgtgccactgcactccagcctgggggacagagcgagactctgtctccagaaaaaaacaaaacaaaaaactcaccttctttccattattcttcaagtgaatacttgacagttgtgtgtcaactgtcaccagccaactgctttttattattttaaaagtaggtcacatacatggttgaaaacaatcaactggtaaaaaagatattggatagaaaggtaagtctgtgttctacttgagtctgag

SEQ ID NO: 291981 - DNA, 1542 bp, Homo sapiens
ggcatgaaggaatccctgtgcaatgggaccccccgatcctattgctcctgcaaattgctgtcttggcatttggggtcagatatctgccctcacggaagctgactgttaaccgcaggcctcagcttcagaccaagaaggaaatgaagccagccaaggggtgtgtctgcctcttcagtgggtgtcccagccagggatttccatgagtccccttgtcctcatatggcctgctgcctgtgcctggccttgtctcggatctgacttgtttccaccccatcccttgtttccccatccagtgcaaagcatctgtgcgacttggtgtctttgacctggtgctacaccttatggaagctggggagagaccaaaaccagatgcagagcctcccagtccgggctggagcctgggaatgcaggaaggtctctggacttctccatctcaattggtcacttaggaagcatacaaagaacaggaccacacaggtgctccgggaacgccttccgcggaatgaagcggcccatgcccttgttgacgttgatgtttccgtcttcaaagacgatcttgccctggctgatgaccactagtggggagccgtggcactccataccctcgaagatgttgtactccaccgcctgcaccaacagcctcagcgttacttcccaggatttgctctgccccaaacgagctgttcataacagcgattttgcctaacattatatcataagcgtgttccaatgtttttttttctctctaaaaataccttttattgactgtaatattccactgtatggtccacagtgtatataaccaacaactcaccgttgcgcatgtaggctgccggtggctttctataatcaaatcaatattgttctggggcatcacaaagaggaagggggtcccccggggttatgcaatgtggctgctttgactgtactggacataaaaataagtaaaatgttcttcattttacttaaaatgtgtctttaaataaaatttttttctctaggtttctaaaatcaaattactgggtgaaagaatagagctgttttaaagcacgtgtgccatatggccaaattattttcccaagggttcagatcaattgacacgatatcggcacttaccccctccagcattgggtaatgccatttttttctttctctgctaatttgaaagacaaaataacatttcctttaaaacacacattcggccgggcacggtggctcatgcctgtacccccaactactcgggaggctgaggtatgagaactgcttgaatctgggaggtggaggttgcagtgagccgagatcgtgccactgcactccagcctgggggacagagcgagactctgtctccagaaaaaaacaaaacaaaaaactcaccttctttccattattcttcaagtgaatacttgacagttgtgtgtcaactgtcaccagccaactgctttttattattttaaaagtaggtcacatacatggttgaaaacaatcaactggtaaaaaagatattggatagaaaggtaagtctgtgttctacttgagtctgag

SEQ ID NO: 291982 - DNA, 557 bp, Homo sapiens
ttctagaggatcccggtatccccatacagagtgtagacgttgacctgtgtatctacagccttcacttaaaagacctgctgcatttggacacggcactgaggcaggaaaagcatatgatgtttattcagatttttaaaatgtgcctccttgaccttcttcctaaaaagaagtcagatgatgaattataccagaagatcctttcaaaacaagaaaaagatttggaggaactagaaaagggacttcaggtcaaactgtcaaacacagaaatgtcgggggctggtgactctgagtacatcaccctggctgatgtggaaaagaaggagagagaatactctgaacagctaatcgataatatggaagctttctggaaacagatggcaaatatccagcactttcttgtggaccagtttaagtgttccagctccaaagcccgacagctgatgatgactctgacggaaagaatgattgcagccgaagggctattgtgcgattctcaggagctgcaggctctggtaatgctggagggggcgggagggaacataaagatattcagacta

SEQ ID NO: 291983 - DNA, 456 bp, Homo sapiens
tcaaaggaggaaacgtcatttttatttctctcccttccctctctccattggttttctcttggaagtcccaggcacctatgtctctgacaccaactgttctcttatggccattagtgggtttcaaacagctcatttgatcccttcttataaacctggagtgagcgtaaggacctcagcatgctgcagaatgagagtttgaggcagggtgtgctgtggcttgtactgatgagggacgtgccaatattcttactcttcatttccgataccctgaaagtcttttccgcttctcattttattttgcagtgtagacgttgacctgtgtatctacagccttcacttaaaagacctgctgcatttggacacggcactgaggcaggaaaagcatatggtaggtggagatgttcgcattccctccttttcatggggacaggagctgggagacaaggactctgtgtg

SEQ ID NO: 291984 - DNA, 178 bp, Homo sapiens
ggacactgatggaggcggcagtggagagcgtctacgtgaccagcgctggtgtcagccgcctggtgcaggcgtattaccagcaaatcggaaggatcatggaggaccacgaggagagaaaactgcagcacctgaagaccctgcagggtacgggaccccccctcagggaagccccagaaga

SEQ ID NO: 291985 - DNA, 7602 bp, Homo sapiens
ccctccggctcggcgaagcagggaaggggagagaagcaggagtcgggagactgcacaggccagaaagtctgcggagcgggccgcgcccctggcccgcccgggctccaagtcccgcgtcgccgccctggcggggacggtgcagcaggcggcgggatgcggcggggcggcagcctgagcgccccggatggcccgcggcggggcggcctgcaagagcgacgcgcggctgctgctggggcgggacgcgctgcggccggcgcccgccctgctggcccccgccgtgctgctgggcgccgcgctcggcctcggcctcggcctttggcttggctgccgcgcgggccgccagcgcacgcgacaccagaaagacgacactcaaaatctgctcaagaatttggagtctaatgcgcagaccccctcggaaactggctccccatcaaggaggaggaagagagaagtgcagatgtcgaaggacaaggaagctgttgatgaatgtgagccgccttccaacagcaatatcacagcattcgccctgaaggccaaagtcatctaccccatcaatcagaagttccggcctctggccgatggctcctccaacccgtctctgcatgaaaacttaaagcaggctgttttgccacaccagccggtagaggcctctccttccagcagtctggggagcctgagccagggtgagaaggacgactgcagctcctcatccagcgtccactcggccaccagcgatgacaggtttctcagccgcaccttcctccgggtgaacgccttccctgaagtgctggcctgcgagagtgtagacgttgacctgtgtatctacagccttcacttaaaagacctgctgcatttggacacggcactgaggcaggaaaagcatatgatgtttattcagatttttaaaatgtgcctccttgaccttcttcctaaaaagaagtcagatgatgaattataccagaagatcctttcaaaacaagaaaaagatttggaggaactagaaaagggacttcaggtcaaactgtcaaacacagaaatgtcgggggctggtgactctgagtacatcaccctggctgatgtggaaaagaaggagagagaatactctgaacagctaatcgataatatggaagctttctggaaacagatggcaaatatccagcactttcttgtggaccagtttaagtgttccagctccaaagcccgacagctgatgatgactctgacggaaagaatgattgcagccgaagggctattgtgcgattctcaggagctgcaggctctggacgccctggagaggacgatggggcgggcgcacatggcaaaagtgattgagtttctgaagctgcaagtccaggaggagaccaggtgccggctggctgccatctcccacggcctggagctgctggctggtgaggggaagctgtccgggcggcagaaggaggagctgctcacgcagcagcacaaggccttctggcaggaggcagagcgcttcagccgggagtttgtccagcgaggcaaagacctggtcacggcgtctctggctcaccaggtggagggaacggcaaaactcacgctggcccaagaggaggaacagagaagcttcctggctgaggcccagccgactgctgacccggaaaagtttctcgaggcttttcatgaggtcctggagaggcagaggctgatgcagtgtgacctggaggaagaggagaatgtcagagccaccgaggctgtggttgcactctgccaggagctgtacttcagcaccgtggacactttccagaagttcgtggatgccctgttccttcagacgctccctggcatgactggcctccccccggaagagtgtgactacttgaggcaggaagtccaggagaacgctgcctggcagctggggaagtcaaatcgcttccggaggcagcagtggaaactcttccaggagctcctagagcaagaccagcaggtgtggatggaggagtgtgcgctgtccagcgtgctgcagacacacctgcgggaggaccacgagggcaccatccgcggcgtcttgggccgactgggcggcctcactgaagagtccacgcggtgtgtcctgcaggggcatgacctgctgttgcgctcagccctccggaggctggcactccgcggcaacgccctggccaccctgacgcagatgcggctatcggggaagaagcacctcctgcaggagctgcgggaacagcgtgcactggagcaggggtcctcccagtgcctggacgagcatcagtggcagctgctcagggccctggaggcgcgtgtgctggaggaggccagccggctagaggaggaagcacagcagacacggctgcagctccagcagcggctcctggccgaggcccaggaggtggggcagcttctgcagcagcacatggagtgcgccattgggcaggcgctgctggtgcatgcacggaatgcagccaccaagagccgggccaaggacagggatgacttcaagaggacactgatggaggcggcagtggagagcgtctacgtgaccagcgctggtgtcagccgcctggtgcaggcgtattaccagcaaatcggaaggatcatggaggaccacgaggagagaaaactgcagcacctgaagaccctgcagggtgagaggatggaaaattacaaactgcggaaaaagcaagaactcagcaacccttcgtcgggcagcaggacggcaggtggcgctcatgagacctcccaggcggtccaccagaggatgctgtcccagcagaagaggttcctggcccagttcccagtgcaccagcagatgcgtctgcacgcccagcagcagcaggcaggagtcatggaccttctggaagcccagctggagacccagctacaggaagctgaacagaacttcatctccgagctggcagccttggcccgagtgccccttgctgaaagcaaactgttgcctgctaagcgtgggctgctagagaagcccctaaggactaaaaggaagaagcccctgccccaggaaagaggggacctgggggtgcccaacaatgaggaccttgcctccggggaccagacctcaggctcactcagcagcaaaaggctgagtcagcaagaaagtgaagctggggacagtgggaactcaaagaagatgctaaagagaagaagcaacttgtagtttaagaccagtcggtgggacaagacctgaagccctgggtctgggtgtgaattccaccttccctcctgcagtgctgagaggcagcgaggacggagaggacagcggcatctctaggctcttctgagagggacagagaaagaatagaaatgtgccctaaaagcataaatgagtatcacctgagaaaattaggcattcccgtcttggaaacacgtctctgtgagtttgcatttcatttggcttggagccctggctcgatgcctcatggatctttctccccaaggagggacgtcttgaggggtccgagcctcaggccaaggacccctgatgcagactctggaatccctggcccaaaggcctgtctgggcccatctggggctgaggacacacagatacataatgacacctgcagaaatgtattctctgaggacacttagaatatgaggaagagggtgtggcccaaccctcacttcacctggggaggggcttcttccggacagtagacaccctgcccgtgcagagagatgtcatgggggcacctgctctccctgatagatgctgagagcatccagaaacttccagaccagccctctcaccacacccagaagaggcctttcccatctggagagaagcttccagaccagcccttcacacaccacagccaggaggggcctttcccacctggagagaaacttccagaccagcccctcataccacagccaagaggggcctttctcacctggagagaaatttccagaccatcccctctcaccacagccaggagaggcctttcccaccggaagaagaaacttccagaccagcccctcacaccacagccaagagaagcctttccagcctggagagaaacttccagaccagccctctcactacagccaggagaggcctttcccgcctggaaacttccggacaagcctctcacacaccacagccaggagaggcctttcccacctggacagaaacttccagaccagcccctctcaccacagccaggagaggcctttaccacctggagagaagcttccagaccagcccctcacaccacagccaggagaggcctttcccacctggagagaaacttccagaccagcccctcataccacagccaagaggggcctttctcacctggagagaaacttccagaccagcccctcacaccaccgccaggagaggcctttcccaccgggagagaaacttccagaccagcccctcacaccacagccaggagaggcctttcccaccgggagagaaacttccagaccagccctctcactacagccagaagaggcctttcccaccgggagaggaacttccagaccagcccctcacaccacagccaggagaggcctttcccgcctggagagaagcttcaggccagctcctcacaccacagccaggagagaccttttctgcctggagagaaactttcagaccagccccacacaccacagccaggagaggccgttcctgcctggagagaagcttccagaccagcccttcacaccacagccaggagaggcctttcccacctggagagaaacttccagaccagcccctctcaccacagccaggagaggccgttcccacctggagggaaaattgctcctttgatggaggttagggactgtcaccctcagcactgtgaacataccgggcgagatcattcttcaggggaaggagctgcccagagcatcacaggatgttccagtgtccctggtctctgcccaccagatgccagcactcccaccattcgtggcaaccaaggatgtctccagacactgccccgtgtccatggggttatcacccactgtgctgagtcaaagggtgccttgccctggtctaatccaggacatagccgtggatacgtccaaaaatccccagaacctagtgagccctctggctctgggagcccctatctcaggaattttcagggtcatttgtgacttttcatttcttaaaacctgaaatagactctcttagaaacaagtgactccttcccagtggccaaaacttaatcatcagagcgcttccttcagttcctcacccatcagccagtgggctctccaaagttaaccaacagctccctcttgtggttcactaaaaaacttggttattccatggagttgtgcaaagctatggcttccttggtgcaatattcttaaaacctgctttgcatagaaatcacttttgcccaggctggagtgcagtggcgtgatctcggctcatggcaatctccatctcccgggttcaagcgattttcctgcctcagcctccccagtagctgggactacagacgtgtgccaccacgcctggctaaatcttttttgtattttattttagtagagacggggtttcaccatactggccaggctgctctcgaactcctgacctcatcgtccacctgcctcggcctccccaaagtgctgagattaggcgttagccaccgcgcccggccagaaatcacttttatattgtcacatgggccctctgcacagagtccgatggctcctcccggggaagcctgattttgtgacgtgtgtatagtaaatgcaggccctctggcagcaccataattggtcggttaccctgagcccagagctctgaaagcatctgtggaatgatcacgggacccttctcctctgagaaggctcccggctgcctccccgccaccgagcttgtagcctgaatgcctggctgtcgcatggagcattttgcttctggggtgtcttccttagccaaagggaacgtgtcatttgctcgaccctggcccacccttgccgcccagctgttgtgctgggcacagtctggggcacaggcctccatgatgaagacgcgtgggctgtcggtgctttcatccgtcacaaactggcacctgtacctgccagcaggagcatgatggggacttccatgctggaattgctccctgattaaaatgagatatggctatttggaagacactgcattttagccagtgtacctgggcacagactcggggctgccctgaagctgatgaaggcttgaaggacggaagggctgagccacatgaaggcagcactcagggccaggggagagagaagaggatcagcagtgcagccccaggatgcctcgcagacgtgccttctgccatgattgtgaagttctagccacgtggaactctctcggaagaactggttgttaaagagcacctctgccttcttcctctgttgccatgtgatctctgcacacgctagctctccttcgccttctgccatgctggaagtagcctgaggccctcaccagaagcagacgctggcaccgtgctgcttgtacagcctgcagagccgtgagccaagtaaacctctttaattacccagcctcaggtgctccgggaacgccttccgcggaatgaagcggcccatgcccttgttgacgttgatgtttccgtcttcaaagacgatcttgccctggctgatgaccactagtggggagccgtggcactccataccctcgaagatgttgtactccaccgcctgcaccaacagcctcagcgttacttcccaggatttgctctgccccaaacgagctgttcataacagcgattttgcctaacattatatcataagcgtgttccaatgtttttttttctctctaaaaataccttttattgactgtaatattccactgtatggtccacagtgtatataaccaacaactcaccgttgcgcatgtaggctgccggtggctttctataatcaaatcaatattgttctggggcatcacaaagaggaagggggtcccccggggttatgcaatgtggctgctttgactgtactggacataaaaataagtaaaatgttcttcattttacttaaaatgtgtctttaaataaaatttttttctctaggtttctaaaatcaaattactgggtgaaagaatagagctgttttaaagcacgtgtgccatatggccaaattattttcccaagggttcagatcaattgacacgatatcggcacttaccccctccagcattgggtaatgccatttttttctttctctgctaatttgaaagacaaaataacatttcctttaaaacacacattcggccgggcacggtggctcatgcctgtacccccaactactcgggaggctgaggtatgagaactgcttgaatctgggaggtggaggttgcagtgagccgagatcgtgccactgcactccagcctgggggacagagcgagactctgtctccagaaaaaaacaaaacaaaaaactcaccttctttccattattcttcaagtgaatacttgacagttgtgtgtcaactgtcaccagccaactgctttttattattttaaaagtaggtcacatacatggttgaaaacaatcaactggtaaaaaagatattggatagaaaggtaagtctgtgttctacttgagtctgag

SEQ ID NO: 291986 - DNA, 6431 bp, Homo sapiens
ccctccggctcggcgaagcagggaaggggagagaagcaggagtcgggagactgcacaggccagaaagtctgcggagcgggccgcgcccctggcccgcccgggctccaagtcccgcgtcgccgccctggcggggacggtgcagcaggcggcgggatgcggcggggcggcagcctgagcgccccggatggcccgcggcggggcggcctgcaagagcgacgcgcggctgctgctggggcgggacgcgctgcggccggcgcccgccctgctggcccccgccgtgctgctgggcgccgcgctcggcctcggcctcggcctttggcttggctgccgcgcgggccgccagcgcacgcgacaccagaaagacgacactcaaaatctgctcaagaatttggagtctaatgcgcagaccccctcggaaactggctccccatcaaggaggaggaagagagaagtgcagatgtcgaaggacaaggaagctgttgatgaatgtgagccgccttccaacagcaatatcacagcattcgccctgaaggccaaagtcatctaccccatcaatcagaagttccggcctctggccgatggctcctccaacccgtctctgcatgaaaacttaaagcaggctgttttgccacaccagccggtagaggcctctccttccagcagtctggggagcctgagccagggtgagaaggacgactgcagctcctcatccagcgtccactcggccaccagcgatgacaggtttctcagccgcaccttcctccgggtgaacgccttccctgaagtgctggcctgcgagagtgtagacgttgacctgtgtatctacagccttcacttaaaagacctgctgcatttggacacggcactgaggcaggaaaagcatatgatgtttattcagatttttaaaatgtgcctccttgaccttcttcctaaaaagaagtcagatgatgaattataccagaagatcctttcaaaacaagaaaaagatttggaggaactagaaaagggacttcaggtcaaactgtcaaacacagaaatgtcgggggctggtgactctgagtacatcaccctggctgatgtggaaaagaaggagagagaatactctgaacagctaatcgataatatggaagctttctggaaacagatggcaaatatccagcactttcttgtggaccagtttaagtgttccagctccaaagcccgacagctgatgatgactctgacggaaagaatgattgcagccgaagggctattgtgcgattctcaggagctgcaggctctggacgccctggagaggacgatggggcgggcgcacatggcaaaagtgattgagtttctgaagctgcaagtccaggaggagaccaggtgccggctggctgccatctcccacggcctggagctgctggctggtgaggggaagctgtccgggcggcagaaggaggagctgctcacgcagcagcacaaggccttctggcaggaggcagagcgcttcagccgggagtttgtccagcgaggcaaagacctggtcacggcgtctctggctcaccaggtggagggaacggcaaaactcacgctggcccaagaggaggaacagagaagcttcctggctgaggcccagccgactgctgacccggaaaagtttctcgaggcttttcatgaggtcctggagaggcagaggctgatgcagtgtgacctggaggaagaggagaatgtcagagccaccgaggctgtggttgcactctgccaggagctgtacttcagcaccgtggacactttccagaagttcgtggatgccctgttccttcagacgctccctggcatgactggcctccccccggaagagtgtgactacttgaggcaggaagtccaggagaacgctgcctggcagctggggaagtcaaatcgcttccggaggcagcagtggaaactcttccaggagctcctagagcaagaccagcaggtgtggatggaggagtgtgcgctgtccagcgtgctgcagacacacctgcgggaggaccacgagggcaccatccgcggcgtcttgggccgactgggcggcctcactgaagagtccacgcggtgtgtcctgcaggggcatgacctgctgttgcgctcagccctccggaggctggcactccgcggcaacgccctggccaccctgacgcagatgcggctatcggggaagaagcacctcctgcaggagctgcgggaacagcgtgcactggagcaggggtcctcccagtgcctggacgagcatcagtggcagctgctcagggccctggaggcgcgtgtgctggaggaggccagccggctagaggaggaagcacagcagacacggctgcagctccagcagcggctcctggccgaggcccaggaggtggggcagcttctgcagcagcacatggagtgcgccattgggcaggcgctgctggtgcatgcacggaatgcagccaccaagagccgggccaaggacagggatgacttcaagaggacactgatggaggcggcagtggagagcgtctacgtgaccagcgctggtgtcagccgcctggtgcaggcgtattaccagcaaatcggaaggatcatggaggaccacgaggagagaaaactgcagcacctgaagaccctgcagggtgagaggatggaaaattacaaactgcggaaaaagcaagaactcagcaacccttcgtcgggcagcaggacggcaggtggcgctcatgagacctcccaggcggtccaccagaggatgctgtcccagcagaagaggttcctggcccagttcccagtgcaccagcagatgcgtctgcacgcccagcagcagcaggcaggagtcatggaccttctggaagcccagctggagacccagctacaggaagctgaacagaacttcatctccgagctggcagccttggcccgagtgccccttgctgaaagcaaactgttgcctgctaagcgtgggctgctagagaagcccctaaggactaaaaggaagaagcccctgccccaggaaagaggggacctgggggtgcccaacaatgaggaccttgcctccggggaccagacctcaggctcactcagcagcaaaaggctgagtcagcaagaaagtgaagctggggacagtgggaactcaaagaagatgctaaagagaagaagcaacttgtagtttaagaccagtcggtgggacaagacctgaagccctgggtctgggtgtgaattccaccttccctcctgcagtgctgagaggcagcgaggacggagaggacagcggcatctctaggctcttctgagagggacagagaaagaatagaaatgtgccctaaaagcataaatgagtatcacctgagaaaattaggcattcccgtcttggaaacacgtctctgtgagtttgcatttcatttggcttggagccctggctcgatgcctcatggatctttctccccaaggagggacgtcttgaggggtccgagcctcaggccaaggacccctgatgcagactctggaatccctggcccaaaggcctgtctgggcccatctggggctgaggacacacagatacataatgacacctgcagaaatgtattctctgaggacacttagaatatgaggaagagggtgtggcccaaccctcacttcacctggggaggggcttcttccggacagtagacaccctgcccgtgcagagagatgtcatgggggcacctgctctccctgatagatgctgagagcatccagaaacttccagaccagccctctcaccacacccagaagaggcctttcccatctggagagaagcttccagaccagcccttcacacaccacagccaggaggggcctttcccacctggagagaaacttccagaccagcccctcataccacagccaagaggggcctttctcacctggagagaaatttccagaccatcccctctcaccacagccaggagaggcctttcccaccggaagaagaaacttccagaccagcccctcacaccacagccaagagaagcctttccagcctggagagaaacttccagaccagccctctcactacagccaggagaggcctttcccgcctggaaacttccggacaagcctctcacacaccacagccaggagaggcctttcccacctggacagaaacttccagaccagcccctctcaccacagccaggagaggcctttaccacctggagagaagcttccagaccagcccctcacaccacagccaggagaggcctttcccacctggagagaaacttccagaccagcccctcataccacagccaagaggggcctttctcacctggagagaaacttccagaccagcccctcacaccaccgccaggagaggcctttcccaccgggagagaaacttccagaccagcccctcacaccacagccaggagaggcctttcccaccgggagagaaacttccagaccagccctctcactacagccagaagaggcctttcccaccgggagaggaacttccagaccagcccctcacaccacagccaggagaggcctttcccgcctggagagaagcttcaggccagctcctcacaccacagccaggagagaccttttctgcctggagagaaactttcagaccagccccacacaccacagccaggagaggccgttcctgcctggagagaagcttccagaccagcccttcacaccacagccaggagaggcctttcccacctggagagaaacttccagaccagcccctctcaccacagccaggagaggccgttcccacctggagggaaaattgctcctttgatggaggttagggactgtcaccctcagcactgtgaacataccgggcgagatcattcttcaggggaaggagctgcccagagcatcacaggatgttccagtgtccctggtctctgcccaccagatgccagcactcccaccattcgtggcaaccaaggatgtctccagacactgccccgtgtccatggggttatcacccactgtgctgagtcaaagggtgccttgccctggtctaatccaggacatagccgtggatacgtccaaaaatccccagaacctagtgagccctctggctctgggagcccctatctcaggaattttcagggtcatttgtgacttttcatttcttaaaacctgaaatagactctcttagaaacaagtgactccttcccagtggccaaaacttaatcatcagagcgcttccttcagttcctcacccatcagccagtgggctctccaaagttaaccaacagctccctcttgtggttcactaaaaaacttggttattccatggagttgtgcaaagctatggcttccttggtgcaatattcttaaaacctgctttgcatagaaatcacttttgcccaggctggagtgcagtggcgtgatctcggctcatggcaatctccatctcccgggttcaagcgattttcctgcctcagcctccccagtagctgggactacagacgtgtgccaccacgcctggctaaatcttttttgtattttattttagtagagacggggtttcaccatactggccaggctgctctcgaactcctgacctcatcgtccacctgcctcggcctccccaaagtgctgagattaggcgttagccaccgcgcccggccagaaatcacttttatattgtcacatgggccctctgcacagagtccgatggctcctcccggggaagcctgattttgtgacgtgtgtatagtaaatgcaggccctctggcagcaccataattggtcggttaccctgagcccagagctctgaaagcatctgtggaatgatcacgggacccttctcctctgagaaggctcccggctgcctccccgccaccgagcttgtagcctgaatgcctggctgtcgcatggagcattttgcttctggggtgtcttccttagccaaagggaacgtgtcatttgctcgaccctggcccacccttgccgcccagctgttgtgctgggcacagtctggggcacaggcctccatgatgaagacgcgtgggctgtcggtgctttcatccgtcacaaactggcacctgtacctgccagcaggagcatgatggggacttccatgctggaattgctccctgattaaaatgagatatggctatttggaagacactgcattttagccagtgtacctgggcacagactcggggctgccctgaagctgatgaaggcttgaaggacggaagggctgagccacatgaaggcagcactcagggccaggggagagagaagaggatcagcagtgcagccccaggatgcctcgcaggtaccctgcctccattttggttaccatccccacttattatgggctgtgggctgttatggtgatggatggatgtggatttggaaggggaccatgagagatgatgtattatgatgaactcatgatttaattctttggtgaaaat

SEQ ID NO: 291987 - DNA, 805 bp, Homo sapiens
ggcatgaaggaatccctgtgcaatgggaccccccgatcctattgctcctgcaaattgctgtcttggcatttggggtcagatatctgccctcacggaagctgactgttaaccgcaggcctcagcttcagaccaagaaggaaatgaagccagccaaggggtgtgtctgcctcttcagtgggtgtcccagccagggatttccatgagtccccttgtcctcatatggcctgctgcctgtgcctggccttgtctcggatctgacttgtttccaccccatcccttgtttccccatccagtgcaaagcatctgtgcgacttggtgtctttgacctggtgctacaccttatggaagctggggagagaccaaaaccagatgcagagcctcccagtccgggctggagcctgggaatgcaggaaggtctctggacttctccatctcaattggtcacttaggaagcatacaaagaacaggaccacacaggtacacacatggccacacacacagagctcaccacatgctcgcatacacacacgcgcacacacacacactccaacacacgcacacacatccccatatgcacacatacacacgtgcatgcatgtacacatgcacacatgacacgcatagacatacacacatgtgcgcgtgcacacacacacacacacacacgaagctggcctttctggcaaacatcagctgtctcatggggaaagcagctgccatggggatgggagggcctggctggggaagatgttggccacgggcgggagtctctctcagctgtgagaaagttccctcctctgagttg

SEQ ID NO: 291988 - DNA, 6800 bp, Homo sapiens
ccctccggctcggcgaagcagggaaggggagagaagcaggagtcgggagactgcacaggccagaaagtctgcggagcgggccgcgcccctggcccgcccgggctccaagtcccgcgtcgccgccctggcggggacggtgcagcaggcggcgggatgcggcggggcggcagcctgagcgccccggatggcccgcggcggggcggcctgcaagagcgacgcgcggctgctgctggggcgggacgcgctgcggccggcgcccgccctgctggcccccgccgtgctgctgggcgccgcgctcggcctcggcctcggcctttggcttggctgccgcgcgggccgccagcgcacgcgacaccagaaagacgacactcaaaatctgctcaagaatttggagtctaatgcgcagaccccctcggaaactggctccccatcaaggaggaggaagagagaagtgcagatgtcgaaggacaaggaagctgttgatgaatgtgagccgccttccaacagcaatatcacagcattcgccctgaaggccaaagtcatctaccccatcaatcagaagttccggcctctggccgatggctcctccaacccgtctctgcatgaaaacttaaagcaggctgttttgccacaccagccggtagaggcctctccttccagcagtctggggagcctgagccagggtgagaaggacgactgcagctcctcatccagcgtccactcggccaccagcgatgacaggtttctcagccgcaccttcctccgggtgaacgccttccctgaagtgctggcctgcgagagtgtagacgttgacctgtgtatctacagccttcacttaaaagacctgctgcatttggacacggcactgaggcaggaaaagcatatgatgtttattcagatttttaaaatgtgcctccttgaccttcttcctaaaaagaagtcagatgatgaattataccagaagatcctttcaaaacaagaaaaagatttggaggaactagaaaagggacttcaggtcaaactgtcaaacacagaaatgtcgggggctggtgactctgagtacatcaccctggctgatgtggaaaagaaggagagagaatactctgaacagctaatcgataatatggaagctttctggaaacagatggcaaatatccagcactttcttgtggaccagtttaagtgttccagctccaaagcccgacagctgatgatgactctgacggaaagaatgattgcagccgaagggctattgtgcgattctcaggagctgcaggctctggacgccctggagaggacgatggggcgggcgcacatggcaaaagtgattgagtttctgaagctgcaagtccaggaggagaccaggtgccggctggctgccatctcccacggcctggagctgctggctggtgaggggaagctgtccgggcggcagaaggaggagctgctcacgcagcagcacaaggccttctggcaggaggcagagcgcttcagccgggagtttgtccagcgaggcaaagacctggtcacggcgtctctggctcaccaggtggagggaacggcaaaactcacgctggcccaagaggaggaacagagaagcttcctggctgaggcccagccgactgctgacccggaaaagtttctcgaggcttttcatgaggtcctggagaggcagaggctgatgcagtgtgacctggaggaagaggagaatgtcagagccaccgaggctgtggttgcactctgccaggagctgtacttcagcaccgtggacactttccagaagttcgtggatgccctgttccttcagacgctccctggcatgactggcctccccccggaagagtgtgactacttgaggcaggaagtccaggagaacgctgcctggcagctggggaagtcaaatcgcttccggaggcagcagtggaaactcttccaggagctcctagagcaagaccagcaggtgtggatggaggagtgtgcgctgtccagcgtgctgcagacacacctgcgggaggaccacgagggcaccatccgcggcgtcttgggccgactgggcggcctcactgaagagtccacgcggtgtgtcctgcaggggcatgacctgctgttgcgctcagccctccggaggctggcactccgcggcaacgccctggccaccctgacgcagatgcggctatcggggaagaagcacctcctgcaggagctgcgggaacagcgtgcactggagcaggggtcctcccagtgcctggacgagcatcagtggcagctgctcagggccctggaggcgcgtgtgctggaggaggccagccggctagaggaggaagcacagcagacacggctgcagctccagcagcggctcctggccgaggcccaggaggtggggcagcttctgcagcagcacatggagtgcgccattgggcaggcgctgctggtgcatgcacggaatgcagccaccaagagccgggccaaggacagggatgacttcaagaggacactgatggaggcggcagtggagagcgtctacgtgaccagcgctggtgtcagccgcctggtgcaggcgtattaccagcaaatcggaaggatcatggaggaccacgaggagagaaaactgcagcacctgaagaccctgcagggtgagaggatggaaaattacaaactgcggaaaaagcaagaactcagcaacccttcgtcgggcagcaggacggcaggtggcgctcatgagacctcccaggcggtccaccagaggatgctgtcccagcagaagaggttcctggcccagttcccagtgcaccagcagatgcgtctgcacgcccagcagcagcaggcaggagtcatggaccttctggaagcccagctggagacccagctacaggaagctgaacagaacttcatctccgagctggcagccttggcccgagtgccccttgctgaaagcaaactgttgcctgctaagcgtgggctgctagagaagcccctaaggactaaaaggaagaagcccctgccccaggaaagaggggacctgggggtgcccaacaatgaggaccttgcctccggggaccagacctcaggctcactcagcagcaaaaggctgagtcagcaagaaagtgaagctggggacagtgggaactcaaagaagatgctaaagagaagaagcaacttgtagtttaagaccagtcggtgggacaagacctgaagccctgggtctgggtgtgaattccaccttccctcctgcagtgctgagaggcagcgaggacggagaggacagcggcatctctaggctcttctgagagggacagagaaagaatagaaatgtgccctaaaagcataaatgagtatcacctgagaaaattaggcattcccgtcttggaaacacgtctctgtgagtttgcatttcatttggcttggagccctggctcgatgcctcatggatctttctccccaaggagggacgtcttgaggggtccgagcctcaggccaaggacccctgatgcagactctggaatccctggcccaaaggcctgtctgggcccatctggggctgaggacacacagatacataatgacacctgcagaaatgtattctctgaggacacttagaatatgaggaagagggtgtggcccaaccctcacttcacctggggaggggcttcttccggacagtagacaccctgcccgtgcagagagatgtcatgggggcacctgctctccctgatagatgctgagagcatccagaaacttccagaccagccctctcaccacacccagaagaggcctttcccatctggagagaagcttccagaccagcccttcacacaccacagccaggaggggcctttcccacctggagagaaacttccagaccagcccctcataccacagccaagaggggcctttctcacctggagagaaatttccagaccatcccctctcaccacagccaggagaggcctttcccaccggaagaagaaacttccagaccagcccctcacaccacagccaagagaagcctttccagcctggagagaaacttccagaccagccctctcactacagccaggagaggcctttcccgcctggaaacttccggacaagcctctcacacaccacagccaggagaggcctttcccacctggacagaaacttccagaccagcccctctcaccacagccaggagaggcctttaccacctggagagaagcttccagaccagcccctcacaccacagccaggagaggcctttcccacctggagagaaacttccagaccagcccctcataccacagccaagaggggcctttctcacctggagagaaacttccagaccagcccctcacaccaccgccaggagaggcctttcccaccgggagagaaacttccagaccagcccctcacaccacagccaggagaggcctttcccaccgggagagaaacttccagaccagccctctcactacagccagaagaggcctttcccaccgggagaggaacttccagaccagcccctcacaccacagccaggagaggcctttcccgcctggagagaagcttcaggccagctcctcacaccacagccaggagagaccttttctgcctggagagaaactttcagaccagccccacacaccacagccaggagaggccgttcctgcctggagagaagcttccagaccagcccttcacaccacagccaggagaggcctttcccacctggagagaaacttccagaccagcccctctcaccacagccaggagaggccgttcccacctggagggaaaattgctcctttgatggaggttagggactgtcaccctcagcactgtgaacataccgggcgagatcattcttcaggggaaggagctgcccagagcatcacaggatgttccagtgtccctggtctctgcccaccagatgccagcactcccaccattcgtggcaaccaaggatgtctccagacactgccccgtgtccatggggttatcacccactgtgctgagtcaaagggtgccttgccctggtctaatccaggacatagccgtggatacgtccaaaaatccccagaacctagtgagccctctggctctgggagcccctatctcaggaattttcagggtcatttgtgacttttcatttcttaaaacctgaaatagactctcttagaaacaagtgactccttcccagtggccaaaacttaatcatcagagcgcttccttcagttcctcacccatcagccagtgggctctccaaagttaaccaacagctccctcttgtggttcactaaaaaacttggttattccatggagttgtgcaaagctatggcttccttggtgcaatattcttaaaacctgctttgcatagaaatcacttttgcccaggctggagtgcagtggcgtgatctcggctcatggcaatctccatctcccgggttcaagcgattttcctgcctcagcctccccagtagctgggactacagacgtgtgccaccacgcctggctaaatcttttttgtattttattttagtagagacggggtttcaccatactggccaggctgctctcgaactcctgacctcatcgtccacctgcctcggcctccccaaagtgctgagattaggcgttagccaccgcgcccggccagaaatcacttttatattgtcacatgggccctctgcacagagtccgatggctcctcccggggaagcctgattttgtgacgtgtgtatagtaaatgcaggccctctggcagcaccataattggtcggttaccctgagcccagagctctgaaagcatctgtggaatgatcacgggacccttctcctctgagaaggctcccggctgcctccccgccaccgagcttgtagcctgaatgcctggctgtcgcatggagcattttgcttctggggtgtcttccttagccaaagggaacgtgtcatttgctcgaccctggcccacccttgccgcccagctgttgtgctgggcacagtctggggcacaggcctccatgatgaagacgcgtgggctgtcggtgctttcatccgtcacaaactggcacctgtacctgccagcaggagcatgatggggacttccatgctggaattgctccctgattaaaatgagatatggctatttggaagacactgcattttagccagtgtacctgggcacagactcggggctgccctgaagctgatgaaggcttgaaggacggaagggctgagccacatgaaggcagcactcagggccaggggagagagaagaggatcagcagtgcagccccaggatgcctcgcagacgtgccttctgccatgattgtgaagttctagccacgtggaactatgtaaaattctagcagcaaacccagtgcctggagctcaacaaatatttattaaatgagtaaatcatgaagggtggataatgctgaaaggtgggaaggatagagtccttatcagggaggggaagttgagccggcggaactgaggaaaatcaaaaagagaaagcaaataagctgtaagtctgcctttcttcatggtctacaacacagccttcctgtactcaacttatcaccagatcctcagctaacagaaaaacgtaagtaagttagctcactgcaaccacagcattatcagtactgcacaaagccctcttcggcacacagcacaagcaccatcctataaaatctccagcaagcctttgtttccttgcagtcggctcctttcttgctgacctacccactgtaccctttcatactttttctaatacatctgactttctttaccgaaaaaaaaacacaagggcggccgct

SEQ ID NO: 291989 - DNA, 4944 bp, Homo sapiens
ccctccggctcggcgaagcagggaaggggagagaagcaggagtcgggagactgcacaggccagaaagtctgcggagcgggccgcgcccctggcccgcccgggctccaagtcccgcgtcgccgccctggcggggacggtgcagcaggcggcgggatgcggcggggcggcagcctgagcgccccggatggcccgcggcggggcggcctgcaagagcgacgcgcggctgctgctggggcgggacgcgctgcggccggcgcccgccctgctggcccccgccgtgctgctgggcgccgcgctcggcctcggcctcggcctttggcttggctgccgcgcgggccgccagcgcacgcgacaccagaaagacgacactcaaaatctgctcaagaatttggagtctaatgcgcagaccccctcggaaactggctccccatcaaggaggaggaagagagaagtgcagatgtcgaaggacaaggaagctgttgatgaatgtgagccgccttccaacagcaatatcacagcattcgccctgaaggccaaagtcatctaccccatcaatcagaagttccggcctctggccgatggctcctccaacccgtctctgcatgaaaacttaaagcaggctgttttgccacaccagccggtagaggcctctccttccagcagtctggggagcctgagccagggtgagaaggacgactgcagctcctcatccagcgtccactcggccaccagcgatgacaggtttctcagccgcaccttcctccgggtgaacgccttccctgaagtgctggcctgcgagagtgtagacgttgacctgtgtatctacagccttcacttaaaagacctgctgcatttggacacggcactgaggcaggaaaagcatatgatgtttattcagatttttaaaatgtgcctccttgaccttcttcctaaaaagaagtcagatgatgaattataccagaagatcctttcaaaacaagaaaaagatttggaggaactagaaaagggacttcaggtcaaactgtcaaacacagaaatgtcgggggctggtgactctgagtacatcaccctggctgatgtggaaaagaaggagagagaatactctgaacagctaatcgataatatggaagctttctggaaacagatggcaaatatccagcactttcttgtggaccagtttaagtgttccagctccaaagcccgacagctgatgatgactctgacggaaagaatgattgcagccgaagggctattgtgcgattctcaggagctgcaggctctggacgccctggagaggacgatggggcgggcgcacatggcaaaagtgattgagtttctgaagctgcaagtccaggaggagaccaggtgccggctggctgccatctcccacggcctggagctgctggctggtgaggggaagctgtccgggcggcagaaggaggagctgctcacgcagcagcacaaggccttctggcaggaggcagagcgcttcagccgggagtttgtccagcgaggcaaagacctggtcacggcgtctctggctcaccaggtggagggaacggcaaaactcacgctggcccaagaggaggaacagagaagcttcctggctgaggcccagccgactgctgacccggaaaagtttctcgaggcttttcatgaggtcctggagaggcagaggctgatgcagtgtgacctggaggaagaggagaatgtcagagccaccgaggctgtggttgcactctgccaggagctgtacttcagcaccgtggacactttccagaagttcgtggatgccctgttccttcagacgctccctggcatgactggcctccccccggaagagtgtgactacttgaggcaggaagtccaggagaacgctgcctggcagctggggaagtcaaatcgcttccggaggcagcagtggaaactcttccaggagctcctagagcaagaccagcaggtgtggatggaggagtgtgcgctgtccagcgtgctgcagacacacctgcgggaggaccacgagggcaccatccgcggcgtcttgggccgactgggcggcctcactgaagagtccacgcggtgtgtcctgcaggggcatgacctgctgttgcgctcagccctccggaggctggcactccgcggcaacgccctggccaccctgacgcagatgcggctatcggggaagaagcacctcctgcaggagctgcgggaacagcgtgcactggagcaggggtcctcccagtgcctggacgagcatcagtggcagctgctcagggccctggaggcgcgtgtgctggaggaggccagccggctagaggaggaagcacagcagacacggctgcagctccagcagcggctcctggccgaggcccaggaggtggggcagcttctgcagcagcacatggagtgcgccattgggcaggcgctgctggtgcatgcacggaatgcagccaccaagagccgggccaaggacagggatgacttcaagaggacactgatggaggcggcagtggagagcgtctacgtgaccagcgctggtgtcagccgcctggtgcaggcgtattaccagcaaatcggaaggatcatggaggaccacgaggagagaaaactgcagcacctgaagaccctgcagggtgagaggatggaaaattacaaactgcggaaaaagcaagaactcagcaacccttcgtcgggcagcaggacggcaggtggcgctcatgagacctcccaggcggtccaccagaggatgctgtcccagcagaagaggttcctggcccagttcccagtgcaccagcagatgcgtctgcacgcccagcagcagcaggcaggagtcatggaccttctggaagcccagctggagacccagctacaggaagctgaacagaacttcatctccgagctggcagccttggcccgagtgccccttgctgaaagcaaactgttgcctgctaagcgtgggctgctagagaagcccctaaggactaaaaggaagaagcccctgccccaggaaagaggggacctgggggtgcccaacaatgaggaccttgcctccggggaccagacctcaggctcactcagcagcaaaaggctgagtcagcaagaaagtgaagctggggacagtgggaactcaaagaagatgctaaagagaagaagcaacttgtagtttaagaccagtcggtgggacaagacctgaagccctgggtctgggtgtgaattccaccttccctcctgcagtgctgagaggcagcgaggacggagaggacagcggcatctctaggctcttctgagagggacagagaaagaatagaaatgtgccctaaaagcataaatgagtatcacctgagaaaattaggcattcccgtcttggaaacacgtctctgtgagtttgcatttcatttggcttggagccctggctcgatgcctcatggatctttctccccaaggagggacgtcttgaggggtccgagcctcaggccaaggacccctgatgcagactctggaatccctggcccaaaggcctgtctgggcccatctggggctgaggacacacagatacataatgacacctgcagaaatgtattctctgaggacacttagaatatgaggaagagggtgtggcccaaccctcacttcacctggggaggggcttcttccggacagtagacaccctgcccgtgcagagagatgtcatgggggcacctgctctccctgatagatgctgagagcatccagaaacttccagaccagccctctcaccacacccagaagaggcctttcccatctggagagaagcttccagaccagcccttcacacaccacagccaggaggggcctttcccacctggagagaaacttccagaccagcccctcataccacagccaagaggggcctttctcacctggagagaaatttccagaccatcccctctcaccacagccaggagaggcctttcccaccggaagaagaaacttccagaccagcccctcacaccacagccaagagaagcctttccagcctggagagaaacttccagaccagccctctcactacagccaggagaggcctttcccgcctggaaacttccggacaagcctctcacacaccacagccaggagaggcctttcccacctggacagaaacttccagaccagcccctctcaccacagccaggagaggcctttaccacctggagagaagcttccagaccagcccctcacaccacagccaggagaggcctttcccacctggagagaaacttccagaccagcccctcataccacagccaagaggggcctttctcacctggagagaaacttccagaccagcccctcacaccaccgccaggagaggcctttcccaccgggagagaaacttccagaccagcccctcacaccacagccaggagaggcctttcccaccgggagagaaacttccagaccagccctctcactacagccagaagaggcctttcccaccgggagaggaacttccagaccagcccctcacaccacagccaggagaggcctttcccgcctggagagaagcttcaggccagctcctcacaccacagccaggagagaccttttctgcctggagagaaactttcagaccagccccacacaccacagccaggagaggccgttcctgcctggagagaagcttccagaccagcccttcacaccacagccaggagaggcctttcccacctggagagaaacttccagaccagcccctctcaccacagccaggagaggccgttcccacctggagggaaaattgctcctttgatggaggttagggactgtcaccctcagcactgtgaacataccgggcgagatcattcttcaggggaaggagctgcccagagcatcacaggatgttccagtgtccctggtctctgcccaccagatgccagcactccggtggggtgccgagctcgattg

SEQ ID NO: 291990 - DNA, 4163 bp, Homo sapiens
ccctccggctcggcgaagcagggaaggggagagaagcaggagtcgggagactgcacaggccagaaagtctgcggagcgggccgcgcccctggcccgcccgggctccaagtcccgcgtcgccgccctggcggggacggtgcagcaggcggcgggatgcggcggggcggcagcctgagcgccccggatggcccgcggcggggcggcctgcaagagcgacgcgcggctgctgctggggcgggacgcgctgcggccggcgcccgccctgctggcccccgccgtgctgctgggcgccgcgctcggcctcggcctcggcctttggcttggctgccgcgcgggccgccagcgcacgcgacaccagaaagacgacactcaaaatctgctcaagaatttggagtctaatgcgcagaccccctcggaaactggctccccatcaaggaggaggaagagagaagtgcagatgtcgaaggacaaggaagctgttgatgaatgtgagccgccttccaacagcaatatcacagcattcgccctgaaggccaaagtcatctaccccatcaatcagaagttccggcctctggccgatggctcctccaacccgtctctgcatgaaaacttaaagcaggctgttttgccacaccagccggtagaggcctctccttccagcagtctggggagcctgagccagggtgagaaggacgactgcagctcctcatccagcgtccactcggccaccagcgatgacaggtttctcagccgcaccttcctccgggtgaacgccttccctgaagtgctggcctgcgagagtgtagacgttgacctgtgtatctacagccttcacttaaaagacctgctgcatttggacacggcactgaggcaggaaaagcatatgatgtttattcagatttttaaaatgtgcctccttgaccttcttcctaaaaagaagtcagatgatgaattataccagaagatcctttcaaaacaagaaaaagatttggaggaactagaaaagggacttcaggtcaaactgtcaaacacagaaatgtcgggggctggtgactctgagtacatcaccctggctgatgtggaaaagaaggagagagaatactctgaacagctaatcgataatatggaagctttctggaaacagatggcaaatatccagcactttcttgtggaccagtttaagtgttccagctccaaagcccgacagctgatgatgactctgacggaaagaatgattgcagccgaagggctattgtgcgattctcaggagctgcaggctctggacgccctggagaggacgatggggcgggcgcacatggcaaaagtgattgagtttctgaagctgcaagtccaggaggagaccaggtgccggctggctgccatctcccacggcctggagctgctggctggtgaggggaagctgtccgggcggcagaaggaggagctgctcacgcagcagcacaaggccttctggcaggaggcagagcgcttcagccgggagtttgtccagcgaggcaaagacctggtcacggcgtctctggctcaccaggtggagggaacggcaaaactcacgctggcccaagaggaggaacagagaagcttcctggctgaggcccagccgactgctgacccggaaaagtttctcgaggcttttcatgaggtcctggagaggcagaggctgatgcagtgtgacctggaggaagaggagaatgtcagagccaccgaggctgtggttgcactctgccaggagctgtacttcagcaccgtggacactttccagaagttcgtggatgccctgttccttcagacgctccctggcatgactggcctccccccggaagagtgtgactacttgaggcaggaagtccaggagaacgctgcctggcagctggggaagtcaaatcgcttccggaggcagcagtggaaactcttccaggagctcctagagcaagaccagcaggtgtggatggaggagtgtgcgctgtccagcgtgctgcagacacacctgcgggaggaccacgagggcaccatccgcggcgtcttgggccgactgggcggcctcactgaagagtccacgcggtgtgtcctgcaggggcatgacctgctgttgcgctcagccctccggaggctggcactccgcggcaacgccctggccaccctgacgcagatgcggctatcggggaagaagcacctcctgcaggagctgcgggaacagcgtgcactggagcaggggtcctcccagtgcctggacgagcatcagtggcagctgctcagggccctggaggcgcgtgtgctggaggaggccagccggctagaggaggaagcacagcagacacggctgcagctccagcagcggctcctggccgaggcccaggaggtggggcagcttctgcagcagcacatggagtgcgccattgggcaggcgctgctggtgcatgcacggaatgcagccaccaagagccgggccaaggacagggatgacttcaagaggacactgatggaggcggcagtggagagcgtctacgtgaccagcgctggtgtcagccgcctggtgcaggcgtattaccagcaaatcggaaggatcatggaggaccacgaggagagaaaactgcagcacctgaagaccctgcagggtgagaggatggaaaattacaaactgcggaaaaagcaagaactcagcaacccttcgtcgggcagcaggacggcaggtggcgctcatgagacctcccaggcggtccaccagaggatgctgtcccagcagaagaggttcctggcccagttcccagtgcaccagcagatgcgtctgcacgcccagcagcagcaggcaggagtcatggaccttctggaagcccagctggagacccagctacaggaagctgaacagaacttcatctccgagctggcagccttggcccgagtgccccttgctgaaagcaaactgttgcctgctaagcgtgggctgctagagaagcccctaaggactaaaaggaagaagcccctgccccaggaaagaggggacctgggggtgcccaacaatgaggaccttgcctccggggaccagacctcaggctcactcagcagcaaaaggctgagtcagcaagaaagtgaagctggggacagtgggaactcaaagaagatgctaaagagaagaagcaacttgtagtttaagaccagtcggtgggacaagacctgaagccctgggtctgggtgtgaattccaccttccctcctgcagtgctgagaggcagcgaggacggagaggacagcggcatctctaggctcttctgagagggacagagaaagaatagaaatgtgccctaaaagcataaatgagtatcacctgagaaaattaggcattcccgtcttggaaacacgtctctgtgagtttgcatttcatttggcttggagccctggctcgatgcctcatggatctttctccccaaggagggacgtcttgaggggtccgagcctcaggccaaggacccctgatgcagactctggaatccctggcccaaaggcctgtctgggcccatctggggctgaggacacacagatacataatgacacctgcagaaatgtattctctgaggacacttagaatatgaggaagagggtgtggcccaaccctcacttcacctggggaggggcttcttccggacagtagacaccctgcccgtgcagagagatgtcatgggggcacctgctctccctgatagatgctgagagcatccagaaacttccagaccagccctctcaccacacccagaagaggcctttcccatctggagagaagcttccagaccagcccttcacacaccacagccaggaggggcctttcccacctggagagaaacttccagaccagcccctcataccacagccaagaggggcctttctcacctggagagaaatttccagaccatcccctctcaccacagccaggagaggcctttcccaccggaagaagaaaatgatccggatcattttcttcttccgggatgtctttttttctgacctgtgtttgccctctacttgtgaccactgcacatgtcgacagtaggtagctgaatggtggaagaaaaacaagaaggggtctacataaggggaacatcatttaaagctcataagatccccttgtggccggaagaagaaaatgatccgggg

SEQ ID NO: 291991 - DNA, 7563 bp, Homo sapiens
ccctccggctcggcgaagcagggaaggggagagaagcaggagtcgggagactgcacaggccagaaagtctgcggagcgggccgcgcccctggcccgcccgggctccaagtcccgcgtcgccgccctggcggggacggtgcagcaggcggcgggatgcggcggggcggcagcctgagcgccccggatggcccgcggcggggcggcctgcaagagcgacgcgcggctgctgctggggcgggacgcgctgcggccggcgcccgccctgctggcccccgccgtgctgctgggcgccgcgctcggcctcggcctcggcctttggcttggctgccgcgcgggccgccagcgcacgcgacaccagaaagacgacactcaaaatctgctcaagaatttggagtctaatgcgcagaccccctcggaaactggctccccatcaaggaggaggaagagagaagtgcagatgtcgaaggacaaggaagctgttgatgaatgtgagccgccttccaacagcaatatcacagcattcgccctgaaggccaaagtcatctaccccatcaatcagaagttccggcctctggccgatggctcctccaacccgtctctgcatgaaaacttaaagcaggctgttttgccacaccagccggtagaggcctctccttccagcagtctggggagcctgagccagggtgagaaggacgactgcagctcctcatccagcgtccactcggccaccagcgatgacaggtttctcagccgcaccttcctccgggtgaacgccttccctgaagtgctggcctgcgagagtgtagacgttgacctgtgtatctacagccttcacttaaaagacctgctgcatttggacacggcactgaggcaggaaaagcatatgatgtttattcagatttttaaaatgtgcctccttgaccttcttcctaaaaagaagtcagatgatgaattataccagaagatcctttcaaaacaagaaaaagatttggaggaactagaaaagggacttcaggtcaaactgtcaaacacagaaatgtcgggggctggtgactctgagtacatcaccctggctgatgtggaaaagaaggagagagaatactctgaacagctaatcgataatatggaagctttctggaaacagatggcaaatatccagcactttcttgtggaccagtttaagtgttccagctccaaagcccgacagctgatgatgactctgacggaaagaatgattgcagccgaagggctattgtgcgattctcaggagctgcaggctctggacgccctggagaggacgatggggcgggcgcacatggcaaaagtgattgagtttctgaagctgcaagtccaggaggagaccaggtgccggctggctgccatctcccacggcctggagctgctggctggtgaggggaagctgtccgggcggcagaaggaggagctgctcacgcagcagcacaaggccttctggcaggaggcagagcgcttcagccgggagtttgtccagcgaggcaaagacctggtcacggcgtctctggctcaccaggtggagggaacggcaaaactcacgctggcccaagaggaggaacagagaagcttcctggctgaggcccagccgactgctgacccggaaaagtttctcgaggcttttcatgaggtcctggagaggcagaggctgatgcagtgtgacctggaggaagaggagaatgtcagagccaccgaggctgtggttgcactctgccaggagctgtacttcagcaccgtggacactttccagaagttcgtggatgccctgttccttcagacgctccctggcatgactggcctccccccggaagagtgtgactacttgaggcaggaagtccaggagaacgctgcctggcagctggggaagtcaaatcgcttccggaggcagcagtggaaactcttccaggagctcctagagcaagaccagcaggtgtggatggaggagtgtgcgctgtccagcgtgctgcagacacacctgcgggaggaccacgagggcaccatccgcggcgtcttgggccgactgggcggcctcactgaagagtccacgcggtgtgtcctgcaggggcatgacctgctgttgcgctcagccctccggaggctggcactccgcggcaacgccctggccaccctgacgcagatgcggctatcggggaagaagcacctcctgcaggagctgcgggaacagcgtgcactggagcaggggtcctcccagtgcctggacgagcatcagtggcagctgctcagggccctggaggcgcgtgtgctggaggaggccagccggctagaggaggaagcacagcagacacggctgcagctccagcagcggctcctggccgaggcccaggaggtggggcagcttctgcagcagcacatggagtgcgccattgggcaggcgctgctggtgcatgcacggaatgcagccaccaagagccgggccaaggacagggatgacttcaagaggacactgatggaggcggcagtggagagcgtctacgtgaccagcgctggtgtcagccgcctggtgcaggcgtattaccagcaaatcggaaggatcatggaggaccacgaggagagaaaactgcagcacctgaagaccctgcagggtgagaggatggaaaattacaaactgcggaaaaagcaagaactcagcaacccttcgtcgggcagcaggacggcaggtggcgctcatgagacctcccaggcggtccaccagaggatgctgtcccagcagaagaggttcctggcccagttcccagtgcaccagcagatgcgtctgcacgcccagcagcagcaggcaggagtcatggaccttctggaagcccagctggagacccagctacaggaagctgaacagaacttcatctccgagctggcagccttggcccgagtgccccttgctgaaagcaaactgttgcctgctaagcgtgggctgctagagaagcccctaaggactaaaaggaagaagcccctgccccaggaaagaggggacctgggggtgcccaacaatgaggaccttgcctccggggaccagacctcaggctcactcagcagcaaaaggctgagtcagcaagaaagtgaagctggggacagtgggaactcaaagaagatgctaaagagaagaagcaacttgtagtttaagaccagtcggtgggacaagacctgaagccctgggtctgggtgtgaattccaccttccctcctgcagtgctgagaggcagcgaggacggagaggacagcggcatctctaggctcttctgagagggacagagaaagaatagaaatgtgccctaaaagcataaatgagtatcacctgagaaaattaggcattcccgtcttggaaacacgtctctgtgagtttgcatttcatttggcttggagccctggctcgatgcctcatggatctttctccccaaggagggacgtcttgaggggtccgagcctcaggccaaggacccctgatgcagactctggaatccctggcccaaaggcctgtctgggcccatctggggctgaggacacacagatacataatgacacctgcagaaatgtattctctgaggacacttagaatatgaggaagagggtgtggcccaaccctcacttcacctggggaggggcttcttccggacagtagacaccctgcccgtgcagagagatgtcatgggggcacctgctctccctgatagatgctgagagcatccagaaacttccagaccagccctctcactacagccaggagaggcctttcccgcctggaaacttccggacaagcctctcacacaccacagccaggagaggcctttcccacctggacagaaacttccagaccagcccctctcaccacagccaggagaggcctttaccacctggagagaagcttccagaccagcccctcacaccacagccaggagaggcctttcccacctggagagaaacttccagaccagcccctcataccacagccaagaggggcctttctcacctggagagaaacttccagaccagcccctcacaccaccgccaggagaggcctttcccaccgggagagaaacttccagaccagcccctcacaccacagccaggagaggcctttcccaccgggagagaaacttccagaccagccctctcactacagccagaagaggcctttcccaccgggagaggaacttccagaccagcccctcacaccacagccaggagaggcctttcccgcctggagagaagcttcaggccagctcctcacaccacagccaggagagaccttttctgcctggagagaaactttcagaccagccccacacaccacagccaggagaggccgttcctgcctggagagaagcttccagaccagcccttcacaccacagccaggagaggcctttcccacctggagagaaacttccagaccagcccctctcaccacagccaggagaggccgttcccacctggagggaaaattgctcctttgatggaggttagggactgtcaccctcagcactgtgaacataccgggcgagatcattcttcaggggaaggagctgcccagagcatcacaggatgttccagtgtccctggtctctgcccaccagatgccagcactcccaccattcgtggcaaccaaggatgtctccagacactgccccgtgtccatggggttatcacccactgtgctgagtcaaagggtgccttgccctggtctaatccaggacatagccgtggatacgtccaaaaatccccagaacctagtgagccctctggctctgggagcccctatctcaggaattttcagggtcatttgtgacttttcatttcttaaaacctgaaatagactctcttagaaacaagtgactccttcccagtggccaaaacttaatcatcagagcgcttccttcagttcctcacccatcagccagtgggctctccaaagttaaccaacagctccctcttgtggttcactaaaaaacttggttattccatggagttgtgcaaagctatggcttccttggtgcaatattcttaaaacctgctttgcatagaaatcacttttgcccaggctggagtgcagtggcgtgatctcggctcatggcaatctccatctcccgggttcaagcgattttcctgcctcagcctccccagtagctgggactacagacgtgtgccaccacgcctggctaaatcttttttgtattttattttagtagagacggggtttcaccatactggccaggctgctctcgaactcctgacctcatcgtccacctgcctcggcctccccaaagtgctgagattaggcgttagccaccgcgcccggccagaaatcacttttatattgtcacatgggccctctgcacagagtccgatggctcctcccggggaagcctgattttgtgacgtgtgtatagtaaatgcaggccctctggcagcaccataattggtcggttaccctgagcccagagctctgaaagcatctgtggaatgatcacgggacccttctcctctgagaaggctcccggctgcctccccgccaccgagcttgtagcctgaatgcctggctgtcgcatggagcattttgcttctggggtgtcttccttagccaaagggaacgtgtcatttgctcgaccctggcccacccttgccgcccagctgttgtgctgggcacagtctggggcacaggcctccatgatgaagacgcgtgggctgtcggtgctttcatccgtcacaaactggcacctgtacctgccagcaggagcatgatggggacttccatgctggaattgctccctgattaaaatgagatatggctatttggaagacactgcattttagccagtgtacctgggcacagactcggggctgccctgaagctgatgaaggcttgaaggacggaagggctgagccacatgaaggcagcactcagggccaggggagagagaagaggatcagcagtgcagccccaggatgcctcgcagacgtgccttctgccatgattgtgaagttctagccacgtggaactatgtaaaattctagcagcaaacccagtgcctggagctcaacaaatatttattaaatgagtaaatcatgaagggtggataatgctgaaaggtgggaaggatagagtccttatcagggaggggaagttgagccggcggaactgaggaaaatcaaaaagagaaagcaaataagctgtaagtctgcctttcttcatggtctacaacacagccttcctgtactcaacttatcaccagatcctcagctaacagaaaaacctctcggaagaactggttgttaaagagcacctctgccttcttcctctgttgccatgtgatctctgcacacgctagctctccttcgccttctgccatgctggaagtagcctgaggccctcaccagaagcagacgctggcaccgtgctgcttgtacagcctgcagagccgtgagccaagtaaacctctttaattacccagcctcaggtgctccgggaacgccttccgcggaatgaagcggcccatgcccttgttgacgttgatgtttccgtcttcaaagacgatcttgccctggctgatgaccactagtggggagccgtggcactccataccctcgaagatgttgtactccaccgcctgcaccaacagcctcagcgttacttcccaggatttgctctgccccaaacgagctgttcataacagcgattttgcctaacattatatcataagcgtgttccaatgtttttttttctctctaaaaataccttttattgactgtaatattccactgtatggtccacagtgtatataaccaacaactcaccgttgcgcatgtaggctgccggtggctttctataatcaaatcaatattgttctggggcatcacaaagaggaagggggtcccccggggttatgcaatgtggctgctttgactgtactggacataaaaataagtaaaatgttcttcattttacttaaaatgtgtctttaaataaaatttttttctctaggtttctaaaatcaaattactgggtgaaagaatagagctgttttaaagcacgtgtgccatatggccaaattattttcccaagggttcagatcaattgacacgatatcggcacttaccccctccagcattgggtaatgccatttttttctttctctgctaatttgaaagacaaaataacatttcctttaaaacacacattcggccgggcacggtggctcatgcctgtacccccaactactcgggaggctgaggtatgagaactgcttgaatctgggaggtggaggttgcagtgagccgagatcgtgccactgcactccagcctgggggacagagcgagactctgtctccagaaaaaaacaaaacaaaaaactcaccttctttccattattcttcaagtgaatacttgacagttgtgtgtcaactgtcaccagccaactgctttttattattttaaaagtaggtcacatacatggttgaaaacaatcaactggtaaaaaagatattggatagaaaggtaagtctgtgttctacttgagtctgag

SEQ ID NO: 291992 - DNA, 1915 bp, Homo sapiens
  misc_feature (1885)..(1885): n is a, c, g, or t
  misc_feature (1890)..(1890): n is a, c, g, or t
  misc_feature (1893)..(1893): n is a, c, g, or t
  misc_feature (1907)..(1907): n is a, c, g, or t
  misc_feature (1913)..(1914): n is a, c, g, or t
ttctagaggatcccggtatccccatacagagtgtagacgttgacctgtgtatctacagccttcacttaaaagacctgctgcatttggacacggcactgaggcaggaaaagcatatgatgtttattcagatttttaaaatgtgcctccttgaccttcttcctaaaaagaagtcagatgatgaattataccagaagatcctttcaaaacaagaaaaagatttggaggaactagaaaagggacttcaggtcaaactgtcaaacacagaaatgtcgggggctggtgactctgagtacatcaccctggctgatgtggaaaagaaggagagagaatactctgaacagctaatcgataatatggaagctttctggaaacagatggcaaatatccagcactttcttgtggaccagtttaagtgttccagctccaaagcccgacagctgatgatgactctgacggaaagaatgattgcagccgaagggctattgtgcgattctcaggagctgcaggctctggacgccctggagaggacgatggggcgggcgcacatggcaaaagtgattgagtttctgaagctgcaagtccaggaggagaccaggtgccggctggctgccatctcccacggcctggagctgctggctggtgaggggaagctgtccgggcggcagaaggaggagctgctcacgcagcagcacaaggccttctggcaggaggcagagcgcttcagccgggagtttgtccagcgaggcaaagacctggtcacggcgtctctggctcaccaggtggagggaacggcaaaactcacgctggcccaagaggaggaacagagaagcttcctggctgaggcccagccgactgctgacccggaaaagtttctcgagccctctcaccacagccaggagaggcctttcccaccggaagaagaaacttccagaccagcccctcacaccacagccaagagaagcctttccagcctggagagaaacttccagaccagccctctcactacagccaggagaggcctttcccgcctggaaacttccggacaagcctctcacacaccacagccaggagaggcctttcccacctggacagaaacttccagaccagcccctctcaccacagccaggagaggcctttaccacctggagagaagcttccagaccagcccctcacaccacagccaggagaggcctttcccacctggagagaaacttccagaccagcccctcataccacagccaagaggggcctttctcacctggagagaaacttccagaccagcccctcacaccaccgccaggagaggcctttcccaccgggagagaaacttccagaccagcccctcacaccacagccaggagaggcctttcccaccgggagagaaacttccagaccagccctctcactacagccagaagaggcctttcccaccgggagaggaacttccagaccagcccctcacaccacagccaggagaggcctttcccgcctggagagaagcttcaggccagctcctcacaccacagccaggagagaccttttctgcctggagagaaactttcagaccagccccacacaccacagccaggagaggccgttcctgcctggagagaagcttccagaccagcccttcacaccacagccaggagaggcctttcccacctggagagaaacttccagaccagcccctctcaccacagccaggagaggccgttcccacctggagggaaaattgctcctttgatggaggttagggactgtcaccctcagcactgtgaacataccgggcgagatcattcttcaggggaaggagctgcccagagcatcacaggatgttccagtgtccctggtctctgcccaccagatgccagcactgggtgacagngtganacnccatctcaaaaaanaaaaanng

SEQ ID NO: 291993 - DNA, 4688 bp, Homo sapiens
ggggaggggccattgggggagggaaacggagcagtaacaagtatcccagagggtgctgctgaggcgacgatggccgaggggcccgaggaagcccgaggccaccctcccgggcaggacgatggcggaggggaccacgagcccgtcccttccctgagaggccctcctaccaccgccgtcccatgcccccgcgacgacccccaggccgaaccccaggccccgggccggcccacagccccgggcctcgcggctgccgccgcagccgacaaattggagccgccgcgcgagctcaggaagcgcggggaggcggcctccggctccggtgcagagctgcaggagcaggcgggctgcgaggcgcccgaagccgcggcgccacgagagagaccagctcggctgagcgcccgcgagtactcccggcaagtgcacgagtggctgtggcagtcctactgcggctacctcacctggcacagcggcctggccgccttcccagcctactgcagcccccagccctccccgcaaagcttcccttcgggcggcgctgcagtcccccaggccgcggcgccgccgcccccgcagctgggctattacaaccccttctacttcctgagccccggggccgcggggcctgacccgcggacagctgccggcatcagcacccctgctccagtcgcgggcctgggaccccgggctcctcacgtgcaggcgtcggtccgggccactccagtgacgagggtaggatccgcagccccttcgcgaagcccgagcgagaccgggcgacaggcaggcagagaatatgttattccatccttggcccacagatttatggcagagatggtggatttctttattctcttctttataaaagcaaccattgtcttaagcattatgcacctcagtgggataaaggatatctctaagtttgctatgcattatataatagaagaaatagatgaagacacatcaatggaagacttgcagaaaatgatggttgtggcacttatatacagattattagtttgtttctatgagataatttgcatttggggagcaggtggagctaccccagggaagttcctgctggggcttcgagttgtgacatgtgatacatcagtgcttattgcaccaagtcgggttttagtgattccttcctcaaatgttagcattacaacgtccactatccgagctttgatcaagaatttttcaattgcttcttttttccctgctttcatcacactgctgttttttcagcataatcgaacagcttatgacattgtagcaggaaccattgtggtaaaaagaaatggggtcagatgatgccccccaaaaccctgatttccacacactaagactaaattatgtatcaaggccatcagtatccctgggttacactaattgatgatttagaaattaaagcagtcactccagtgtgatgcaggtgactactctgaaagtattgattatacttgaatgccaaagaacttgtccagaagaaaaacctgttaaattcaagtattaaaatttttagatcaaaaaggcaaatgattttataaacaatggacaatatatactttcttaagatctaaggtactttcttaagatctaagaatttgctgaaagcattttcagctttgaaatctccaaatgaaactttaaaatttattttggtttatcccaaaataatggaaaatgtccagttgtgttttgtaaacacctatgtaactcatcttttagtttacacttcctggggaaattgtctttggtgtttagaggagggaatgagaacacaaattggataatccactgtctcccatcccaggaggtggtgagttggctacaagagaaagggacaagtgaggcaggcctagcagttcccttacctgaagttttcaaatccatactgcagttccctctcgtaatgatgtaactttacaactattcttaatgcttgaacatgtatttaggggcaagtttctcatgatgatgaaaaagtatcaagtcatattgctatgttaattggtttttttttttaaaaggtaagttagtgattactgttaatggtgggggagtaagttttcactgtaaattgaacttataatttatgtgcaagtgttttcagtgccctgaatcaaactataaatgtggggagaaatcacctccatcaaacagttgcatatttactgtaaaagtattcccagtatgtgtgcagcatgaagaaagtattagtgcttctcagtgttctcagtgtaaattctatttatatacagcatattcacatactactttccttatattttatatagttctatgactgttgaaacatcaaggagttaaaaaaatcttaatatttcatgattaactctaagtacattaattaatagcttgcgaaatattagcaattttcccattatggactattctctctaaagcaagagagactagcattcccagacatcattctagggtctttaagctcattttgggtctgctaaagtttggggggaaatgttacgcaaagtgatactgtgtatgttgccattttgctttattcttctgttgaagcaaaattgtggggttttattatgtgtgtgtgcttttcctagatgtcccagttagctgtgctgagatatacctgtactatttatggtttaagttttgattcttaggtattttctccagctctgacattgttttccaaagacacactaaactgcattgcacagttcaaaatttgattacttaagggatcaatctaggtggtgttcttggtcttaaatttaacagcaaacacagcacatatctattatcactatattaattttcaaaggtttttctttgacgtttaaaactgtgacaacagatattcacatttgattatagaaacttaatgtctattaataattttagtacaaaatttcataaaccgtgtttttcaaaataagtttatgtcaaatccagcttcccagaaacactaataattaagtacatcaatgtactaaataaatcattcagttgcacccatggggaagattgtgttactgcccttcacagtgaaaaaaagaaaaatctttcatttttaaaattaggagatgttacgtaacttggcactttagtagtgtatacactagcattagtttatacaccacttttgccgctggggaattcaagttgaaatgtccctcaatcatataggtctggaatacatctttcattcataatttctgctcagataattgaatagtttgccatcgagattattttcatttatactataaaacaaaagcaaactagtccagtttaattttttgtacttagaatattgcacattttctatatatgagttattcagattagtatctatgtaggttcagtcagatccaaccatggattcgaggtattatactgtataaccctacaaaatacatagaagtattatttgccttcataatagaacccaagagtctgtttcaatttatgaattcagtatttgcaccgagattttgattcccaaagtttggaaaaaaatgacaaaacaacgagggaagaaggaaccagaccttagtgccacatatttttctcttggggttgtaaggtagtctcctgctttccagaacactttattatatttcacttatagacctgattttctgtgtcaaagtataattctcatgctgaagctgtagcctaaaaagccaaaagaaagttgtcttcattgtacaaacatattcatcactttaacaataagggaacaaaatttagtattcaagctgagtgagaatactgtttcaatgagcatgtccctaagataaaccagaattggcagttaatttaggcgtctagaaaatctcagttcccaccagtaaaattatcctgagtagctaatgcaccttgagaaaaatctggcatactgaataaataacattaacttgggagccaagagctgggtaagccttacctttagactactctgtgactacagaaataaagccagcacttttggaactaataagccttcacttgtcagtatcataaagagtattgcccaacggaactttgctcccactggtttaatagttacttatttctgcctaagcactcaccttccgattttacccaagtatatatataggatagaaaaaaatgcattatatttgagagctacttcgcccaaattacaaaatgagtgtttttagattcaagtgacagtaaaaggatttgttcccttcagtgacttgagtgttttagttatgcataagtatttctagcaaaggaagggtagaaaggaattgaaaattaatttacactagttgctacttgggaataaagggctttttgaggggggtatggatattaaatgttttcgttatatacttatccctattaaaacaggcagttgtttctttgaatatgcctaaataacagtattcttaaaatctgacagacaagtaacatgtcaattacttgatattccttgtctccagtaccacaggccactcttgacatcccatgtttgcctggataaagttcctcatttcaaacagtatacatacttctttgcagttcattatagtaaggcttaacctgtaaacagtatctgatggcccacctataaataaaattcagcattctatttttaataatttgtatgccaccaatttgtattatttgtctcaataaatacttagtcatcaatg

SEQ ID NO: 291994 - DNA, 541 bp, Homo sapiens
gagctcggtacccgacggcttcaacggaactttgctcccactggtttaatagttacttatttctgcctaagcactcaccttccgattttacccaagtatatatataggatagaaaaaaatgcattatatttgagagctacttcgcccaaattacaaaatgagtgtttttagattcaagtgacagtaaaaggatttgttcccttcagtgacttgagtgttttagttatgcataagtatttctagcaaaggaagggtagaaaggaattgaaaattaatttacactagttgctacttgggaataaagggctttttgaggggggtatggatattaaatgttttcgttatatacttatccctattaaaacaggcagttgtttctttgaatatgcctaaataacagtattcttaaaatctgacagacaagtaacatgtcaattacttgatattccttgtctccagtaccacaggccactcttgacatcccatgtttgcctggataaagttccgttgaagccgtcgggatcctcagagtcaccgcgct

SEQ ID NO: 291995 - DNA, 4634 bp, Homo sapiens
ggggaggggccattgggggagggaaacggagcagtaacaagtatcccagagggtgctgctgaggcgacgatggccgaggggcccgaggaagcccgaggccaccctcccgggcaggacgatggcggaggggaccacgagcccgtcccttccctgagaggccctcctaccaccgccgtcccatgcccccgcgacgacccccaggccgaaccccaggccccgggccggcccacagccccgggcctcgcggctgccgccgcagccgacaaattggagccgccgcgcgagctcaggaagcgcggggaggcggcctccggctccggtgcagagctgcaggagcaggcgggctgcgaggcgcccgaagccgcggcgccacgagagagaccagctcggctgagcgcccgcgagtactcccggcaagtgcacgagtggctgtggcagtcctactgcggctacctcacctggcacagcggcctggccgccttcccagcctactgcagcccccagccctccccgcaaagcttcccttcgggcggcgctgcagtcccccaggccgcggcgccgccgcccccgcagctgggctattacaaccccttctacttcctgagccccggggccgcggggcctgacccgcggacagctgccggcatcagcacccctgctccagtcgcgggcctgggaccccgggctcctcacgtgcaggcgtcggtccgggccactccagtgacgagggtaggatccgcagccccttcgcgaagcccgagcgagaccgggcgacaggcaggcagagaatatgttattccatccttggcccacagatttatggcagagatggtggatttctttattctcttctttataaaagcaaccattgtcttaagcattatgcacctcagtgggataaaggatatctctaagtttgctatgcattatataatagaagaaatagatgaagacacatcaatggaagacttgcagaaaatgatggttgtggcacttatatacagattattagtttgtttctatgagataatttgcatttggggagcaggtggagctaccccagggaagttcctgctggggcttcgagttgtgacatgtgatacatcagtgcttattgcaccaagtcgggttttagtgattccttcctcaaatgttagcattacaacgtccactatccgagctttgatcaagaatttttcaattgcttcttttttccctgctttcatcacactgctgttttttcagcataatcgaacagcttatgacattgtagcaggaaccattgtggtaaaaagaaatggggtcagatgatgccccccaaaaccctgatttccacacactaagactaaattatgtatcaaggccatcagtatccctgggttacactaattgatgatttagaaattaaagcagtcactccagtgtgatgcaggtgactactctgaaagtattgattatacttgaatgccaaagaacttgtccagaagaaaaacctgttaaattcaagtattaaaatttttagatcaaaaaggcaaatgattttataaacaatggacaatatatactttcttaagatctaaggtactttcttaagatctaagaatttgctgaaagcattttcagctttgaaatctccaaatgaaactttaaaatttattttggtttatcccaaaataatggcttcctggggaaattgtctttggtgtttagaggagggaatgagaacacaaattggataatccactgtctcccatcccaggaggtggtgagttggctacaagagaaagggacaagtgaggcaggcctagcagttcccttacctgaagttttcaaatccatactgcagttccctctcgtaatgatgtaactttacaactattcttaatgcttgaacatgtatttaggggcaagtttctcatgatgatgaaaaagtatcaagtcatattgctatgttaattggtttttttttttaaaaggtaagttagtgattactgttaatggtgggggagtaagttttcactgtaaattgaacttataatttatgtgcaagtgttttcagtgccctgaatcaaactataaatgtggggagaaatcacctccatcaaacagttgcatatttactgtaaaagtattcccagtatgtgtgcagcatgaagaaagtattagtgcttctcagtgttctcagtgtaaattctatttatatacagcatattcacatactactttccttatattttatatagttctatgactgttgaaacatcaaggagttaaaaaaatcttaatatttcatgattaactctaagtacattaattaatagcttgcgaaatattagcaattttcccattatggactattctctctaaagcaagagagactagcattcccagacatcattctagggtctttaagctcattttgggtctgctaaagtttggggggaaatgttacgcaaagtgatactgtgtatgttgccattttgctttattcttctgttgaagcaaaattgtggggttttattatgtgtgtgtgcttttcctagatgtcccagttagctgtgctgagatatacctgtactatttatggtttaagttttgattcttaggtattttctccagctctgacattgttttccaaagacacactaaactgcattgcacagttcaaaatttgattacttaagggatcaatctaggtggtgttcttggtcttaaatttaacagcaaacacagcacatatctattatcactatattaattttcaaaggtttttctttgacgtttaaaactgtgacaacagatattcacatttgattatagaaacttaatgtctattaataattttagtacaaaatttcataaaccgtgtttttcaaaataagtttatgtcaaatccagcttcccagaaacactaataattaagtacatcaatgtactaaataaatcattcagttgcacccatggggaagattgtgttactgcccttcacagtgaaaaaaagaaaaatctttcatttttaaaattaggagatgttacgtaacttggcactttagtagtgtatacactagcattagtttatacaccacttttgccgctggggaattcaagttgaaatgtccctcaatcatataggtctggaatacatctttcattcataatttctgctcagataattgaatagtttgccatcgagattattttcatttatactataaaacaaaagcaaactagtccagtttaattttttgtacttagaatattgcacattttctatatatgagttattcagattagtatctatgtaggttcagtcagatccaaccatggattcgaggtattatactgtataaccctacaaaatacatagaagtattatttgccttcataatagaacccaagagtctgtttcaatttatgaattcagtatttgcaccgagattttgattcccaaagtttggaaaaaaatgacaaaacaacgagggaagaaggaaccagaccttagtgccacatatttttctcttggggttgtaaggtagtctcctgctttccagaacactttattatatttcacttatagacctgattttctgtgtcaaagtataattctcatgctgaagctgtagcctaaaaagccaaaagaaagttgtcttcattgtacaaacatattcatcactttaacaataagggaacaaaatttagtattcaagctgagtgagaatactgtttcaatgagcatgtccctaagataaaccagaattggcagttaatttaggcgtctagaaaatctcagttcccaccagtaaaattatcctgagtagctaatgcaccttgagaaaaatctggcatactgaataaataacattaacttgggagccaagagctgggtaagccttacctttagactactctgtgactacagaaataaagccagcacttttggaactaataagccttcacttgtcagtatcataaagagtattgcccaacggaactttgctcccactggtttaatagttacttatttctgcctaagcactcaccttccgattttacccaagtatatatataggatagaaaaaaatgcattatatttgagagctacttcgcccaaattacaaaatgagtgtttttagattcaagtgacagtaaaaggatttgttcccttcagtgacttgagtgttttagttatgcataagtatttctagcaaaggaagggtagaaaggaattgaaaattaatttacactagttgctacttgggaataaagggctttttgaggggggtatggatattaaatgttttcgttatatacttatccctattaaaacaggcagttgtttctttgaatatgcctaaataacagtattcttaaaatctgacagacaagtaacatgtcaattacttgatattccttgtctccagtaccacaggccactcttgacatcccatgtttgcctggataaagttcctcatttcaaacagtatacatacttctttgcagttcattatagtaaggcttaacctgtaaacagtatctgatggcccacctataaataaaattcagcattctatttttaataatttgtatgccaccaatttgtattatttgtctcaataaatacttagtcatcaatg

SEQ ID NO: 291996 - DNA, 4557 bp, Homo sapiens
ggggaggggccattgggggagggaaacggagcagtaacaagtatcccagagggtgctgctgaggcgacgatggccgaggggcccgaggaagcccgaggccaccctcccgggcaggacgatggcggaggggaccacgagcccgtcccttccctgagaggccctcctaccaccgccgtcccatgcccccgcgacgacccccaggccgaaccccaggccccgggccggcccacagccccgggcctcgcggctgccgccgcagccgacaaattggagccgccgcgcgagctcaggaagcgcggggaggcggcctccggctccggtgcagagctgcaggagcaggcgggctgcgaggcgcccgaagccgcggcgccacgagagagaccagctcggctgagcgcccgcgagtactcccggcaagtgcacgagtggctgtggcagtcctactgcggctacctcacctggcacagcggcctggccgccttcccagcctactgcagcccccagccctccccgcaaagcttcccttcgggcggcgctgcagtcccccaggccgcggcgccgccgcccccgcagctgggctattacaaccccttctacttcctgagccccggggccgcggggcctgacccgcggacagctgccggcatcagcacccctgctccagtcgcgggcctgggaccccgggctcctcacgtgcaggcgtcggtccgggccactccagtgacgagggtaggatccgcagccccttcgcgaagcccgagcgagaccgggcgacaggcaggcagagaatatgttattccatccttggcccacagatttatggcagagatggtggatttctttattctcttctttataaaagcaaccattgtcttaagcattatgcacctcagtgggataaaggatatctctaagtttgctatgcattatataatagaagaaatagatgaagacacatcaatggaagacttgcagaaaatgatggttgtggcacttatatacagattattagtttgtttctatgagataatttgcatttggggagcaggtggagctaccccagggaagttcctgctggggcttcgagttgtgacatgtgatacatcagtgcttattgcaccaagtcgggttttagtgattccttcctcaaatgttagcattacaacgtccactatccgagctttgatcaagaatttttcaattgcttcttttttccctgctttcatcacactgctgttttttcagcataatcgaacagcttatgacattgtagcaggaaccattgtggtaaaaagaaatggggtcagatgatgccccccaaaaccctgatttccacacactaagactaaattatgtatcaaggccatcagtatccctgggttacactaattgatgatttagaaattaaagcagtcactccagtgtgatgcaggtgactactctgaaagtattgattatacttgaatgccaaagaacttgtccagaagaaaaacctgttaaattcaagtattaaaatttttagatcaaaaaggcaaatgattttataaacaatggacaatatatactttcttaagatctaaggtactttcttaagatctaagaatttgctgaaagcattttcagctttgaaatctccaaatgaaactttaaaatttattttggtttatcccaaaataatggaaaatgtccagttgtgttttgtaaacacctatgtaactcatcttttagtttacacttcctggggaaattgtctttggtgtttagaggagggaatgagaacacaaattggataatccactgtctcccatcccaggaggtggtgagttggctacaagagaaagggacaagtgaggcaggcctagcagttcccttacctgaagttttcaaatccatactgcagttccctctcgtaatgatgtaactttacaactattcttaatgcttgaacatgtatttaggggcaagtttctcatgatgatgaaaaagtatcaagtcatattgctatgttaattggtttttttttttaaaaggtaagttagtgattactgttaatggtgggggagtaagttttcactgtaaattgaacttataatttatgtgcaagtgttttcagtgccctgaatcaaactataaatgtggggagaaatcacctccatcaaacagttgcatatttactgtaaaagtattcccagtatgtgtgcagcatgaagaaagtattagtgcttctcagtgttctcagtgtaaattctatttatatacagcatattcacatactactttccttatattttatatagttctatgactgttgaaacatcaaggagttaaaaaaatcttaatatttcatgattaactctaagtacattaattaatagcttgcgaaatattagcaattttcccattatggactattctctctaaagcaagagagactagcattcccagacatcattctagggtctttaagctcattttgggtctgctaaagtttggggggaaatgttacgcaaagtgatactgtgtatgttgccattttgctttattcttctgttgaagcaaaattgtggggttttattatgtgtgtgtgcttttcctagatgtcccagttagctgtgctgagatatacctgtactatttatggtttaagttttgattcttaggtattttctccagctctgacattgttttccaaagacacactaaactgcattgcacagttcaaaatttgattacttaagggatcaatctaggtggtgttcttggtcttaaatttaacagcaaacacagcacatatctattatcactatattaattttcaaaggtttttctttgacgtttaaaactgtgacaacagatattcacatttgattatagaaacttaatgtctattaataattttagtacaaaatttcataaaccgtgtttttcaaaataagtttatgtcaaatccagcttcccagaaacactaataattaagtacatcaatgtactaaataaatcattcagttgcacccatggggaagattgtgttactgcccttcacagtgaaaaaaagaaaaatctttcatttttaaaattaggagatgttacgtaacttggcactttagtagtgtatacactagcattagtttatacaccacttttgccgctggggaattcaagttgaaatgtccctcaatcatataggtctggaatacatctttcattcataatttctgctcagataattgaatagtttgccatcgagattattttcatttatactataaaacaaaagcaaactagtccagtttaattttttgtacttagaatattgcacattttctatatatgagttattcagattagtatctatgtaggttcagtcagatccaaccatggattcgaggtattatactgtataaccctacaaaatacatagaagtattatttgccttcataatagaacccaagagtctgtttcaatttatgaattcagtatttgcaccgagattttgattcccaaagtttggaaaaaaatgacaaaacaacgagggaagaaggaaccagaccttagtgccacatatttttctcttggggttgtaaggtagtctcctgctttccagaacactttattatatttcacttatagacctgattttctgtgtcaaagtataattctcatgctgaagctgtagcctaaaaagccaaaagaaagttgtcttcattgtacaaacatattcatcactttaacaataagggaacaaaatttagtattcaagctgagtgagaatactgtttcaatgagcatgtccctaagataaaccagaattggcagttaatttaggcgtctagaaaatctcagttcccaccagtaaaattatcctgagtagctaatgcaccttgagaaaaatctggcatactgaataaataacattaacttgggagccaagagctgggtaagccttacctttagactactctgtgactacagaaataaagccagcacttttggaactaataagccttcacttgtcagtatcataaagagtattgcccaacggaactttgctcccactggtttaatagttacttatttctgcctaagcactcaccttccgattttacccaagtatatatataggatagaaaaaaatgcattatatttgagagctacttcgcccaaattacaaaatgagtgtttttagattcaagtgacagtaaaaggatttgttcccttcagtgacttgagtgttttagttatgcataagtatttctagcaaaggaagggtagaaaggaattgaaaattaatttacactagttgctacttgggaataaagggctttttgaggggggtatggatattaaatgttttcgttatatacttatccctattaaaacaggcagttgtttctttgaatatgcctaaataacagtattcttaaaatctgacagacaagtaacatgtcaattacttgatattccttgtctccagtaccacaggccactcttgacatcccatgtttgcctggataaagttccgttgaagccgtcgggatcctcagagtcaccgcgct

SEQ ID NO: 291997 - DNA, 4760 bp, Homo sapiens
ggggaggggccattgggggagggaaacggagcagtaacaagtatcccagagggtgctgctgaggcgacgatggccgaggggcccgaggaagcccgaggccaccctcccgggcaggacgatggcggaggggaccacgagcccgtcccttccctgagaggccctcctaccaccgccgtcccatgcccccgcgacgacccccaggccgaaccccaggccccgggccggcccacagccccgggcctcgcggctgccgccgcagccgacaaattggagccgccgcgcgagctcaggaagcgcggggaggcggcctccggctccggtgcagagctgcaggagcaggcgggctgcgaggcgcccgaagccgcggcgccacgagagagaccagctcggctgagcgcccgcgagtactcccggcaagtgcacgagtggctgtggcagtcctactgcggctacctcacctggcacagcggcctggccgccttcccagcctactgcagcccccagccctccccgcaaagcttcccttcgggcggcgctgcagtcccccaggccgcggcgccgccgcccccgcagctgggctattacaaccccttctacttcctgagccccggggccgcggggcctgacccgcggacagctgccggcatcagcacccctgctccagtcgcgggcctgggaccccgggctcctcacgtgcaggcgtcggtccgggccactccagtgacgagggtaggatccgcagccccttcgcgaagcccgagcgagaccgggcgacaggcaggcagagaatatgttattccatccttggcccacagatttatggcagagatggtggatttctttattctcttctttataaaagcaaccattgtcttaagcattatgcacctcagtgggataaaggatatctctaagtttgctatgcattatataatagaagaaatagatgaagacacatcaatggaagacttgcagaaaatgatggttgtggcacttatatacagattattagtttgtttctatgagataatttgcatttggggagcaggtggagctaccccagggaagttcctgctggggcttcgagttgtgacatgtgatacatcagtgcttattgcaccaagtcgggttttagtgattccttcctcaaatgttagcattacaacgtccactatccgagctttgatcaagaatttttcaattgcttcttttttccctgctttcatcacactgctgttttttcagcataatcgaacagcttatgacattgtagcaggaaccattgtggtaaaaagaaatggggtcagatgatgccccccaaaaccctgatttccacacactaagactaaattatgtatcaaggccatcagtatccctgggttacactaattgatgatttagaaattaaagcagtcactccagtgtgatgcaggtgactactctgaaagtattgattatacttgaatgccaaagaacttgtccagaagaaaaacctgttaaattcaagtattaaaatttttagatcaaaaaggcaaatgattttataaacaatggacaatatatactttcttaagatctaaggtactttcttaagatctaagaatttgctgaaagcattttcagctttgaaatctccaaatgaaactttaaaatttattttggtttatcccaaaataatggaaaatgtccagttgtgttttgtaaacacctatgtaactcatcttttagtttacacttcctggggaaattgtctttggtgtttagaggagggaatgagaacacaaattggataatccactgtctcccatcccaggaggtggtgagttggctacaagagaaagggacaagtgaggcaggcctagcagttcccttacctgaagttttcaaatccatactgcagttccctctcgtaatgatgtaactttacaactattcttaatgcttgaacatgtatttaggggcaagtttctcatgatgatgaaaaagtatcaagtcatattgctatgttaattggtttttttttttaaaaggtaagttagtgattactgttaatggtgggggagtaagttttcactgtaaattgaacttataatttatgtgcaagtgttttcagtgccctgaatcaaactataaatgtggggagaaatcacctccatcaaacagttgcatatttactgtaaaagtattcccagtatgtgtgcagcatgaagaaagtattagtgcttctcagtgttctcagtgtaaattctatttatatacagcatattcacatactactttccttatattttatatagttctatgactgttgaaacatcaaggagttaaaaaaatcttaatatttcatgattaactctaagtacattaattaatagcttgcgaaatattagcaattttcccattatggactattctctctaaagcaagagagactagcattcccagacatcattctagggtctttaagctcattttgggtctgctaaagtttggggggaaatgttacgcaaagtgatactgtgtatgttgccattttgctttattcttctgttgaagcaaaattgtggggttttattatgtgtgtgtgcttttcctagatgtcccagttagctgtgctgagatatacctgtactatttatggtttaagttttgattcttaggtattttctccagctctgacattgttttccaaagacacactaaactgcattgcacagttcaaaatttgattacttaagggatcaatctaggtggtgttcttggtcttaaatttaacagcaaacacagcacatatctattatcactatattaattttcaaaggtttttctttgacgtttaaaactgtgacaacagatattcacatttgattatagaaacttaatgtctattaataattttagtacaaaatttcataaaccgtgtttttcaaaataagtttatgtcaaatccagcttcccagaaacactaataattaagtacatcaatgtactaaataaatcattcagttgcacccatggggaagattgtgttactgcccttcacagtgaaaaaaagaaaaatctttcatttttaaaattaggagatgttacgtaacttggcactttagtagtgtatacactagcattagtttatacaccacttttgccgctggggaattcaagttgaaatgtccctcaatcatataggtctggaatacatctttcattcataatttctgctcagataattgaatagtttgccatcgagattattttcatttatactataaaacaaaagcaaactagtccagtttaattttttgtacttagaatattgcacattttctatatatgagttattcagattagtatctatgtaggttcagtcagatccaaccatggattcgaggtattatactgtataaccctacaaaatacatagaagtattatttgccttcataatagaacccaagagtctgtttcaatttatgaattcagtatttgcaccgagattttgattcccaaagtttggaaaaaaatgacaaaacaacgagggaagaaggaaccagaccttagtgccacatatttttctcttggggttgtaaggtagtctcctgctttccagaacactttattatatttcacttatagacctgattttctgtgtcaaagtataattctcatgctgaagctgtagcctaaaaagccaaaagaaagttgtcttcattgtacaaacatattcatcactttaacaataagggaacaaaatttagtattcaagctgagtgagaatactgtttcaatgagcatgtccctaagataaaccagaattggcagttaatttaggcgtctagaaaatctcagttcccaccagtaaaattatcctgagtagctaatgcaccttgagaaaaatctggcatactgaataaataacattaacttgggagccaagagctgggtaagccttacctttagactactctgtgactacagaaataaagccagcacttttggaactaataagccttcacttgtcagtatcataaagagtattgcccaacggaactttgctcccactggtttaatagttacttatttctgcctaagcactcaccttccgattttacccaagtatatatataggatagaaaaaaatgcattatatttgagagctacttcgcccaaattacaaaatgagtgtttttagattcaagtgacagtaaaaggatttgttcccttcagtgacttgagtgttttagttatgcataagtatttctagcaaaggaagggtagaaaggaattgaaaattaatttacactagttgctacttgggaataaagggctttttgaggggggtatggatattaaatgttttcgttatatacttatccctattaaaacaggcagttgtttctttgaatatgcctaaataacagtattcttaaaatctgacagacaagtaacatgtcaattacttgatattccttgtctccagtaccacaggccactcttgacatcccatgtttgcctggataaagttcctcatttcaaacagtatacatacttctttgcagttcattatagtaaggcttaacctgtaaacagtatctgatggcccacctataaataaaattcagcattctatttttaataatttgtatgccaccaatttgtattatttgtctcaataaatacttagtcatcaatgaaaaaaaaaaaatataaatctggccgccgattacacttgttaattggccttgcgttacccattttgctcttg

SEQ ID NO: 291998 - DNA, 1701 bp, Homo sapiens
ccacggagccttatgcattgtcttcccatggggaagattgtgttactgcccttcacagtgaaaaaaagaaaaatctttcatttttaaaattaggagatgttacgtaacttggcactttagtagtgtatacactagcattagtttatacaccacttttgccgctggggaattcaagttgaaatgtccctcaatcatataggtctggaatacatctttcattcataatttctgctcagataattgaatagtttgccatcgagattattttcatttatactataaaacaaaagcaaactagtccagtttaattttttgtacttagaatattgcacattttctatatatgagttattcagattagtatctatgtaggttcagtcagatccaaccatggattcgaggtattatactgtataaccctacaaaatacatagaagtattatttgccttcataatagaacccaagagtctgtttcaatttatgaattcagtatttgcaccgagattttgattcccaaagtttggaaaaaaatgacaaaacaacgagggaagaaggaaccagaccttagtgccacatatttttctcttggggttgtaaggtagtctcctgctttccagaacactttattatatttcacttatagacctgattttctgtgtcaaagtataattctcatgctgaagctgtagcctaaaaagccaaaagaaagttgtcttcattgtacaaacatattcatcactttaacaataagggaacaaaatttagtattcaagctgagtgagaatactgtttcaatgagcatgtccctaagataaaccagaattggcagttaatttaggcgtctagaaaatctcagttcccaccagtaaaattatcctgagtagctaatgcaccttgagaaaaatctggcatactgaataaataacattaacttgggagccaagagctgggtaagccttacctttagactactctgtgactacagaaataaagccagcacttttggaactaataagccttcacttgtcagtatcataaagagtattgcccaacggaactttgctcccactggtttaatagttacttatttctgcctaagcactcaccttccgattttacccaagtatatatataggatagaaaaaaatgcattatatttgagagctacttcgcccaaattacaaaatgagtgtttttagattcaagtgacagtaaaaggatttgttcccttcagtgacttgagtgttttagttatgcataagtatttctagcaaaggaagggtagaaaggaattgaaaattaatttacactagttgctacttgggaataaagggctttttgaggggggtatggatattaaatgttttcgttatatacttatccctattaaaacaggcagttgtttctttgaatatgcctaaataacagtattcttaaaatctgacagacaagtaacatgtcaattacttgatattccttgtctccagtaccacaggccactcttgacatcccatgtttgcctggataaagttcctcatttcaaacagtatacatacttctttgcagttcattatagtaaggcttaacctgtaaacagtatctgatggcccacctataaataaaattcagcattctatttttaataatttgtatgccaccaatttgtattatttgtctcaataaatacttagtcatcaatg

SEQ ID NO: 291999 - DNA, 4639 bp, Homo sapiens
ggggaggggccattgggggagggaaacggagcagtaacaagtatcccagagggtgctgctgaggcgacgatggccgaggggcccgaggaagcccgaggccaccctcccgggcaggacgatggcggaggggaccacgagcccgtcccttccctgagaggccctcctaccaccgccgtcccatgcccccgcgacgacccccaggccgaaccccaggccccgggccggcccacagccccgggcctcgcggctgccgccgcagccgacaaattggagccgccgcgcgagctcaggaagcgcggggaggcggcctccggctccggtgcagagctgcaggagcaggcgggctgcgaggcgcccgaagccgcggcgccacgagagagaccagctcggctgagcgcccgcgagtactcccggcaagtgcacgagtggctgtggcagtcctactgcggctacctcacctggcacagcggcctggccgccttcccagcctactgcagcccccagccctccccgcaaagcttcccttcgggcggcgctgcagtcccccaggccgcggcgccgccgcccccgcagctgggctattacaaccccttctacttcctgagccccggggccgcggggcctgacccgcggacagctgccggcatcagcacccctgctccagtcgcgggcctgggaccccgggctcctcacgtgcaggcgtcggtccgggccactccagtgacgagggtaggatccgcagccccttcgcgaagcccgagcgagaccgggcgacaggcaggcagagaatatgttattccatccttggcccacagatttatggcagagatggtggatttctttattctcttctttataaaagcaaccattgtcttaagcattatgcacctcagtgggataaaggatatctctaagtttgctatgcattatataatagaagaaatagatgaagacacatcaatggaagacttgcagaaaatgatggttgtggcacttatatacagattattagtttgtttctatgagataatttgcatttggggagcaggtggagctaccccagggaagttcctgctggggcttcgagttgtgacatgtgatacatcagtgcttattgcaccaagtcgggttttagtgattccttcctcaaatgttagcattacaacgtccactatccgagctttgatcaagaatttttcaattgcttcttttttccctgctttcatcacactgctgttttttcagcataatcgaacagcttatgacattgtagcaggaaccattgtggtaaaaagaaatggggtcagatgatgccccccaaaaccctgatttccacacactaagactaaattatgtatcaaggccatcagtatccctgggttacactaattgatgatttagaaattaaagcagtcactccagtgtgatgcaggtgactactctgaaagtattgattatacttgaatgccaaagaacttgtccagaagaaaaacctgttaaattcaagtattaaaatttttagatcaaaaaggcaaatgattttataaacaatggacaatatatactttcttaagatctaaggtactttcttaagatctaagaatttgctgaaagcattttcagctttgaaatctccaaatgaaactttaaaatttattttggtttatcccaaaataatggaaaatgtccagttgtgttttgtaaacacctatgtaactcatcttttagtttacacttcctggggaaattgtctttggtgtttagaggagggaatgagaacacaaattggataatccactgtctcccatcccaggaggtggtgagttggctacaagagaaagggacaagtgaggcaggcctagcagttcccttacctgaagttttcaaatccatactgcagttccctctcgtaatgatgtaactttacaactattcttaatgcttgaacatgtatttaggggcaagtttctcatgatgatgaaaaagtatcaagtcatattgctatgttaattggtttttttttttaaaaggtaagttagtgattactgttaatggtgggggagtaagttttcactgtaaattgaacttataatttatgtgcaagtgttttcagtgccctgaatcaaactataaatgtggggagaaatcacctccatcaaacagttgcatatttactgtaaaagtattcccagtatgtgtgcagcatgaagaaagtattagtgcttctcagtgttctcagtgtaaattctatttatatacagcatattcacatactactttccttatattttatatagttctatgactgttgaaacatcaaggagttaaaaaaatcttaatatttcatgattaactctaagtacattaattaatagcttgcgaaatattagcaattttcccattatggactattctctctaaagcaagagagactagcattcccagacatcattctagggtctttaagctcattttgggtctgctaaagtttggggggaaatgttacgcaaagtgatactgtgtatgttgccattttgctttattcttctgttgaagcaaaattgtggggttttattatgtgtgtgtgcttttcctagatgtcccagttagctgtgctgagatatacctgtactatttatggtttaagttttgattcttaggtattttctccagctctgacattgttttccaaagacacactaaactgcattgcacagttcaaaatttgattacttaagggatcaatctaggtggtgttcttggtcttaaatttaacagcaaacacagcacatatctattatcactatattaattttcaaaggtttttctttgacgtttaaaactgtgacaacagatattcacatttgattatagaaacttaatgtctattaataattttagtacaaaatttcataaaccgtgtttttcaaaataagtttatgtcaaatccagcttcccagaaacactaataattaagtacatcaatgtactaaataaatcattcagttgcacccatggggaagattgtgttactgcccttcacagtgaaaaaaagaaaaatctttcatttttaaaattaggagatgttacgtaacttggcactttagtagtgtatacactagcattagtttatacaccacttttgccgctggggaattcaagttgaaatgtccctcaatcatataggtctggaatacatctttcattcataatttctgctcagataattgaatagtttgccatcgagattattttcatttatactataaaacaaaagcaaactagtccagtttaattttttgtacttagaatattgcacattttctatatatgagttattcagattagtatctatgtaggttcagtcagatccaaccatggattcgaggtattatactgtataaccctacaaaatacatagaagtattatttgccttcataatagaacccaagagtctgtttcaatttatgaattcagtatttgcaccgagattttgattcccaaagtttggaaaaaaatgacaaaacaacgagggaagaaggaaccagaccttagtgccacatatttttctcttggggttgtaaggtagtctcctgctttccagaacactttattatatttcacttatagacctgattttctgtgtcaaagtataattctcatgctgaagctgtagcctaaaaagccaaaagaaagttgtcttcattgtacaaacatattcatcactttaacaataagggaacaaaatttagtattcaagctgagtgagaatactgtttcaatgagcatgtccctaagataaaccagaattggcagttaatttaggcgtctagaaaatctcagttcccaccagtaaaattatcctgagtagctaatgcaccttgagaaaaatctggcatactgaataaataacattaacttgggagccaagagctgggtaagccttacctttagactactctgtgactacagaaataaagccagcacttttggaactaataagccttcacttgtcagtatcataaagagtattgcccaacggaactttgctcccactggtttaatagttacttatttctgcctaagcactcaccttccgattttacccaagtatatatataggatagaaaaaaatgcattatatttgagagctacttcgcccaaattacaaaatgagtgtttttagattcaagtgacagtaaaaggatttgttcccttcagtgacttgagtgttttagttatgcataagtatttctagcaaaggaagggtagaaaggaattgaaaattaatttacactagttgctacttgggaataaagggctttttgaggggggtatggatattaaatgttttcgttatatacttatccctataaatctgacagacaagtaacatgtcaattacttgatattccttgtctccagtaccacaggccactcttgacatcccatgtttgcctggataaagttcctcatttcaaacagtatacatacttctttgcagttcattatagtaaggcttaacctgtaaacagtatctgatggcccacctataaataaaattcagcattctatttttaataatttgtatgccaccaatttgtattatttgtctcaataaatacttagtcatcaatg

SEQ ID NO: 292000 - DNA, 4304 bp, Homo sapiens
ggggaggggccattgggggagggaaacggagcagtaacaagtatcccagagggtgctgctgaggcgacgatggccgaggggcccgaggaagcccgaggccaccctcccgggcaggacgatggcggaggggaccacgagcccgtcccttccctgagaggccctcctaccaccgccgtcccatgcccccgcgacgacccccaggccgaaccccaggccccgggccggcccacagccccgggcctcgcggctgccgccgcagccgacaaattggagccgccgcgcgagctcaggaagcgcggggaggcggcctccggctccggtgcagagctgcaggagcaggcgggctgcgaggcgcccgaagccgcggcgccacgagagagaccagctcggctgagcgcccgcgagtactcccggcaagtgcacgagtggctgtggcagtcctactgcggctacctcacctggcacagcggcctggccgccttcccagcctactgcagcccccagccctccccgcaaagcttcccttcgggcggcgctgcagtcccccaggccgcggcgccgccgcccccgcagctgggctattacaaccccttctacttcctgagccccggggccgcggggcctgacccgcggacagctgccggcatcagcacccctgctccagtcgcgggcctgggaccccgggctcctcacgtgcaggcgtcggtccgggccactccagtgacgagggtaggatccgcagccccttcgcgaagcccgagcgagaccgggcgacaggcaggcagagaatatgttattccatccttggcccacagatttatggcagagatggtggatttctttattctcttctttataaaagcaaccattgtcttaagcattatgcacctcagtgggataaaggatatctctaagtttgctatgcattatataatagaagaaatagatgaagacacatcaatggaagacttgcagaaaatgatggttgtggcacttatatacagattattagtttgtttctatgagataatttgcatttggggagcaggtggagctaccccagggaagttcctgctggggcttcgagttgtgacatgtgatacatcagtgcttattgcaccaagtcgggttttagtgattccttcctcaaatgttagcattacaacgtccactatccgagctttgatcaagaatttttcaattgcttcttttttccctgctttcatcacactgctgttttttcagcataatcgaacagcttatgacattgtagcaggaaccattgtggtaaaaagaaatggggtcagatgatgccccccaaaaccctgatttccacacactaagactaaattatgtatcaaggccatcagtatccctgggttacactaattgatgatttagaaattaaagcagtcactccagtgtgatgcaggtgactactctgaaagtattgattatacttgaatgccaaagaacttgtccagaagaaaaacctgttaaattcaagtattaaaatttttagatcaaaaaggcaaatgattttataaacaatggacaatatatactttcttaagatctaaggtactttcttaagatctaagaatttgctgaaagcattttcagctttgaaatctccaaatgaaactttaaaatttattttggtttatcccaaaataatggaaaatgtccagttgtgttttgtaaacacctatgtaactcatcttttagtttacacttcctggggaaattgtctttggtgtttagaggagggaatgagaacacaaattggataatccactgtctcccatcccaggaggtggtgagttggctacaagagaaagggacaagtgaggcaggcctagcagttcccttacctgaagttttcaaatccatactgcagttccctctcgtaatgatgtaactttacaactattcttaatgcttgaacatgtatttaggggcaagtttctcatgatgatgaaaaagtatcaagtcatattgctatgttaattggtttttttttttaaaaggtaagttagtgattactgttaatggtgggggagtaagttttcactgtaaattgaacttataatttatgtgcaagtgttttcagtgccctgaatcaaactataaatgtggggagaaatcacctccatcaaacagttgcatatttactgtaaaagtattcccagtatgtgtgcagcatgaagaaagtattagtgcttctcagtgttctcagtgtaaattctatttatatacagcatattcacatactactttccttatattttatatagttctatgactgttgaaacatcaaggagttaaaaaaatcttaatatttcatgattaactctaagtacattaattaatagcttgcgaaatattagcaattttcccattatggactattctctctaaagcaagagagactagcattcccagacatcattctagggtctttaagctcattttgggtctgctaaagtttggggggaaatgttacgcaaagtgatactgtgtatgttgccattttgctttattcttctgttgaagcaaaattgtggggttttattatgtgtgtgtgcttttcctagatgtcccagttagctgtgctgagatatacctgtactatttatggtttaagttttgattcttaggtattttctccagctctgacattgttttccaaagacacactaaactgcattgcacagttcaaaatttgattacttaagggatcaatctaggtggtgttcttggtcttaaatttaacagcaaacacagcacatatctattatcactatattaattttcaaaggtttttctttgacgtttaaaactgtgacaacagatattcacatttgattatagaaacttaatgtctattaataattttagtacaaaatttcataaaccgtgtttttcaaaataagtttatgtcaaatccagcttcccagaaacactaataattaagtacatcaatgtactaaataaatcattcagttgcacccatggggaagattgtgttactgcccttcacagtgaaaaaaagaaaaatctttcatttttaaaattaggagatgttacgtaacttggcactttagtagtgtatacactagcattagtttatacaccacttttgccgctggggaattcaagttgaaatgtccctcaatcatataggtctggaatacatctttcattcataatttctgctcagataattgaatagtttgccatcgagattattttcatttatactataaaacaaaagcaaactagtccagtttaattttttgtacttagaatattgcacattttctatatatgagttattcagattagtatctatgtaggttcagtcagatccaaccatggattcgaggtattatactgtataaccctacaaaatacatagaagtattatttgccttcataatagaacccaagagtctgtttcaatttatgaattcagtatttgcaccgagattttgattcccaaagtttggaaaaaaatgacaaaacaacgagggaagaaggaaccagaccttagtgccacatatttttctcttggggttgtaaggtagtctcctgctttccagaacactttattatatttcacttatagacctgattttctgtgtcaaagtataattctcatgctgaagctgtagcctaaaaagccaaaagaaagttgtcttcattgtacaaacatattcatcactttaacaataagggaacaaaatttagtattcaagctgagtgagaatactgtttcaatgagcatgtccctaagataaaccagaattggcagttaatttaggcgtctagaaaatctcagttcccaccagtaaaattatcctgagtagctaatgcaccttgagaaaaatctggcatactgaataaataacattaacttgggagccaagagctgggtaagccttacctttagactactctgtgactacagaaataaagccagcacttttggaactaataagccttcacttgtcagtatcataaagagtattgcccaacggaactttgctcccactggtttaatagttacttatttctgcctaagcactcaccttccgattttacccaagtatatatataggatagaaaaaaatgcattatatttgagagctacttcgcccaaattacaaaatgagtgtttttagattcaagtgacagtggattggtcccctcccggactgagtgtttacgtacgctaagataacaacaaagaaggtaaacgcactgaaataattcacaactcaatggacgggtaacagggc

SEQ ID NO: 292001 - DNA, 1589 bp, Homo sapiens
ggggaggggccattgggggagggaaacggagcagtaacaagtatcccagagggtgctgctgaggcgacgatggccgaggggcccgaggaagcccgaggccaccctcccgggcaggacgatggcggaggggaccacgagcccgtcccttccctgagaggccctcctaccaccgccgtcccatgcccccgcgacgacccccaggccgaaccccaggccccgggccggcccacagccccgggcctcgcggctgccgccgcagccgacaaattggagccgccgcgcgagctcaggaagcgcggggaggcggcctccggctccggtgcagagctgcaggagcaggcgggctgcgaggcgcccgaagccgcggcgccacgagagagaccagctcggctgagcgcccgcgagtactcccggcaagtgcacgagtggctgtggcagtcctactgcggctacctcacctggcacagcggcctggccgccttcccagcctactgcagcccccagccctccccgcaaagcttcccttcgggcggcgctgcagtcccccaggccgcggcgccgccgcccccgcagctgggctattacaaccccttctacttcctgagccccggggccgcggggcctgacccgcggacagctgccggcatcagcacccctgctccagtcgcgggcctgggaccccgggctcctcacgtgcaggcgtcggtccgggccactccagtgacgagggtaggatccgcagccccttcgcgaagcccgagcgagaccgggcgacaggcaggcagagaatatgttattccatccttggcccacagatttatggcagagatggtggatttctttattctcttctttataaaagcaaccattgtcttaagcattatgcacctcagtgggataaaggatatctctaagtttgctatgcattatataatagaagaaatagatgaagacacatcaatggaagacttgcagaaaatgatggttgtggcacttatatacagattattagtttgtttctatgagataatttgcatttggggagcaggtggagctaccccagggaagttcctgctggggcttcgagttgtgacatgtgatacatcagtgcttattgcaccaagtcgggttttagtgattccttcctcaaatgttagcattacaacgtccactatccgagctttgatcaagaatttttcaattgcttcttttttccctgctttcatcacactgctgttttttcagcataatcgaacagcttatgacattgtagcaggaaccattgtggtaaaaagaaatggggtcagatgatgccccccaaaaccctgatttccacacactaagactaaattatgtatcaaggccatcagtatccctgggttacactaattgatgatttagaaattaaagcagtcactccagtgtgatgcaggtgactactctgaaagtattgattatacttgaatgccaaagaacttgtccagaagaaaaacctgttaaattcaagtattaaaatttttagatcaaaaaaaataggagaaggggaacagaaaaaaaaacgggggggggcccgtaccaaattgcctaag

SEQ ID NO: 292002 - DNA, 585 bp, Homo sapiens
aaggttaagtgtatctggtgtatgtttccatagtatcctaggttccccatcacagcactcatcccactttattattgctatttatttattgttctgttttctttgctaggttagaccctccacgaaagcagggaccgtgtaaattcattcacccttatttcccccgtgctagtacagtgtctgctcatgataatgctgcttatttgttgaataaactaatgaatgctttatgatactagatggttgggaatctaaagattagtttagaatttcaattaaaatgtatgacttgcactaatgaaaaaaaagtcagtgctactgttctggtaactaattatttataaccccaaactattattttgtgtagggatatctctaagtttgctatgcattatataatagaagaaatagatgaagacacatcaatggaagacttgcagaaaatgatggttgtggcacttatatacagattattagtttgtttctatgaggtaagctactgacttcagcaagaattaatatttaacaatctaattttatgtttttacatttatttttttgagacagagtctcgctctgtcaccc

SEQ ID NO: 292003 - DNA, 4634 bp, Homo sapiens
ggggaggggccattgggggagggaaacggagcagtaacaagtatcccagagggtgctgctgaggcgacgatggccgaggggcccgaggaagcccgaggccaccctcccgggcaggacgatggcggaggggaccacgagcccgtcccttccctgagaggccctcctaccaccgccgtcccatgcccccgcgacgacccccaggccgaaccccaggccccgggccggcccacagccccgggcctcgcggctgccgccgcagccgacaaattggagccgccgcgcgagctcaggaagcgcggggaggcggcctccggctccggtgcagagctgcaggagcaggcgggctgcgaggcgcccgaagccgcggcgccacgagagagaccagctcggctgagcgcccgcgagtactcccggcaagtgcacgagtggctgtggcagtcctactgcggctacctcacctggcacagcggcctggccgccttcccagcctactgcagcccccagccctccccgcaaagcttcccttcgggcggcgctgcagtcccccaggccgcggcgccgccgcccccgcagctgggctattacaaccccttctacttcctgagccccggggccgcggggcctgacccgcggacagctgccggcatcagcacccctgctccagtcgcgggcctgggaccccgggctcctcacgtgcaggcgtcggtccgggccactccagtgacgagggtaggatccgcagccccttcgcgaagcccgagcgagaccgggcgacaggcaggcagagaatatgttattccatccttggcccacagatttatggcagagatggtggatttctttattctcttctttataaaagcaaccattgtcttaagcattatgcacctcagtgggataaaggatatctctaagtttgctatgcattatataatagaagaaatagatgaagacacatcaatggaagacttgcagaaaatgatggttgtggcacttatatacagattattagtttgtttctatgagataatttgcatttggggagcaggtggagctaccccagggaagttcctgctggggcttcgagttgtgacatgtgatacatcagtgcttattgcaccaagtcgggttttagtgattccttcctcaaatgttagcattacaacgtccactatccgagctttgatcaagaatttttcaattgcttcttttttccctgctttcatcacactgctgttttttcagcataatcgaacagcttatgacattgtagcaggaaccattgtggtaaaaagaaatggggtcagatgatgccccccaaaaccctgatttccacacactaagactaaattatgtatcaaggccatcagtatccctgggttacactaattgatgatttagaaattaaagcagtcactccagtgtgatgcaggtgactactctgaaagtattgattatacttgaatgccaaagaacttgtccagaagaaaaacctgttaaattcaagtattaaaatttttagatcaaaaaggcaaatgattttataaacaatggacaatatatactttcttaagatctaaggtactttcttaagatctaagaatttgctgaaagcattttcagctttgaaatctccaaatgaaactttaaaatttattttggtttatcccaaaataatggaaaatgtccagttgtgttttgtaaacacctatgtaactcatcttttagtttacacttcctggggaaattgtctttggtgtttagaggagggaatgagaacacaaattggataatccactgtctcccatcccaggaggtggtgagttggctacaagagaaagggacaagtgaggcaggcctagcagttcccttacctgaagttttcaaatccatactgcagttccctctcgtaatgatgtaactttacaactattcttaatgcttgaacatgtatttaggggcaagtttctcatgatgatgaaaaagtatcaagtcatattgctatgttaattggtttttttttttaaaaggtaagttagtgattactgttaatggtgggggagtaagttttcactgtaaattgaacttataatttatgtgcaagtgttttcagtgccctgaatcaaactataaatgtggggagaaatcacctccatcaaacagttgcatatttactgtaaaagtattcccagtatgtgtgcagcatgaagaaagtattagtgcttctcagtgttctcagtgtaaattctatttatatacagcatattcacatactactttccttatattttatatagttctatgactgttgaaacatcaaggagttaaaaaaatcttaatatttcatgattaactctaagtacattaattaatagcttgcgaaatattagcaattttcccattatggactattctctctaaagcaagagagactagcattcccagacatcattctagggtctttaagctcattttgggtctgctaaagtttggggggaaatgttacgcaaagtgatactgtgtatgttgccattttgctttattcttctgttgaagcaaaattgtggggttttattatgtgtgtgtgcttttcctagatgtcccagttagctgtgctgagatatacctgtactatttatggtttaagttttgattcttaggtattttctccagctctgacattgttttccaaagacacactaaactgcattgcacagttcaaagcaaacacagcacatatctattatcactatattaattttcaaaggtttttctttgacgtttaaaactgtgacaacagatattcacatttgattatagaaacttaatgtctattaataattttagtacaaaatttcataaaccgtgtttttcaaaataagtttatgtcaaatccagcttcccagaaacactaataattaagtacatcaatgtactaaataaatcattcagttgcacccatggggaagattgtgttactgcccttcacagtgaaaaaaagaaaaatctttcatttttaaaattaggagatgttacgtaacttggcactttagtagtgtatacactagcattagtttatacaccacttttgccgctggggaattcaagttgaaatgtccctcaatcatataggtctggaatacatctttcattcataatttctgctcagataattgaatagtttgccatcgagattattttcatttatactataaaacaaaagcaaactagtccagtttaattttttgtacttagaatattgcacattttctatatatgagttattcagattagtatctatgtaggttcagtcagatccaaccatggattcgaggtattatactgtataaccctacaaaatacatagaagtattatttgccttcataatagaacccaagagtctgtttcaatttatgaattcagtatttgcaccgagattttgattcccaaagtttggaaaaaaatgacaaaacaacgagggaagaaggaaccagaccttagtgccacatatttttctcttggggttgtaaggtagtctcctgctttccagaacactttattatatttcacttatagacctgattttctgtgtcaaagtataattctcatgctgaagctgtagcctaaaaagccaaaagaaagttgtcttcattgtacaaacatattcatcactttaacaataagggaacaaaatttagtattcaagctgagtgagaatactgtttcaatgagcatgtccctaagataaaccagaattggcagttaatttaggcgtctagaaaatctcagttcccaccagtaaaattatcctgagtagctaatgcaccttgagaaaaatctggcatactgaataaataacattaacttgggagccaagagctgggtaagccttacctttagactactctgtgactacagaaataaagccagcacttttggaactaataagccttcacttgtcagtatcataaagagtattgcccaacggaactttgctcccactggtttaatagttacttatttctgcctaagcactcaccttccgattttacccaagtatatatataggatagaaaaaaatgcattatatttgagagctacttcgcccaaattacaaaatgagtgtttttagattcaagtgacagtaaaaggatttgttcccttcagtgacttgagtgttttagttatgcataagtatttctagcaaaggaagggtagaaaggaattgaaaattaatttacactagttgctacttgggaataaagggctttttgaggggggtatggatattaaatgttttcgttatatacttatccctattaaaacaggcagttgtttctttgaatatgcctaaataacagtattcttaaaatctgacagacaagtaacatgtcaattacttgatattccttgtctccagtaccacaggccactcttgacatcccatgtttgcctggataaagttcctcatttcaaacagtatacatacttctttgcagttcattatagtaaggcttaacctgtaaacagtatctgatggcccacctataaataaaattcagcattctatttttaataatttgtatgccaccaatttgtattatttgtctcaataaatacttagtcatcaatg

SEQ ID NO: 292004 - DNA, 4637 bp, Homo sapiens
ggggaggggccattgggggagggaaacggagcagtaacaagtatcccagagggtgctgctgaggcgacgatggccgaggggcccgaggaagcccgaggccaccctcccgggcaggacgatggcggaggggaccacgagcccgtcccttccctgagaggccctcctaccaccgccgtcccatgcccccgcgacgacccccaggccgaaccccaggccccgggccggcccacagccccgggcctcgcggctgccgccgcagccgacaaattggagccgccgcgcgagctcaggaagcgcggggaggcggcctccggctccggtgcagagctgcaggagcaggcgggctgcgaggcgcccgaagccgcggcgccacgagagagaccagctcggctgagcgcccgcgagtactcccggcaagtgcacgagtggctgtggcagtcctactgcggctacctcacctggcacagcggcctggccgccttcccagcctactgcagcccccagccctccccgcaaagcttcccttcgggcggcgctgcagtcccccaggccgcggcgccgccgcccccgcagctgggctattacaaccccttctacttcctgagccccggggccgcggggcctgacccgcggacagctgccggcatcagcacccctgctccagtcgcgggcctgggaccccgggctcctcacgtgcaggcgtcggtccgggccactccagtgacgagggtaggatccgcagccccttcgcgaagcccgagcgagaccgggcgacaggcaggcagagaatatgttattccatccttggcccacagatttatggcagagatggtggatttctttattctcttctttataaaagcaaccattgtcttaagcattatgcacctcagtgggataaaggatatctctaagtttgctatgcattatataatagaagaaatagatgaagacacatcaatggaagacttgcagaaaatgatggttgtggcacttatatacagattattagtttgtttctatgagataatttgcatttggggagcaggtggagctaccccagggaagttcctgctggggcttcgagttgtgacatgtgatacatcagtgcttattgcaccaagtcgggttttagtgattccttcctcaaatgttagcattacaacgtccactatccgagctttgatcaagaatttttcaattgcttcttttttccctgctttcatcacactgctgttttttcagcataatcgaacagcttatgacattgtagcaggaaccattgtggtaaaaagaaatggggtcagatgatgccccccaaaaccctgatttccacacactaagactaaattatgtatcaaggccatcagtatccctgggttacactaattgatgatttagaaattaaagcagtcactccagtgtgatgcaggtgactactctgaaagtattgattatacttgaatgccaaagaacttgtccagaagaaaaacctgttaaattcaagtattaaaatttttagatcaaaaaggcaaatgattttataaacaatggacaatatatactttcttaagatctaaggtactttcttaagatctaagaatttgctgaaagcattttcagctttgaaatctccaaatgaaactttaaaatttattttggtttatcccaaaataatggaaaatgtccagttgtgttttgtaaacacctatgtaactcatcttttagtttacacttcctggggaaattgtctttggtgtttagaggagggaatgagaacacaaattggataatccactgtctcccatcccaggaggtggtgagttggctacaagagaaagggacaagtgaggcaggcctagcagttcccttacctgaagttttcaaatccatactgcagttccctctcgtaatgatgtaactttacaactattcttaatgcttgaacatgtatttaggggcaagtttctcatgatgatgaaaaagtatcaagtcatattgctatgttaattggtttttttttttaaaaggtaagttagtgattactgttaatggtgggggagtaagttttcactgtaaattgaacttataatttatgtgcaagtgttttcagtgccctgaatcaaactataaatgtggggagaaatcacctccatcaaacagttgcatatttactgtaaaagtattcccagtatgtgtgcagcatgaagaaagtattagtgcttctcagtgttctcagtgtaaattctatttatatacagcatattcacatactactttccttatattttatatagttctatgactgttgaaacatcaaggagttaaaaaaatcttaatatttcatgattaactctaagtacattaattaatagcttgcgaaatattagcaattttcccattatggactattctctctaaagcaagagagactagcattcccagacatcattctagggtctttaagctcattttgggtctgctaaagtttggggggaaatgttacgcaaagtgatactgtgtatgttgccattttgctttattcttctgttgaagcaaaattgtggggttttattatgtgtgtgtgcttttcctagatgtcccagttagctgtgctgagatatacctgtactatttatggtttaagttttgattcttaggtattttctccagctctgacattgttttccaaagacacactaaactgcattgcacagttcaaaatttgattacttaagggatcaatctaggtggtgttcttggtcttaaatttaacagcaaacacagcacatatctattatcactatattaattttcaaaggtttttctttgacgtttaaaactgtgacaacagatattcacatttgattatagaaacttaatgtctattaataattttagtacaaaatttcataaaccgtgtttttcaaaataagtttatgtcaaatccagcttcccagaaacactaataattaagtacatcaatgtactaaataaatcattcagttgcacccatggggaagattgtgttactgcccttcacagtgaaaaaaagaaaaatctttcatttttaaaattaggagatgttacgtaacttggcactttagtagtgtatacactagcattagtttatacaccacttttgccgctggggaattcaagttgaaatgtccctcaatcatataggtctggaatacatctttcattcataatttctgctcagataattgaatagtttgccatcgagattattttcatttatactataaaacaaaagcaaactagtccagtttaattttttgtacttagaatattgcacattttctatatatgagttattcagattagtatctatgtaggttcagtcagatccaaccatggattcgaggtattatactgtataaccctacaaaatacatagaagtattatttgccttcataatagaacccaagagtctgtttcaatttatgaattcagtatttgcaccgagattttgattcccaaagtttggaaaaaaatgacaaaacaacgagggaagaaggaaccagaccttagtgccacatatttttctcttggggttgtaaggtagtctcctgctttccagaacactttattatatttcacttatagacctgattttctgtgtcaaagtataattctcatgctgaagctgtagcctaaaaagccaaaagaaagttgtcttcattgtacaaacatattcatcactttaacaataagggaacaaaatttagtattcaagctgagtgagaatactgtttcaatgagcatgtccctaagataaaccagaattggcagttaatttaggcgtctagaaaatctcagttcccaccagtaaaattatcctgagtagctaatgcaccttgagaaaaatctggcatactgaataaataacattaacttgggagccaagagctgggtaagccttacctttagactactctgtgactacagaaataaagccagcacttttggaactaataagccttcacttgtcagtatcataaagagtattgcccaacggaactttgctcccactggtttaatagttacttatttctgcctaagcactcaccttccgattttacccaagtatatatataggatagaaaaaaatgcattatatttgagagctacttcgcccaaattacaaaatgagtgtttttagattcaagtgacagtaaaaggatttgttcccttcagtgacttgagtgttttagttatgcataagtatttctagcaaaggaagggtagaaaggaattgaaaattaatttacactagttgctacttgggaataaagggctttttgaggggggtatggatattaaatgttttcgttatatacttatccctattaaaacaggcagttgtttctttgaatatgcctaaataacagtattcttataccacaggccactcttgacatcccatgtttgcctggataaagttcctcatttcaaacagtatacatacttctttgcagttcattatagtaaggcttaacctgtaaacagtatctgatggcccacctataaataaaattcagcattctatttttaataatttgtatgccaccaatttgtattatttgtctcaataaatacttagtcatcaatg

SEQ ID NO: 292005 - DNA, 4122 bp, Homo sapiens
  misc_feature (4110)..(4110): n is a, c, g, or t
  misc_feature (4119)..(4119): n is a, c, g, or t
ggggaggggccattgggggagggaaacggagcagtaacaagtatcccagagggtgctgctgaggcgacgatggccgaggggcccgaggaagcccgaggccaccctcccgggcaggacgatggcggaggggaccacgagcccgtcccttccctgagaggccctcctaccaccgccgtcccatgcccccgcgacgacccccaggccgaaccccaggccccgggccggcccacagccccgggcctcgcggctgccgccgcagccgacaaattggagccgccgcgcgagctcaggaagcgcggggaggcggcctccggctccggtgcagagctgcaggagcaggcgggctgcgaggcgcccgaagccgcggcgccacgagagagaccagctcggctgagcgcccgcgagtactcccggcaagtgcacgagtggctgtggcagtcctactgcggctacctcacctggcacagcggcctggccgccttcccagcctactgcagcccccagccctccccgcaaagcttcccttcgggcggcgctgcagtcccccaggccgcggcgccgccgcccccgcagctgggctattacaaccccttctacttcctgagccccggggccgcggggcctgacccgcggacagctgccggcatcagcacccctgctccagtcgcgggcctgggaccccgggctcctcacgtgcaggcgtcggtccgggccactccagtgacgagggtaggatccgcagccccttcgcgaagcccgagcgagaccgggcgacaggcaggcagagaatatgttattccatccttggcccacagatttatggcagagatggtggatttctttattctcttctttataaaagcaaccattgtcttaagcattatgcacctcagtgggataaaggatatctctaagtttgctatgcattatataatagaagaaatagatgaagacacatcaatggaagacttgcagaaaatgatggttgtggcacttatatacagattattagtttgtttctatgagataatttgcatttggggagcaggtggagctaccccagggaagttcctgctggggcttcgagttgtgacatgtgatacatcagtgcttattgcaccaagtcgggttttagtgattccttcctcaaatgttagcattacaacgtccactatccgagctttgatcaagaatttttcaattgcttcttttttccctgctttcatcacactgctgttttttcagcataatcgaacagcttatgacattgtagcaggaaccattgtggtaaaaagaaatggggtcagatgatgccccccaaaaccctgatttccacacactaagactaaattatgtatcaaggccatcagtatccctgggttacactaattgatgatttagaaattaaagcagtcactccagtgtgatgcaggtgactactctgaaagtattgattatacttgaatgccaaagaacttgtccagaagaaaaacctgttaaattcaagtattaaaatttttagatcaaaaaggcaaatgattttataaacaatggacaatatatactttcttaagatctaaggtactttcttaagatctaagaatttgctgaaagcattttcagctttgaaatctccaaatgaaactttaaaatttattttggtttatcccaaaataatggaaaatgtccagttgtgttttgtaaacacctatgtaactcatcttttagtttacacttcctggggaaattgtctttggtgtttagaggagggaatgagaacacaaattggataatccactgtctcccatcccaggaggtggtgagttggctacaagagaaagggacaagtgaggcaggcctagcagttcccttacctgaagttttcaaatccatactgcagttccctctcgtaatgatgtaactttacaactattcttaatgcttgaacatgtatttaggggcaagtttctcatgatgatgaaaaagtatcaagtcatattgctatgttaattggtttttttttttaaaaggtaagttagtgattactgttaatggtgggggagtaagttttcactgtaaattgaacttataatttatgtgcaagtgttttcagtgccctgaatcaaactataaatgtggggagaaatcacctccatcaaacagttgcatatttactgtaaaagtattcccagtatgtgtgcagcatgaagaaagtattagtgcttctcagtgttctcagtgtaaattctatttatatacagcatattcacatactactttccttatattttatatagttctatgactgttgaaacatcaaggagttaaaaaaatcttaatatttcatgattaactctaagtacattaattaatagcttgcgaaatattagcaattttcccattatggactattctctctaaagcaagagagactagcattcccagacatcattctagggtctttaagctcattttgggtctgctaaagtttggggggaaatgttacgcaaagtgatactgtgtatgttgccattttgctttattcttctgttgaagcaaaattgtggggttttattatgtgtgtgtgcttttcctagatgtcccagttagctgtgctgagatatacctgtactatttatggtttaagttttgattcttaggtattttctccagctctgacattgttttccaaagacacactaaactgcattgcacagttcaaaatttgattacttaagggatcaatctaggtggtgttcttggtcttaaatttaacagcaaacacagcacatatctattatcactatattaattttcaaaggtttttctttgacgtttaaaactgtgacaacagatattcacatttgattatagaaacttaatgtctattaataattttagtacaaaatttcataaaccgtgtttttcaaaataagtttatgtcaaatccagcttcccagaaacactaataattaagtacatcaatgtactaaataaatcattcagttgcacccatggggaagattgtgttactgcccttcacagtgaaaaaaagaaaaatctttcatttttaaaattaggagatgttacgtaacttggcactttagtagtgtatacactagcattagtttatacaccacttttgccgctggggaattcaagttgaaatgtccctcaatcatataggtctggaatacatctttcattcataatttctgctcagataattgaatagtttgccatcgagattattttcatttatactataaaacaaaagcaaactagtccagtttaattttttgtacttagaatattgcacattttctatatatgagttattcagattagtatctatgtaggttcagtcagatccaaccatggattcgaggtattatactgtataaccctacaaaatacatagaagtattatttgccttcataatagaacccaagagtctgtttcaatttatgaattcagtatttgcaccgagattttgattcccaaagtttggaaaaaaatgacaaaacaacgagggaagaaggaaccagaccttagtgccacatatttttctcttggggttgtaaggtagtctcctgctttccagaacactttattatatttcacttatagacctgattttctgtgtcaaagtataattctcatgctgaagctgtagcctaaaaagccaaaagaaagttgtcttcattgtacaaacatattcatcactttaacaataagggaacaaaatttagtattcaagctgagtgagaatactgtttcaatgagcatgtccctaagataaaccagaattggcagttaatttaggcgtctagaaaatctcagttcccaccagtaaaattatcctgagtagctaatgcaccttgagaaaaatctggcatactgaataaataacattaacttgggagccaagagctgggtaagccttacctttagactactctgtgactacagaaataaagccagcacttttggaactaataagccttcacttgtcagtatcataaagagtattgcccaacggaactttgctcccactggtttaatagttacttatttctgcctaagcactcctactctgaaagtgggtncgagctggntgt

SEQ ID NO: 292006 - DNA, 489 bp, Homo sapiens
acccttcattcacctattaccattcaggacaaaacctctacttgtcctgctttgcggactctaacccaccggcacagtattcttggacaattaatgggaagtttcagctatcaggacaaaagctttctatcccccagattactacaaagcatagcgggctctatgcttgctctgttcgtaactcagccactggcaaggaaagctccaaatccgtgacagtcagagtctctgactggacattaccctgaattctactagttcctccaattccatcttctcccatggaacctcaaagagcaagacccactctgttccagaagccctataagtcagagttggacaactcaatgtaaatttcatgggaaaatccttgtacctgatgtctgagccactcagaactcaccaaaatgttcaacaccataacaacagctgctcaaactgtaaacaaggaaaacaagttgatgacttcacactgtggacagcttttcc

SEQ ID NO: 292007 - DNA, 3253 bp, Homo sapiens
  misc_feature (3222)..(3222): n is a, c, g, or t
  misc_feature (3227)..(3228): n is a, c, g, or t
  misc_feature (3234)..(3235): n is a, c, g, or t
  misc_feature (3237)..(3237): n is a, c, g, or t
  misc_feature (3241)..(3241): n is a, c, g, or t
tgccctactggccctacctcacagctgaaactttaaaaaacaggatgggccaccagccacctcctccaactcaacaacattctataactgataactccctgagcctcaagacacctcccgagtgtctgctcactccccttccaccctcagcggatgataatctcaagaaagaaagagaaagaaggaggaaggacagcacacctgacagccctgctcaggaagtctctggatcctaggctcatctccacaggggagaacacacagacagcagagaccatgggacccctctcagcccctccctgcactcagcacatcacctggaaggggctcctgctcacagcatcacttttaaacttctggaacctgcccaccactgcccaagtaataattgaagccaagccacccaaagtttccgaggggaaggatgttcttctacttgtccacaatttgccccagaatcttactggctacatctggtacaaagggcaaatgacggacctctaccattacattacatcatatgtagtacacggtcaaattatatatgggcctgcctacagtggacgagaaacagtatattccaatgcatccctgctgatccagaatgtcacacaggaggatgcaggatcctacaccttacacatcataaagcgaggcgatgggactggaggagtaactggatatttcactgtcaccttatactcggagactcccaagccctccatctccagcagcaacttaaaccccagggaggtcatggaggctgtgcgcttaatctgtgatcctgagactccggatgcaagctacctgtggttgctgaatggtcagaacctccctatgactcacaggttgcagctgtccaaaaccaacaggaccctctatctatttggtgtcacaaagtatattgcaggaccctatgaatgtgaaatacggaacccagtgagtgccagccgcagtgacccagtcaccctgaatctcctcccgaagctgcccatgccttacatcaccatcaacaacttaaaccccagggagaagaaggatgtgttagccttcacctgtgaacctaagagtcggaactacacctacatttggtggctaaatggtcagagcctcccggtcagtccgagggtaaagcgacccattgaaaacaggatactcattctacccagtgtcacgagaaatgaaacaggaccctatcaatgtgaaatacgggaccgatatggtggcatccgcagtaacccagtcaccctgaatgtcctctatggtccagacctccccagaatttacccttcattcacctattaccgttcaggagaaaacctcgacttgtcctgctttgcggactctaacccaccggcagagtattcttggacaattaatgggaagtttcagctatcaggacaaaagctctttatcccccaaattactacaaatcatagcgggctctatgcttgctctgttcgtaactcagccactggcaaggaaatctccaaatccatgatagtcaaagtctctgagacagcatctccccaggttacctatgctggtccaaacacctggtttcaagaaatccttctgctgtgacctcccaaagtgctaggattaaaacatgacccaccatgctcagagtccattttcatttatgatttgagtaattttatcttttctctttttttcttagccaatctagttaatggttgtcaattttgttgattttattttgaagaatcaacttttggtttcagtaatttcctctattctgtttccattctccattttatttatatccaccctaatacttattatttccctcattcactgtgcttgggtttagtttgttcttctttcgtatcctgaagtattaaagtaggttgttgacctgagctctttcttcttttttaatgtaagagtttacagttataaatttcttgcacaagactcaacttctctgaacccctgattcctcacctgaaaattgcaataagagtactttcttcataccattcttttaaaggtttaatgcagtcaatgaaacaagatgccacacaaagaggaaccaatgtcagctgctatattactaccatcatcattagccttgaggtcaaatagtcctagaatcaaatctcagatccacctgtcactagccatatgacaccaggaaagtttttacaccatgctaagcttctgtcttttcatcagcaaaatggaaataatgcctacctgacagggttattgtgtggattaaatgagatacaggtaaagtattgagcacagggcctggcacatagaaagtgcacctcaacagtacctacctttttccatagatatgaaaaaagcggtaacacataaaacactaggacatggttactgactaattgtgggagagaaagaaaaaaagctaagtgcaaagaatcaagtctggtatgttagtttttaccaactgagatgcatccaagatgggattagacatacaagataatttatcagggaagacacctgtgagggaatgtggggcaggcatgaaggtagtatgggagaacccacagaccgctatgcagagctgattcctgtgaaaaagaaagagaaagaagttttaggtaccaatgcagttctaagagtttttgcaaggctgatgaggaatcctccaaccagtcacccattggagttaaagagagcctcggagaactagacttgctttcacacccttgctgggagcctgtgggaaagaagctttctctgtaaaggaggtagtgaatttgaaatgcgctgacctgggccttctgtcaatcaggtccctgccatggaaaccagacagagtctcattaatggctgccacaatagagacactgagaaaaagaacaggttgataccttcatgaaattcaagacaaagaagaaaaaaactcaatgttattggactaaataatcaaaaggataatgttttcataattttttattggaaaatgtgctgattcttggaatgttttattctccagatttatgaactttttttcttcagcaattggtaaagtatacttttgtaaacaaaaattgaaacatttgcttttgctctctatctgagtgccccagaattgggaaactattcatgagtattcataggtttatggtaataaagttatttgcacaagttcaaaaaaaaaaaaaaaaaacaaaaaaaaacatgtgtgttggggcgccctgggcccctgaaaaagcttttctnagaanncattgnntngggncgcgggggcccc

SEQ ID NO: 292008 - DNA, 6174 bp, Homo sapiens
  misc_feature (6143)..(6143): n is a, c, g, or t
  misc_feature (6148)..(6149): n is a, c, g, or t
  misc_feature (6155)..(6156): n is a, c, g, or t
  misc_feature (6158)..(6158): n is a, c, g, or t
  misc_feature (6162)..(6162): n is a, c, g, or t
tgccctactggccctacctcacagctgaaactttaaaaaacaggatgggccaccagccacctcctccaactcaacaacattctataactgataactccctgagcctcaagacacctcccgagtgtctgctcactccccttccaccctcagcggatgataatctcaagaaagaaagagaaagaaggaggaaggacagcacacctgacagccctgctcaggaagtctctggatcctaggctcatctccacaggggagaacacacagacagcagagaccatgggacccctctcagcccctccctgcactcagcacatcacctggaaggggctcctgctcacagcatcacttttaaacttctggaacctgcccaccactgcccaagtaataattgaagccaagccacccaaagtttccgaggggaaggatgttcttctacttgtccacaatttgccccagaatcttactggctacatctggtacaaagggcaaatgacggacctctaccattacattacatcatatgtagtacacggtcaaattatatatgggcctgcctacagtggacgagaaacagtatattccaatgcatccctgctgatccagaatgtcacacaggaggatgcaggatcctacaccttacacatcataaagcgaggcgatgggactggaggagtaactggatatttcactgtcaccttatactcggagactcccaagccctccatctccagcagcaacttaaaccccagggaggtcatggaggctgtgcgcttaatctgtgatcctgagactccggatgcaagctacctgtggttgctgaatggtcagaacctccctatgactcacaggttgcagctgtccaaaaccaacaggaccctctatctatttggtgtcacaaagtatattgcaggaccctatgaatgtgaaatacggaacccagtgagtgccagccgcagtgacccagtcaccctgaatctcctccatggtccagacctccccagaatttacccttcattcacctattaccgttcaggagaaaacctcgacttgtcctgctttgcggactctaacccaccggcagagtattcttggacaattaatgggaagtttcagctatcaggacaaaagctctttatcccccaaattactacaaatcatagcgggctctatgcttgctctgttcgtaactcagccactggcaaggaaatctccaaatccatgatagtcaaagtctctggtaagtggatcccagcatccttggcaatagggttttaggtggagtctatctggctttcagagaagagtcaggaaaacatttgtattcccagactgtgtcccatgggcacaagcaaatcccaaattctcctcctgaaccctcccaacttatctctacagactctcttctgcttgtttttctgttttctcatggctgaccttgtgtctggcctgagaaaggtagggagggggctttatcagccctgagccctatgtggtagaagaggcttcacagagggacaagaaggagagtcctcaagatcaagttgcttctcgctgtcacgaacacatccccttctgccatgtctttgttttcttgtacctattccatgagctacaaggaacatctgaggctttgaaacaagctcacacttttcccccaaatgagaggaggaagccctttgggtgagggaggagcagctcagactctgcttcctgctctgctccgggctcctctggtgactggcctggccctgcctgactccacctggggtggaaccaacatgtgtggagaaagggccctggtggcctgtcctgaagttggctaaatcgagctgccagttgaagccaagcctcccccgggccaggctgcagggaaataagaagagagggagcttcagggctgactcctgagctgcatcctggctctgaagtcaccagctgtatgaggctttgggcacagcacgtgggacacagcacggaggacagtgactgatgcagagctagagaaatagggagattcacccctggggctctgcatggcaggaaaggggcagtgccaaaaagtgtgtaattatagagagggcaagaccacgagacactttatatatatctaatattagacttaccattaactaagtgtgcaatttagtgttgtgtaactatcacactatccatttccagaactttttcctcttaccatattaaacctctgtacccaataaacagtaactctcactccttctccccctaacccttaacacccaccattctactttctgtctctatgtaactggctattctaactatcttttataaatggaattatataataattatccttttgtgtctggcttatttcagttggcataatatcttcaaggttcatccattttgcacgatgtattgtaattttcttccttgttaaggttgaataacatttcaatgtatagatacatctcatttgcctacccacttatctttcaatggacttttcagttgtttccatttttggctagtgtgagtaatgcttctctgtacatcagtgtacaaatatttcttcaaatttctttcaattctatagggagtatgtccagaaggggaattgctggatcaaatggtaatttattgtttaattttttgaaaaacagccacactactttttacattggctataacatttcccattcccatcagcaatgcactagagctccaatttttccatctacttggaaacacctgttgtttagtgttgctgtcattgttgttgtttatcaaagccatcctaaagtgtgtgaggtgttgtaacattgtggttttgatttgcatatctctaagtattcgtgatgctgaggaactttgcatgggctatataaaaggttttgatttttatgaagtctgatttatccattttatttgttgcctatgcttttgttgttacaaccaagaaatcattgtgaaatccactatcatgaagtttttcttctaagagttgtatagtttttactcttacatttagatctttgatctattgtgggttaatttttgtacatggtgttaggtaaaggttccactcttcttgcccttggatatccacctttcccaatatcatttggtgagaacactgtcccttccccattgaacgatcttggcacactcgatgaaaatcatttggccatatatgcaagcatttctttctgggctatgatatttcattaatttctatgtcctcctttatgccagtaccacactgtattgattactggggctttgtagtaaatgctgaaatcaggaagtgtgagtcctccagcttcattcttcctcttcaaagctgtgtgtctatttagagtcatgagatgcaatataaattttaggacagatttttctttttctgcaaaaatgtcactgagattctgataggaattgtattgaatctgcagctcactttgggcagcactgtcctcctaacaatattgagtcttccaattcatgaacacaaaatgtctttcaatttattgatgtcatctttcatttctttcagcaatactttgtagatttcaggtataatcatttcacctctttggttaaacttattcctaaatattttattctttttgatgtgaatataaattgaaattatttttcttaatttcccttcagattgttcatggttagtgtattgaaatacaactgatgtttgaatgttgattttgtattgtgcaacattactgaatttattaattctaataggtttgttccatctttaggattttctacaaataagttcaagttatctataaacagaaataattttactccttccttccaatttgaatgtctttttaaaaattcttccctaatttttctgattagacctttcactactatgttgaataaaagtgtcaatagcaggcatccttgtcttttcctgctcatacagggaaagttttcagtctttctctgttatgtaagatgttagcattgggtttttcacatattgcctttatgttgaggtggttgccttccattcttagaatgtttttattatgaaaaaatactgaatttcatcaaatgcttttattgattcaatcttcttactgattatagttatattcatatttttgtgtgtttctaggagtttgtctatttcatctaggttatccaatttattggcatacaattatttatagtactttcataatcattattttattagaattggtagtaatcgcttcatttttcttttttctttttcttttaagacagagagacaggctctcactctgtaggccaccctaggatggaatacagtggtgtgattatggctcactgcagcctcaacctcctgggctcaagcaattctccttcttcagcctcccaagatgctaggactacaggtgcatgtcaacatgcccagctaattggttttttttttttttgtagagacagcatctccccaggttacctatgctggtccaaacacctggtttcaagaaatccttctgctgtgacctcccaaagtgctaggattaaaacatgacccaccatgctcagagtccattttcatttatgatttgagtaattttatcttttctctttttttcttagccaatctagttaatggttgtcaattttgttgattttattttgaagaatcaacttttggtttcagtaatttcctctattctgtttccattctccattttatttatatccaccctaatacttattatttccctcattcactgtgcttgggtttagtttgttcttctttcgtatcctgaagtattaaagtaggttgttgacctgagctctttcttcttttttaatgtaagagtttacagttataaatttcttgcacaagactcaacttctctgaacccctgattcctcacctgaaaattgcaataagagtactttcttcataccattcttttaaaggtttaatgcagtcaatgaaacaagatgccacacaaagaggaaccaatgtcagctgctatattactaccatcatcattagccttgaggtcaaatagtcctagaatcaaatctcagatccacctgtcactagccatatgacaccaggaaagtttttacaccatgctaagcttctgtcttttcatcagcaaaatggaaataatgcctacctgacagggttattgtgtggattaaatgagatacaggtaaagtattgagcacagggcctggcacatagaaagtgcacctcaacagtacctacctttttccatagatatgaaaaaagcggtaacacataaaacactaggacatggttactgactaattgtgggagagaaagaaaaaaagctaagtgcaaagaatcaagtctggtatgttagtttttaccaactgagatgcatccaagatgggattagacatacaagataatttatcagggaagacacctgtgagggaatgtggggcaggcatgaaggtagtatgggagaacccacagaccgctatgcagagctgattcctgtgaaaaagaaagagaaagaagttttaggtaccaatgcagttctaagagtttttgcaaggctgatgaggaatcctccaaccagtcacccattggagttaaagagagcctcggagaactagacttgctttcacacccttgctgggagcctgtgggaaagaagctttctctgtaaaggaggtagtgaatttgaaatgcgctgacctgggccttctgtcaatcaggtccctgccatggaaaccagacagagtctcattaatggctgccacaatagagacactgagaaaaagaacaggttgataccttcatgaaattcaagacaaagaagaaaaaaactcaatgttattggactaaataatcaaaaggataatgttttcataattttttattggaaaatgtgctgattcttggaatgttttattctccagatttatgaactttttttcttcagcaattggtaaagtatacttttgtaaacaaaaattgaaacatttgcttttgctctctatctgagtgccccagaattgggaaactattcatgagtattcataggtttatggtaataaagttatttgcacaagttcaaaaaaaaaaaaaaaaaacaaaaaaaaacatgtgtgttggggcgccctgggcccctgaaaaagcttttctnagaanncattgnntngggncgcgggggcccc

SEQ ID NO: 292009 - DNA, 2061 bp, Homo sapiens
  misc_feature (2030)..(2030): n is a, c, g, or t
  misc_feature (2035)..(2036): n is a, c, g, or t
  misc_feature (2042)..(2043): n is a, c, g, or t
  misc_feature (2045)..(2045): n is a, c, g, or t
  misc_feature (2049)..(2049): n is a, c, g, or t
tgccctactggccctacctcacagctgaaactttaaaaaacaggatgggccaccagccacctcctccaactcaacaacattctataactgataactccctgagcctcaagacacctcccgagtgtctgctcactccccttccaccctcagcggatgataatctcaagaaagaaagagaaagaaggaggaaggacagcacacctgacagccctgctcaggaagtctctggatcctaggctcatctccacaggggagaacacacagacagcagagaccatgggacccctctcagcccctccctgcactcagcacatcacctggaaggggctcctgctcacagcatcacttttaaacttctggaacctgcccaccactgcccaagtaataattgaagccaagccacccaaagtttccgaggggaaggatgttcttctacttgtccacaatttgccccagaatcttactggctacatctggtacaaagggcaaatgacggacctctaccattacattacatcatatgtagtacacggtcaaattatatatgggcctgcctacagtggacgagaaacagtatattccaatgcatccctgctgatccagaatgtcacacaggaggatgcaggatcctacaccttacacatcataaagcgaggcgatgggactggaggagtaactggatatttcactgtcaccttatactcggagactcccaagccctccatctccagcagcaacttaaaccccagggaggtcatggaggctgtgcgcttaatctgtgatcctgagactccggatgcaagctacctgtggttgctgaatggtcagaacctccctatgactcacaggttgcagctgtccaaaaccaacaggaccctctatctatttggtgtcacaaagtatattgcaggaccctatgaatgtgaaatacggaacccagtgagtgccagccgcagtgacccagtcaccctgaatctcctccgtgggagatgccaactctgaatgaaggatgcctgtggaggaatcaaaggtgccacacaggacaatcttctgttatccacacagcgaagctgcccatgccttacatcaccatcaacaacttaaaccccagggagaagaaggatgtgttagccttcacctgtgaacctaagagtcggaactacacctacatttggtggctaaatggtcagagcctcccggtcagtccgagggtaaagcgacccattgaaaacaggatactcattctacccagtgtcacgagaaatgaaacaggaccctatcaatgtgaaatacgggaccgatatggtggcatccgcagtaacccagtcaccctgaatgtcctctatggtccagacctccccagaatttacccttcattcacctattaccgttcaggagaaaacctcgacttgtcctgctttgcggactctaacccaccggcagagtattcttggacaattaatgggaagtttcagctatcaggacaaaagctctttatcccccaaattactacaaatcatagcgggctctatgcttgctctgttcgtaactcagccactggcaaggaaatctccaaatccatgatagtcaaagtctctggtccctgccatggaaaccagacagagtctcattaatggctgccacaatagagacactgagaaaaagaacaggttgataccttcatgaaattcaagacaaagaagaaaaaaactcaatgttattggactaaataatcaaaaggataatgttttcataattttttattggaaaatgtgctgattcttggaatgttttattctccagatttatgaactttttttcttcagcaattggtaaagtatacttttgtaaacaaaaattgaaacatttgcttttgctctctatctgagtgccccagaattgggaaactattcatgagtattcataggtttatggtaataaagttatttgcacaagttcaaaaaaaaaaaaaaaaaacaaaaaaaaacatgtgtgttggggcgccctgggcccctgaaaaagcttttctnagaanncattgnntngggncgcgggggcccc

SEQ ID NO: 292010 - DNA, 6090 bp, Homo sapiens
  misc_feature (6059)..(6059): n is a, c, g, or t
  misc_feature (6064)..(6065): n is a, c, g, or t
  misc_feature (6071)..(6072): n is a, c, g, or t
  misc_feature (6074)..(6074): n is a, c, g, or t
  misc_feature (6078)..(6078): n is a, c, g, or t
tgccctactggccctacctcacagctgaaactttaaaaaacaggatgggccaccagccacctcctccaactcaacaacattctataactgataactccctgagcctcaagacacctcccgagtgtctgctcactccccttccaccctcagcggatgataatctcaagaaagaaagagaaagaaggaggaaggacagcacacctgacagccctgctcaggaagtctctggatcctaggctcatctccacaggggagaacacacagacagcagagaccatgggacccctctcagcccctccctgcactcagcacatcacctggaaggggctcctgctcacagcggagactcccaagccctccatctccagcagcaacttaaaccccagggaggtcatggaggctgtgcgcttaatctgtgatcctgagactccggatgcaagctacctgtggttgctgaatggtcagaacctccctatgactcacaggttgcagctgtccaaaaccaacaggaccctctatctatttggtgtcacaaagtatattgcaggaccctatgaatgtgaaatacggaacccagtgagtgccagccgcagtgacccagtcaccctgaatctcctcccgaagctgcccatgccttacatcaccatcaacaacttaaaccccagggagaagaaggatgtgttagccttcacctgtgaacctaagagtcggaactacacctacatttggtggctaaatggtcagagcctcccggtcagtccgagggtaaagcgacccattgaaaacaggatactcattctacccagtgtcacgagaaatgaaacaggaccctatcaatgtgaaatacgggaccgatatggtggcatccgcagtaacccagtcaccctgaatgtcctctatggtccagacctccccagaatttacccttcattcacctattaccgttcaggagaaaacctcgacttgtcctgctttgcggactctaacccaccggcagagtattcttggacaattaatgggaagtttcagctatcaggacaaaagctctttatcccccaaattactacaaatcatagcgggctctatgcttgctctgttcgtaactcagccactggcaaggaaatctccaaatccatgatagtcaaagtctctggtaagtggatcccagcatccttggcaatagggttttaggtggagtctatctggctttcagagaagagtcaggaaaacatttgtattcccagactgtgtcccatgggcacaagcaaatcccaaattctcctcctgaaccctcccaacttatctctacagactctcttctgcttgtttttctgttttctcatggctgaccttgtgtctggcctgagaaaggtagggagggggctttatcagccctgagccctatgtggtagaagaggcttcacagagggacaagaaggagagtcctcaagatcaagttgcttctcgctgtcacgaacacatccccttctgccatgtctttgttttcttgtacctattccatgagctacaaggaacatctgaggctttgaaacaagctcacacttttcccccaaatgagaggaggaagccctttgggtgagggaggagcagctcagactctgcttcctgctctgctccgggctcctctggtgactggcctggccctgcctgactccacctggggtggaaccaacatgtgtggagaaagggccctggtggcctgtcctgaagttggctaaatcgagctgccagttgaagccaagcctcccccgggccaggctgcagggaaataagaagagagggagcttcagggctgactcctgagctgcatcctggctctgaagtcaccagctgtatgaggctttgggcacagcacgtgggacacagcacggaggacagtgactgatgcagagctagagaaatagggagattcacccctggggctctgcatggcaggaaaggggcagtgccaaaaagtgtgtaattatagagagggcaagaccacgagacactttatatatatctaatattagacttaccattaactaagtgtgcaatttagtgttgtgtaactatcacactatccatttccagaactttttcctcttaccatattaaacctctgtacccaataaacagtaactctcactccttctccccctaacccttaacacccaccattctactttctgtctctatgtaactggctattctaactatcttttataaatggaattatataataattatccttttgtgtctggcttatttcagttggcataatatcttcaaggttcatccattttgcacgatgtattgtaattttcttccttgttaaggttgaataacatttcaatgtatagatacatctcatttgcctacccacttatctttcaatggacttttcagttgtttccatttttggctagtgtgagtaatgcttctctgtacatcagtgtacaaatatttcttcaaatttctttcaattctatagggagtatgtccagaaggggaattgctggatcaaatggtaatttattgtttaattttttgaaaaacagccacactactttttacattggctataacatttcccattcccatcagcaatgcactagagctccaatttttccatctacttggaaacacctgttgtttagtgttgctgtcattgttgttgtttatcaaagccatcctaaagtgtgtgaggtgttgtaacattgtggttttgatttgcatatctctaagtattcgtgatgctgaggaactttgcatgggctatataaaaggttttgatttttatgaagtctgatttatccattttatttgttgcctatgcttttgttgttacaaccaagaaatcattgtgaaatccactatcatgaagtttttcttctaagagttgtatagtttttactcttacatttagatctttgatctattgtgggttaatttttgtacatggtgttaggtaaaggttccactcttcttgcccttggatatccacctttcccaatatcatttggtgagaacactgtcccttccccattgaacgatcttggcacactcgatgaaaatcatttggccatatatgcaagcatttctttctgggctatgatatttcattaatttctatgtcctcctttatgccagtaccacactgtattgattactggggctttgtagtaaatgctgaaatcaggaagtgtgagtcctccagcttcattcttcctcttcaaagctgtgtgtctatttagagtcatgagatgcaatataaattttaggacagatttttctttttctgcaaaaatgtcactgagattctgataggaattgtattgaatctgcagctcactttgggcagcactgtcctcctaacaatattgagtcttccaattcatgaacacaaaatgtctttcaatttattgatgtcatctttcatttctttcagcaatactttgtagatttcaggtataatcatttcacctctttggttaaacttattcctaaatattttattctttttgatgtgaatataaattgaaattatttttcttaatttcccttcagattgttcatggttagtgtattgaaatacaactgatgtttgaatgttgattttgtattgtgcaacattactgaatttattaattctaataggtttgttccatctttaggattttctacaaataagttcaagttatctataaacagaaataattttactccttccttccaatttgaatgtctttttaaaaattcttccctaatttttctgattagacctttcactactatgttgaataaaagtgtcaatagcaggcatccttgtcttttcctgctcatacagggaaagttttcagtctttctctgttatgtaagatgttagcattgggtttttcacatattgcctttatgttgaggtggttgccttccattcttagaatgtttttattatgaaaaaatactgaatttcatcaaatgcttttattgattcaatcttcttactgattatagttatattcatatttttgtgtgtttctaggagtttgtctatttcatctaggttatccaatttattggcatacaattatttatagtactttcataatcattattttattagaattggtagtaatcgcttcatttttcttttttctttttcttttaagacagagagacaggctctcactctgtaggccaccctaggatggaatacagtggtgtgattatggctcactgcagcctcaacctcctgggctcaagcaattctccttcttcagcctcccaagatgctaggactacaggtgcatgtcaacatgcccagctaattggttttttttttttttgtagagacagcatctccccaggttacctatgctggtccaaacacctggtttcaagaaatccttctgctgtgacctcccaaagtgctaggattaaaacatgacccaccatgctcagagtccattttcatttatgatttgagtaattttatcttttctctttttttcttagccaatctagttaatggttgtcaattttgttgattttattttgaagaatcaacttttggtttcagtaatttcctctattctgtttccattctccattttatttatatccaccctaatacttattatttccctcattcactgtgcttgggtttagtttgttcttctttcgtatcctgaagtattaaagtaggttgttgacctgagctctttcttcttttttaatgtaagagtttacagttataaatttcttgcacaagactcaacttctctgaacccctgattcctcacctgaaaattgcaataagagtactttcttcataccattcttttaaaggtttaatgcagtcaatgaaacaagatgccacacaaagaggaaccaatgtcagctgctatattactaccatcatcattagccttgaggtcaaatagtcctagaatcaaatctcagatccacctgtcactagccatatgacaccaggaaagtttttacaccatgctaagcttctgtcttttcatcagcaaaatggaaataatgcctacctgacagggttattgtgtggattaaatgagatacaggtaaagtattgagcacagggcctggcacatagaaagtgcacctcaacagtacctacctttttccatagatatgaaaaaagcggtaacacataaaacactaggacatggttactgactaattgtgggagagaaagaaaaaaagctaagtgcaaagaatcaagtctggtatgttagtttttaccaactgagatgcatccaagatgggattagacatacaagataatttatcagggaagacacctgtgagggaatgtggggcaggcatgaaggtagtatgggagaacccacagaccgctatgcagagctgattcctgtgaaaaagaaagagaaagaagttttaggtaccaatgcagttctaagagtttttgcaaggctgatgaggaatcctccaaccagtcacccattggagttaaagagagcctcggagaactagacttgctttcacacccttgctgggagcctgtgggaaagaagctttctctgtaaaggaggtagtgaatttgaaatgcgctgacctgggccttctgtcaatcaggtccctgccatggaaaccagacagagtctcattaatggctgccacaatagagacactgagaaaaagaacaggttgataccttcatgaaattcaagacaaagaagaaaaaaactcaatgttattggactaaataatcaaaaggataatgttttcataattttttattggaaaatgtgctgattcttggaatgttttattctccagatttatgaactttttttcttcagcaattggtaaagtatacttttgtaaacaaaaattgaaacatttgcttttgctctctatctgagtgccccagaattgggaaactattcatgagtattcataggtttatggtaataaagttatttgcacaagttcaaaaaaaaaaaaaaaaaacaaaaaaaaacatgtgtgttggggcgccctgggcccctgaaaaagcttttctnagaanncattgnntngggncgcgggggcccc

SEQ ID NO: 292011 - DNA, 1351 bp, Homo sapiens
tgccctactggccctacctcacagctgaaactttaaaaaacaggatgggccaccagccacctcctccaactcaacaacattctataactgataactccctgagcctcaagacacctcccgagtgtctgctcactccccttccaccctcagcggatgataatctcaagaaagaaagagaaagaaggaggaaggacagcacacctgacagccctgctcaggaagtctctggatcctaggctcatctccacaggggagaacacacagacagcagagaccatgggacccctctcagcccctccctgcactcagcacatcacctggaaggggctcctgctcacagcatcacttttaaacttctggaacctgcccaccactgcccaagtaataattgaagccaagccacccaaagtttccgaggggaaggatgttcttctacttgtccacaatttgccccagaatcttactggctacatctggtacaaagggcaaatgacggacctctaccattacattacatcatatgtagtacacggtcaaattatatatgggcctgcctacagtggacgagaaacagtatattccaatgcatccctgctgatccagaatgtcacacaggaggatgcaggatcctacaccttacacatcataaagcgaggcgatgggactggaggagtaactggatatttcactgtcaccttatactcggagactcccaagccctccatctccagcagcaacttaaaccccagggaggtcatggaggctgtgcgcttaatctgtgatcctgagactccggatgcaagctacctgtggttgctgaatggtcagaacctccctatgactcacaggttgcagctgtccaaaaccaacaggaccctctatctatttggtgtcacaaagtatattgcaggaccctatgaatgtgaaatacggaacccagtgagtgccagccgcagtgacccagtcaccctgaatctcctcccgaagctgcccatgccttacatcaccatcaacaacttaaaccccagggagaagaaggatgtgttagccttcacctgtgaacctaagagtcggaactacacctacatttggtggctaaatggtcagagcctcccggtcagtccgagggtaaagcgacccattgaaaacaggatactcattctacccagtgtcacgagaaatgaaacaggaccctatcaatgtgaaatacgggaccgatatggtggcatccgcagtaacccagtcaccctgaatgtcctctgtgagtatcctttgttcctctgtgggccaggacaccagcttaactccaaacgaccagaggccaggcctctcagtctctctccggtccaag

SEQ ID NO: 292012 - DNA, 5895 bp, Homo sapiens
  misc_feature (5864)..(5864): n is a, c, g, or t
  misc_feature (5869)..(5870): n is a, c, g, or t
  misc_feature (5876)..(5877): n is a, c, g, or t
  misc_feature (5879)..(5879): n is a, c, g, or t
  misc_feature (5883)..(5883): n is a, c, g, or t
tgccctactggccctacctcacagctgaaactttaaaaaacaggatgggccaccagccacctcctccaactcaacaacattctataactgataactccctgagcctcaagacacctcccgagtgtctgctcactccccttccaccctcagcggatgataatctcaagaaagaaagagaaagaaggaggaaggacagcacacctgacagccctgctcaggaagtctctggatcctaggctcatctccacaggggagaacacacagacagcagagaccatgggacccctctcagcccctccctgcactcagcacatcacctggaaggggctcctgctcacagcatcacttttaaacttctggaacctgcccaccactgcccaagtaataattgaagccaagccacccaaagtttccgaggggaaggatgttcttctacttgtccacaatttgccccagaatcttactggctacatctggtacaaagggcaaatgacggacctctaccattacattacatcatatgtagtacacggtcaaattatatatgggcctgcctacagtggacgagaaacagtatattccaatgcatccctgctgatccagaatgtcacacaggaggatgcaggatcctacaccttacacatcataaagcgaggcgatgggactggaggagtaactggatatttcactgtcaccttatactatggtccagacctccccagaatttacccttcattcacctattaccgttcaggagaaaacctcgacttgtcctgctttgcggactctaacccaccggcagagtattcttggacaattaatgggaagtttcagctatcaggacaaaagctctttatcccccaaattactacaaatcatagcgggctctatgcttgctctgttcgtaactcagccactggcaaggaaatctccaaatccatgatagtcaaagtctctggtaagtggatcccagcatccttggcaatagggttttaggtggagtctatctggctttcagagaagagtcaggaaaacatttgtattcccagactgtgtcccatgggcacaagcaaatcccaaattctcctcctgaaccctcccaacttatctctacagactctcttctgcttgtttttctgttttctcatggctgaccttgtgtctggcctgagaaaggtagggagggggctttatcagccctgagccctatgtggtagaagaggcttcacagagggacaagaaggagagtcctcaagatcaagttgcttctcgctgtcacgaacacatccccttctgccatgtctttgttttcttgtacctattccatgagctacaaggaacatctgaggctttgaaacaagctcacacttttcccccaaatgagaggaggaagccctttgggtgagggaggagcagctcagactctgcttcctgctctgctccgggctcctctggtgactggcctggccctgcctgactccacctggggtggaaccaacatgtgtggagaaagggccctggtggcctgtcctgaagttggctaaatcgagctgccagttgaagccaagcctcccccgggccaggctgcagggaaataagaagagagggagcttcagggctgactcctgagctgcatcctggctctgaagtcaccagctgtatgaggctttgggcacagcacgtgggacacagcacggaggacagtgactgatgcagagctagagaaatagggagattcacccctggggctctgcatggcaggaaaggggcagtgccaaaaagtgtgtaattatagagagggcaagaccacgagacactttatatatatctaatattagacttaccattaactaagtgtgcaatttagtgttgtgtaactatcacactatccatttccagaactttttcctcttaccatattaaacctctgtacccaataaacagtaactctcactccttctccccctaacccttaacacccaccattctactttctgtctctatgtaactggctattctaactatcttttataaatggaattatataataattatccttttgtgtctggcttatttcagttggcataatatcttcaaggttcatccattttgcacgatgtattgtaattttcttccttgttaaggttgaataacatttcaatgtatagatacatctcatttgcctacccacttatctttcaatggacttttcagttgtttccatttttggctagtgtgagtaatgcttctctgtacatcagtgtacaaatatttcttcaaatttctttcaattctatagggagtatgtccagaaggggaattgctggatcaaatggtaatttattgtttaattttttgaaaaacagccacactactttttacattggctataacatttcccattcccatcagcaatgcactagagctccaatttttccatctacttggaaacacctgttgtttagtgttgctgtcattgttgttgtttatcaaagccatcctaaagtgtgtgaggtgttgtaacattgtggttttgatttgcatatctctaagtattcgtgatgctgaggaactttgcatgggctatataaaaggttttgatttttatgaagtctgatttatccattttatttgttgcctatgcttttgttgttacaaccaagaaatcattgtgaaatccactatcatgaagtttttcttctaagagttgtatagtttttactcttacatttagatctttgatctattgtgggttaatttttgtacatggtgttaggtaaaggttccactcttcttgcccttggatatccacctttcccaatatcatttggtgagaacactgtcccttccccattgaacgatcttggcacactcgatgaaaatcatttggccatatatgcaagcatttctttctgggctatgatatttcattaatttctatgtcctcctttatgccagtaccacactgtattgattactggggctttgtagtaaatgctgaaatcaggaagtgtgagtcctccagcttcattcttcctcttcaaagctgtgtgtctatttagagtcatgagatgcaatataaattttaggacagatttttctttttctgcaaaaatgtcactgagattctgataggaattgtattgaatctgcagctcactttgggcagcactgtcctcctaacaatattgagtcttccaattcatgaacacaaaatgtctttcaatttattgatgtcatctttcatttctttcagcaatactttgtagatttcaggtataatcatttcacctctttggttaaacttattcctaaatattttattctttttgatgtgaatataaattgaaattatttttcttaatttcccttcagattgttcatggttagtgtattgaaatacaactgatgtttgaatgttgattttgtattgtgcaacattactgaatttattaattctaataggtttgttccatctttaggattttctacaaataagttcaagttatctataaacagaaataattttactccttccttccaatttgaatgtctttttaaaaattcttccctaatttttctgattagacctttcactactatgttgaataaaagtgtcaatagcaggcatccttgtcttttcctgctcatacagggaaagttttcagtctttctctgttatgtaagatgttagcattgggtttttcacatattgcctttatgttgaggtggttgccttccattcttagaatgtttttattatgaaaaaatactgaatttcatcaaatgcttttattgattcaatcttcttactgattatagttatattcatatttttgtgtgtttctaggagtttgtctatttcatctaggttatccaatttattggcatacaattatttatagtactttcataatcattattttattagaattggtagtaatcgcttcatttttcttttttctttttcttttaagacagagagacaggctctcactctgtaggccaccctaggatggaatacagtggtgtgattatggctcactgcagcctcaacctcctgggctcaagcaattctccttcttcagcctcccaagatgctaggactacaggtgcatgtcaacatgcccagctaattggttttttttttttttgtagagacagcatctccccaggttacctatgctggtccaaacacctggtttcaagaaatccttctgctgtgacctcccaaagtgctaggattaaaacatgacccaccatgctcagagtccattttcatttatgatttgagtaattttatcttttctctttttttcttagccaatctagttaatggttgtcaattttgttgattttattttgaagaatcaacttttggtttcagtaatttcctctattctgtttccattctccattttatttatatccaccctaatacttattatttccctcattcactgtgcttgggtttagtttgttcttctttcgtatcctgaagtattaaagtaggttgttgacctgagctctttcttcttttttaatgtaagagtttacagttataaatttcttgcacaagactcaacttctctgaacccctgattcctcacctgaaaattgcaataagagtactttcttcataccattcttttaaaggtttaatgcagtcaatgaaacaagatgccacacaaagaggaaccaatgtcagctgctatattactaccatcatcattagccttgaggtcaaatagtcctagaatcaaatctcagatccacctgtcactagccatatgacaccaggaaagtttttacaccatgctaagcttctgtcttttcatcagcaaaatggaaataatgcctacctgacagggttattgtgtggattaaatgagatacaggtaaagtattgagcacagggcctggcacatagaaagtgcacctcaacagtacctacctttttccatagatatgaaaaaagcggtaacacataaaacactaggacatggttactgactaattgtgggagagaaagaaaaaaagctaagtgcaaagaatcaagtctggtatgttagtttttaccaactgagatgcatccaagatgggattagacatacaagataatttatcagggaagacacctgtgagggaatgtggggcaggcatgaaggtagtatgggagaacccacagaccgctatgcagagctgattcctgtgaaaaagaaagagaaagaagttttaggtaccaatgcagttctaagagtttttgcaaggctgatgaggaatcctccaaccagtcacccattggagttaaagagagcctcggagaactagacttgctttcacacccttgctgggagcctgtgggaaagaagctttctctgtaaaggaggtagtgaatttgaaatgcgctgacctgggccttctgtcaatcaggtccctgccatggaaaccagacagagtctcattaatggctgccacaatagagacactgagaaaaagaacaggttgataccttcatgaaattcaagacaaagaagaaaaaaactcaatgttattggactaaataatcaaaaggataatgttttcataattttttattggaaaatgtgctgattcttggaatgttttattctccagatttatgaactttttttcttcagcaattggtaaagtatacttttgtaaacaaaaattgaaacatttgcttttgctctctatctgagtgccccagaattgggaaactattcatgagtattcataggtttatggtaataaagttatttgcacaagttcaaaaaaaaaaaaaaaaaacaaaaaaaaacatgtgtgttggggcgccctgggcccctgaaaaagcttttctnagaanncattgnntngggncgcgggggcccc

SEQ ID NO: 292013 - DNA, 1160 bp, Homo sapiens
tgccctactggccctacctcacagctgaaactttaaaaaacaggatgggccaccagccacctcctccaactcaacaacattctataactgataactccctgagcctcaagacacctcccgagtgtctgctcactccccttccaccctcagcggatgataatctcaagaaagaaagagaaagaaggaggaaggacagcacacctgacagccctgctcaggaagtctctggatcctaggctcatctccacaggggagaacacacagacagcagagaccatgggacccctctcagcccctccctgcactcagcacatcacctggaaggggctcctgctcacagcatcacttttaaacttctggaacctgcccaccactgcccaagtaataattgaagccaagccacccaaagtttccgaggggaaggatgttcttctacttgtccacaatttgccccagaatcttactggctacatctggtacaaagggcaaatgacggacctctaccattacattacatcatatgtagtacacggtcaaattatatatgggcctgcctacagtggacgagaaacagtatattccaatgcatccctgctgatccagaatgtcacacaggaggatgcaggatcctacaccttacacatcataaagcgaggcgatgggactggaggagtaactggatatttcactgtcaccttatactcggagactcccaagccctccatctccagcagcaacttaaaccccagggaggtcatggaggctgtgcgcttaatctgtgatcctgagactccggatgcaagctacctgtggttgctgaatggtcagaacctccctatgactcacaggttgcagctgtccaaaaccaacaggaccctctatctatttggtgtcacaaagtatattgcaggaccctatgaatgtgaaatacggaacccagtgagtgccagccgcagtgacccagtcaccctgaatctcctccgtgagtatcttctgttcctctgtgagccaggctgccatcccaaatacaagtggccagaggccaggcctctcagtccctctcaggtccaagtacagagacctttatccctgaacatcaaagctggccatgactttctgctccaggcaaaccagagtaggcctaggcttgatcaacaata

SEQ ID NO: 292014 - DNA, 1238 bp, Homo sapiens
tgccctactggccctacctcacagctgaaactttaaaaaacaggatgggccaccagccacctcctccaactcaacaacattctataactgataactccctgagcctcaagacacctcccgagtgtctgctcactccccttccaccctcagcggatgataatctcaagaaagaaagagaaagaaggaggaaggacagcacacctgacagccctgctcaggaagtctctggatcctaggctcatctccacaggggagaacacacagacagcagagaccatgggacccctctcagcccctccctgcactcagcacatcacctggaaggggctcctgctcacagcatcacttttaaacttctggaacctgcccaccactgcccaagtaataattgaagccaagccacccaaagtttccgaggggaaggatgttcttctacttgtccacaatttgccccagaatcttactggctacatctggtacaaagggcaaatgacggacctctaccattacattacatcatatgtagtacacggtcaaattatatatgggcctgcctacagtggacgagaaacagtatattccaatgcatccctgctgatccagaatgtcacacaggaggatgcaggatcctacaccttacacatcataaagcgaggcgatgggactggaggagtaactggatatttcactgtcaccttatactatgtgggacaactacaaaggctgtcacatacacttaacgggaatacttgtggtttggggaccagatggaggtggccagcggagactcccaagccctccatctccagcagcaacttaaaccccagggaggtcatggaggctgtgcgcttaatctgtgatcctgagactccggatgcaagctacctgtggttgctgaatggtcagaacctccctatgactcacaggttgcagctgtccaaaaccaacaggaccctctatctatttggtgtcacaaagtatattgcaggaccctatgaatgtgaaatacggaacccagtgagtgccagccgcagtgacccagtcaccctgaatctcctccgtgagtatcttctgttcctctgtgagccaggctgccatcccaaatacaagtggccagaggccaggcctctcagtccctctcaggtccaagtacagagacctttatccctgaacatcaaagctggccatgactttctgctccaggcaaaccagagtaggcctaggcttgatcaacaata

SEQ ID NO: 292015 - DNA, 940 bp, Homo sapiens
  misc_feature (537)..(537): n is a, c, g, or t
  misc_feature (549)..(549): n is a, c, g, or t
  misc_feature (551)..(551): n is a, c, g, or t
  misc_feature (557)..(557): n is a, c, g, or t
  misc_feature (561)..(561): n is a, c, g, or t
  misc_feature (565)..(565): n is a, c, g, or t
  misc_feature (568)..(568): n is a, c, g, or t
  misc_feature (594)..(594): n is a, c, g, or t
  misc_feature (598)..(598): n is a, c, g, or t
  misc_feature (612)..(612): n is a, c, g, or t
  misc_feature (619)..(619): n is a, c, g, or t
  misc_feature (630)..(630): n is a, c, g, or t
  misc_feature (637)..(637): n is a, c, g, or t
  misc_feature (644)..(645): n is a, c, g, or t
  misc_feature (649)..(649): n is a, c, g, or t
  misc_feature (651)..(651): n is a, c, g, or t
  misc_feature (668)..(668): n is a, c, g, or t
  misc_feature (672)..(673): n is a, c, g, or t
  misc_feature (689)..(689): n is a, c, g, or t
  misc_feature (691)..(692): n is a, c, g, or t
  misc_feature (714)..(715): n is a, c, g, or t
  misc_feature (720)..(720): n is a, c, g, or t
  misc_feature (723)..(723): n is a, c, g, or t
  misc_feature (740)..(740): n is a, c, g, or t
  misc_feature (748)..(748): n is a, c, g, or t
  misc_feature (755)..(755): n is a, c, g, or t
  misc_feature (757)..(757): n is a, c, g, or t
  misc_feature (822)..(822): n is a, c, g, or t
  misc_feature (827)..(827): n is a, c, g, or t
  misc_feature (831)..(831): n is a, c, g, or t
  misc_feature (840)..(841): n is a, c, g, or t
  misc_feature (850)..(850): n is a, c, g, or t
  misc_feature (856)..(857): n is a, c, g, or t
  misc_feature (901)..(901): n is a, c, g, or t
tgccctactggccctacctcacagctgaaactttaaaaaacaggatgggccaccagccacctcctccaactcaacaacattctataactgataactccctgagcctcaagacacctcccgagtgtctgctcactccccttccaccctcagcggatgataatctcaagaaagaaagagaaagaaggaggaaggacagcacacctgacagccctgctcaggaagtctctggatcctaggctcatctccacaggggagaacacacagacagcagagaccatgggacccctctcagcccctccctgcactcagcacatcacctggaaggggctcctgctcacagcatcacttttaaacttctggaacctgcccaccactgcccaagtaataattgaagccaagccacccaaagtttccgaggggaaggatgttcttctacttgtccacaatttgccccagaatcttactggctacatctggtacaaagggcaaatgacggacctctaccattacattacatcatatgtagtacacggtcancttcttacttgngnatgatnaaantcgnaangcggacacccgtctaaacaggaccangcgngggagggttccggnccccttngacaaacaatngtcggangaacggnncgcngnaacgtcgcagtcccccngttnntgtctttttcgttttntnntttccgttttctcttttgcgtnnggcgnttnctcgagtttctcgtggncctgaggnggctagngnttgctagccgttcccggggactttcttttgcattattagttttgttgtacctgttttgcaagttnctcgnggtncatgcctgnnggatatttntgttcnnttagctccggtgggacttcgtgcactttttgctgttaggccccngccgcttagggagtctgtcattttttagcgcccttctca

SEQ ID NO: 292016 - DNA, 639 bp, Homo sapiens
  misc_feature (466)..(466): n is a, c, g, or t
  misc_feature (470)..(470): n is a, c, g, or t
  misc_feature (480)..(480): n is a, c, g, or t
  misc_feature (488)..(488): n is a, c, g, or t
  misc_feature (494)..(494): n is a, c, g, or t
  misc_feature (608)..(608): n is a, c, g, or t
  misc_feature (613)..(614): n is a, c, g, or t
  misc_feature (620)..(621): n is a, c, g, or t
  misc_feature (623)..(623): n is a, c, g, or t
  misc_feature (627)..(627): n is a, c, g, or t
aggacttcttcctctccttaatccaacatagcagctgtgatgtcatttctgtatttcaggaagactggcaggagatttatggaaaggtctcttacaaggactcttgaatacaagctcctgataacttcaagatcataccactggactaagaactttcaaaattttaatgaacaggttgataccttcatgaaattcaagacaaagaagaaaaaaactcaatgttattggactaaataatcaaaaggataatgttttcataattttttattggaaaatgtgctgattcttggaatgttttattctccagatttatgaactttttttcttcagcaattggtaaagtatacttttgtaaacaaaaattgaaacatttgcttttgctctctatctgagtgccccagaattgggaaactattcatgagtattcataggtttatggtaataaagttatttgcacaagttcaanaaanaaaaaaaaanaaaaaaanaaaaanaaaaaaaaaaaaaaaaaaaaaaaaaaaaaaaaaaaaaaaaaaaaaaaaaaaaaaaaaaaaacaaaaaaaaacatgtgtgttggggcgccctgggcccctgaaaaagcttttctnagaanncattgnntngggncgcgggggcccc

SEQ ID NO: 292017 - DNA, 867 bp, Homo sapiens
gagcacagaaggaggaaggacagcacatcacctggaaggggctcctgcatcacttttaaacttctggaacctgcccaccactgcccaagtaataattgaagccaagccacccaaagtttccgaggggaaggatgttcttctacttgtccacaatttgccccagaatcttactggctacatctggtacaaagggcaaatgacggacctctaccattacattacatcatatgtagtacacggtcaaattatatatgggcctgcctacagtggacgagaaacagtatattccaatgcatccctgctgatccagaatgtcacacaggaggatgcaggatcctacaccttacacatcataaagcgaggcgatgggactggaggagtaactggatatttcactgtcaccttatactcggagactcccaagccctccatctccagcagcaacttaaaccccagggaggtcatggaggctgtgcgcttaatctgtgatcctgagactccggatgcaagctacctgtggttgctgaatggtcagaacctccctatgactcacaggttgcagctgtccaaaaccaacaggaccctctatctatttggtgtcacaaagtatattgcaggaccctatgaatgtgaaatacggaacccagtgagtgccagccgcagtgacccagtcaccctgaatctcctccgtgagtatcttctgttcctctgtgagccaggctgccatcccaaatacaagtggccagaggccaggcctctcagtccctctcaggtccaagtacagagacctttatccctgaacatcaaagctggccatgactttctgctccaggcaaaccagagtaggcctaggcttgatcaacaata

SEQ ID NO: 292018 - DNA, 178 bp, Homo sapiens
agaggtgggaccacggggtttatcgattacacaacaggaccctctatctatttggtgtcacaaagtatattgcaggaccctatgaatgtgaaatacggaacccagtgagtgccagccgcagtgacccagtcaccctgaatctcctcccgaagctgcccgtgtcaaacctctcggtccg

SEQ ID NO: 292019 - DNA, 1978 bp, Homo sapiens
  misc_feature (1947)..(1947): n is a, c, g, or t
  misc_feature (1952)..(1953): n is a, c, g, or t
  misc_feature (1959)..(1960): n is a, c, g, or t
  misc_feature (1962)..(1962): n is a, c, g, or t
  misc_feature (1966)..(1966): n is a, c, g, or t
tgccctactggccctacctcacagctgaaactttaaaaaacaggatgggccaccagccacctcctccaactcaacaacattctataactgataactccctgagcctcaagacacctcccgagtgtctgctcactccccttccaccctcagcggatgataatctcaagaaagaaagagaaagaaggaggaaggacagcacacctgacagccctgctcaggaagtctctggatcctaggctcatctccacaggggagaacacacagacagcagagaccatgggacccctctcagcccctccctgcactcagcacatcacctggaaggggctcctgctcacagcatcacttttaaacttctggaacctgcccaccactgcccaagtaataattgaagccaagccacccaaagtttccgaggggaaggatgttcttctacttgtccacaatttgccccagaatcttactggctacatctggtacaaagggcaaatgacggacctctaccattacattacatcatatgtagtacacggtcaaattatatatgggcctgcctacagtggacgagaaacagtatattccaatgcatccctgctgatccagaatgtcacacaggaggatgcaggatcctacaccttacacatcataaagcgaggcgatgggactggaggagtaactggatatttcactgtcaccttatactcggagactcccaagccctccatctccagcagcaacttaaaccccagggaggtcatggaggctgtgcgcttaatctgtgatcctgagactccggatgcaagctacctgtggttgctgaatggtcagaacctccctatgactcacaggttgcagctgtccaaaaccaacaggaccctctatctatttggtgtcacaaagtatattgcaggaccctatgaatgtgaaatacggaacccagtgagtgccagccgcagtgacccagtcaccctgaatctcctcccgaagctgcccatgccttacatcaccatcaacaacttaaaccccagggagaagaaggatgtgttagccttcacctgtgaacctaagagtcggaactacacctacatttggtggctaaatggtcagagcctcccggtcagtccgagggtaaagcgacccattgaaaacaggatactcattctacccagtgtcacgagaaatgaaacaggaccctatcaatgtgaaatacgggaccgatatggtggcatccgcagtaacccagtcaccctgaatgtcctctatggtccagacctccccagaatttacccttcattcacctattaccgttcaggagaaaacctcgacttgtcctgctttgcggactctaacccaccggcagagtattcttggacaattaatgggaagtttcagctatcaggacaaaagctctttatcccccaaattactacaaatcatagcgggctctatgcttgctctgttcgtaactcagccactggcaaggaaatctccaaatccatgatagtcaaagtctctggtccctgccatggaaaccagacagagtctcattaatggctgccacaatagagacactgagaaaaagaacaggttgataccttcatgaaattcaagacaaagaagaaaaaaactcaatgttattggactaaataatcaaaaggataatgttttcataattttttattggaaaatgtgctgattcttggaatgttttattctccagatttatgaactttttttcttcagcaattggtaaagtatacttttgtaaacaaaaattgaaacatttgcttttgctctctatctgagtgccccagaattgggaaactattcatgagtattcataggtttatggtaataaagttatttgcacaagttcaaaaaaaaaaaaaaaaaacaaaaaaaaacatgtgtgttggggcgccctgggcccctgaaaaagcttttctnagaanncattgnntngggncgcgggggcccc

SEQ ID NO: 292020 - DNA, 2052 bp, Homo sapiens
  misc_feature (1879)..(1879): n is a, c, g, or t
  misc_feature (1883)..(1883): n is a, c, g, or t
  misc_feature (1893)..(1893): n is a, c, g, or t
  misc_feature (1901)..(1901): n is a, c, g, or t
  misc_feature (1907)..(1907): n is a, c, g, or t
  misc_feature (2021)..(2021): n is a, c, g, or t
  misc_feature (2026)..(2027): n is a, c, g, or t
  misc_feature (2033)..(2034): n is a, c, g, or t
  misc_feature (2036)..(2036): n is a, c, g, or t
  misc_feature (2040)..(2040): n is a, c, g, or t
tgccctactggccctacctcacagctgaaactttaaaaaacaggatgggccaccagccacctcctccaactcaacaacattctataactgataactccctgagcctcaagacacctcccgagtgtctgctcactccccttccaccctcagcggatgataatctcaagaaagaaagagaaagaaggaggaaggacagcacacctgacagccctgctcaggaagtctctggatcctaggctcatctccacaggggagaacacacagacagcagagaccatgggacccctctcagcccctccctgcactcagcacatcacctggaaggggctcctgctcacagcatcacttttaaacttctggaacctgcccaccactgcccaagtaataattgaagccaagccacccaaagtttccgaggggaaggatgttcttctacttgtccacaatttgccccagaatcttactggctacatctggtacaaagggcaaatgacggacctctaccattacattacatcatatgtagtacacggtcaaattatatatgggcctgcctacagtggacgagaaacagtatattccaatgcatccctgctgatccagaatgtcacacaggaggatgcaggatcctacaccttacacatcataaagcgaggcgatgggactggaggagtaactggatatttcactgtcaccttatactcggagactcccaagccctccatctccagcagcaacttaaaccccagggaggtcatggaggctgtgcgcttaatctgtgatcctgagactccggatgcaagctacctgtggttgctgaatggtcagaacctccctatgactcacaggttgcagctgtccaaaaccaacaggaccctctatctatttggtgtcacaaagtatattgcaggaccctatgaatgtgaaatacggaacccagtgagtgccagccgcagtgacccagtcaccctgaatctcctcccgaagctgcccatgccttacatcaccatcaacaacttaaaccccagggagaagaaggatgtgttagccttcacctgtgaacctaagagtcggaactacacctacatttggtggctaaatggtcagagcctcccggtcagtccgagggtaaagcgacccattgaaaacaggatactcattctacccagtgtcacgagaaatgaaacaggaccctatcaatgtgaaatacgggaccgatatggtggcatccgcagtaacccagtcaccctgaatgtcctctatggtccagacctccccagaatttacccttcattcacctattaccgttcaggagaaaacctcgacttgtcctgctttgcggactctaacccaccggcagagtattcttggacaattaatgggaagtttcagctatcaggacaaaagctctttatcccccaaattactacaaatcatagcgggctctatgcttgctctgttcgtaactcagccactggcaaggaaatctccaaatccatgatagtcaaagtctctggtccctgccatggaaaccagacagagtctcattaatggctgccacaatagagacactgagaaaaagaacaggttgataccttcatgaaattcaagacaaagaagaaaaaaactcaatgttattggactaaataatcaaaaggataatgttttcataattttttattggaaaatgtgctgattcttggaatgttttattctccagatttatgaactttttttcttcagcaattggtaaagtatacttttgtaaacaaaaattgaaacatttgcttttgctctctatctgagtgccccagaattgggaaactattcatgagtattcataggtttatggtaataaagttatttgcacaagttcaanaaanaaaaaaaaanaaaaaaanaaaaanaaaaaaaaaaaaaaaaaaaaaaaaaaaaaaaaaaaaaaaaaaaaaaaaaaaaaaaaaaaaacaaaaaaaaacatgtgtgttggggcgccctgggcccctgaaaaagcttttctnagaanncattgnntngggncgcgggggcccc

SEQ ID NO: 292021 - DNA, 6453 bp, Homo sapiens
  misc_feature (6422)..(6422): n is a, c, g, or t
  misc_feature (6427)..(6428): n is a, c, g, or t
  misc_feature (6434)..(6435): n is a, c, g, or t
  misc_feature (6437)..(6437): n is a, c, g, or t
  misc_feature (6441)..(6441): n is a, c, g, or t
tgccctactggccctacctcacagctgaaactttaaaaaacaggatgggccaccagccacctcctccaactcaacaacattctataactgataactccctgagcctcaagacacctcccgagtgtctgctcactccccttccaccctcagcggatgataatctcaagaaagaaagagaaagaaggaggaaggacagcacacctgacagccctgctcaggaagtctctggatcctaggctcatctccacaggggagaacacacagacagcagagaccatgggacccctctcagcccctccctgcactcagcacatcacctggaaggggctcctgctcacagcatcacttttaaacttctggaacctgcccaccactgcccaagtaataattgaagccaagccacccaaagtttccgaggggaaggatgttcttctacttgtccacaatttgccccagaatcttactggctacatctggtacaaagggcaaatgacggacctctaccattacattacatcatatgtagtacacggtcaaattatatatgggcctgcctacagtggacgagaaacagtatattccaatgcatccctgctgatccagaatgtcacacaggaggatgcaggatcctacaccttacacatcataaagcgaggcgatgggactggaggagtaactggatatttcactgtcaccttatactcggagactcccaagccctccatctccagcagcaacttaaaccccagggaggtcatggaggctgtgcgcttaatctgtgatcctgagactccggatgcaagctacctgtggttgctgaatggtcagaacctccctatgactcacaggttgcagctgtccaaaaccaacaggaccctctatctatttggtgtcacaaagtatattgcaggaccctatgaatgtgaaatacggaacccagtgagtgccagccgcagtgacccagtcaccctgaatctcctcccgaagctgcccatgccttacatcaccatcaacaacttaaaccccagggagaagaaggatgtgttagccttcacctgtgaacctaagagtcggaactacacctacatttggtggctaaatggtcagagcctcccggtcagtccgagggtaaagcgacccattgaaaacaggatactcattctacccagtgtcacgagaaatgaaacaggaccctatcaatgtgaaatacgggaccgatatggtggcatccgcagtaacccagtcaccctgaatgtcctctatggtccagacctccccagaatttacccttcattcacctattaccgttcaggagaaaacctcgacttgtcctgctttgcggactctaacccaccggcagagtattcttggacaattaatgggaagtttcagctatcaggacaaaagctctttatcccccaaattactacaaatcatagcgggctctatgcttgctctgttcgtaactcagccactggcaaggaaatctccaaatccatgatagtcaaagtctctggtaagtggatcccagcatccttggcaatagggttttaggtggagtctatctggctttcagagaagagtcaggaaaacatttgtattcccagactgtgtcccatgggcacaagcaaatcccaaattctcctcctgaaccctcccaacttatctctacagactctcttctgcttgtttttctgttttctcatggctgaccttgtgtctggcctgagaaaggtagggagggggctttatcagccctgagccctatgtggtagaagaggcttcacagagggacaagaaggagagtcctcaagatcaagttgcttctcgctgtcacgaacacatccccttctgccatgtctttgttttcttgtacctattccatgagctacaaggaacatctgaggctttgaaacaagctcacacttttcccccaaatgagaggaggaagccctttgggtgagggaggagcagctcagactctgcttcctgctctgctccgggctcctctggtgactggcctggccctgcctgactccacctggggtggaaccaacatgtgtggagaaagggccctggtggcctgtcctgaagttggctaaatcgagctgccagttgaagccaagcctcccccgggccaggctgcagggaaataagaagagagggagcttcagggctgactcctgagctgcatcctggctctgaagtcaccagctgtatgaggctttgggcacagcacgtgggacacagcacggaggacagtgactgatgcagagctagagaaatagggagattcacccctggggctctgcatggcaggaaaggggcagtgccaaaaagtgtgtaattatagagagggcaagaccacgagacactttatatatatctaatattagacttaccattaactaagtgtgcaatttagtgttgtgtaactatcacactatccatttccagaactttttcctcttaccatattaaacctctgtacccaataaacagtaactctcactccttctccccctaacccttaacacccaccattctactttctgtctctatgtaactggctattctaactatcttttataaatggaattatataataattatccttttgtgtctggcttatttcagttggcataatatcttcaaggttcatccattttgcacgatgtattgtaattttcttccttgttaaggttgaataacatttcaatgtatagatacatctcatttgcctacccacttatctttcaatggacttttcagttgtttccatttttggctagtgtgagtaatgcttctctgtacatcagtgtacaaatatttcttcaaatttctttcaattctatagggagtatgtccagaaggggaattgctggatcaaatggtaatttattgtttaattttttgaaaaacagccacactactttttacattggctataacatttcccattcccatcagcaatgcactagagctccaatttttccatctacttggaaacacctgttgtttagtgttgctgtcattgttgttgtttatcaaagccatcctaaagtgtgtgaggtgttgtaacattgtggttttgatttgcatatctctaagtattcgtgatgctgaggaactttgcatgggctatataaaaggttttgatttttatgaagtctgatttatccattttatttgttgcctatgcttttgttgttacaaccaagaaatcattgtgaaatccactatcatgaagtttttcttctaagagttgtatagtttttactcttacatttagatctttgatctattgtgggttaatttttgtacatggtgttaggtaaaggttccactcttcttgcccttggatatccacctttcccaatatcatttggtgagaacactgtcccttccccattgaacgatcttggcacactcgatgaaaatcatttggccatatatgcaagcatttctttctgggctatgatatttcattaatttctatgtcctcctttatgccagtaccacactgtattgattactggggctttgtagtaaatgctgaaatcaggaagtgtgagtcctccagcttcattcttcctcttcaaagctgtgtgtctatttagagtcatgagatgcaatataaattttaggacagatttttctttttctgcaaaaatgtcactgagattctgataggaattgtattgaatctgcagctcactttgggcagcactgtcctcctaacaatattgagtcttccaattcatgaacacaaaatgtctttcaatttattgatgtcatctttcatttctttcagcaatactttgtagatttcaggtataatcatttcacctctttggttaaacttattcctaaatattttattctttttgatgtgaatataaattgaaattatttttcttaatttcccttcagattgttcatggttagtgtattgaaatacaactgatgtttgaatgttgattttgtattgtgcaacattactgaatttattaattctaataggtttgttccatctttaggattttctacaaataagttcaagttatctataaacagaaataattttactccttccttccaatttgaatgtctttttaaaaattcttccctaatttttctgattagacctttcactactatgttgaataaaagtgtcaatagcaggcatccttgtcttttcctgctcatacagggaaagttttcagtctttctctgttatgtaagatgttagcattgggtttttcacatattgcctttatgttgaggtggttgccttccattcttagaatgtttttattatgaaaaaatactgaatttcatcaaatgcttttattgattcaatcttcttactgattatagttatattcatatttttgtgtgtttctaggagtttgtctatttcatctaggttatccaatttattggcatacaattatttatagtactttcataatcattattttattagaattggtagtaatcgcttcatttttcttttttctttttcttttaagacagagagacaggctctcactctgtaggccaccctaggatggaatacagtggtgtgattatggctcactgcagcctcaacctcctgggctcaagcaattctccttcttcagcctcccaagatgctaggactacaggtgcatgtcaacatgcccagctaattggttttttttttttttgtagagacagcatctccccaggttacctatgctggtccaaacacctggtttcaagaaatccttctgctgtgacctcccaaagtgctaggattaaaacatgacccaccatgctcagagtccattttcatttatgatttgagtaattttatcttttctctttttttcttagccaatctagttaatggttgtcaattttgttgattttattttgaagaatcaacttttggtttcagtaatttcctctattctgtttccattctccattttatttatatccaccctaatacttattatttccctcattcactgtgcttgggtttagtttgttcttctttcgtatcctgaagtattaaagtaggttgttgacctgagctctttcttcttttttaatgtaagagtttacagttataaatttcttgcacaagactcaacttctctgaacccctgattcctcacctgaaaattgcaataagagtactttcttcataccattcttttaaaggtttaatgcagtcaatgaaacaagatgccacacaaagaggaaccaatgtcagctgctatattactaccatcatcattagccttgaggtcaaatagtcctagaatcaaatctcagatccacctgtcactagccatatgacaccaggaaagtttttacaccatgctaagcttctgtcttttcatcagcaaaatggaaataatgcctacctgacagggttattgtgtggattaaatgagatacaggtaaagtattgagcacagggcctggcacatagaaagtgcacctcaacagtacctacctttttccatagatatgaaaaaagcggtaacacataaaacactaggacatggttactgactaattgtgggagagaaagaaaaaaagctaagtgcaaagaatcaagtctggtatgttagtttttaccaactgagatgcatccaagatgggattagacatacaagataatttatcagggaagacacctgtgagggaatgtggggcaggcatgaaggtagtatgggagaacccacagaccgctatgcagagctgattcctgtgaaaaagaaagagaaagaagttttaggtaccaatgcagttctaagagtttttgcaaggctgatgaggaatcctccaaccagtcacccattggagttaaagagagcctcggagaactagacttgctttcacacccttgctgggagcctgtgggaaagaagctttctctgtaaaggaggtagtgaatttgaaatgcgctgacctgggccttctgtcaatcaggtccctgccatggaaaccagacagagtctcattaatggctgccacaatagagacactgagaaaaagaacaggttgataccttcatgaaattcaagacaaagaagaaaaaaactcaatgttattggactaaataatcaaaaggataatgttttcataattttttattggaaaatgtgctgattcttggaatgttttattctccagatttatgaactttttttcttcagcaattggtaaagtatacttttgtaaacaaaaattgaaacatttgcttttgctctctatctgagtgccccagaattgggaaactattcatgagtattcataggtttatggtaataaagttatttgcacaagttcaaaaaaaaaaaaaaaaaacaaaaaaaaacatgtgtgttggggcgccctgggcccctgaaaaagcttttctnagaanncattgnntngggncgcgggggcccc

SEQ ID NO: 292022 - DNA, 6536 bp, Homo sapiens
  misc_feature (6505)..(6505): n is a, c, g, or t
  misc_feature (6510)..(6511): n is a, c, g, or t
  misc_feature (6517)..(6518): n is a, c, g, or t
  misc_feature (6520)..(6520): n is a, c, g, or t
  misc_feature (6524)..(6524): n is a, c, g, or t
tgccctactggccctacctcacagctgaaactttaaaaaacaggatgggccaccagccacctcctccaactcaacaacattctataactgataactccctgagcctcaagacacctcccgagtgtctgctcactccccttccaccctcagcggatgataatctcaagaaagaaagagaaagaaggaggaaggacagcacacctgacagccctgctcaggaagtctctggatcctaggctcatctccacaggggagaacacacagacagcagagaccatgggacccctctcagcccctccctgcactcagcacatcacctggaaggggctcctgctcacagcatcacttttaaacttctggaacctgcccaccactgcccaagtaataattgaagccaagccacccaaagtttccgaggggaaggatgttcttctacttgtccacaatttgccccagaatcttactggctacatctggtacaaagggcaaatgacggacctctaccattacattacatcatatgtagtacacggtcaaattatatatgggcctgcctacagtggacgagaaacagtatattccaatgcatccctgctgatccagaatgtcacacaggaggatgcaggatcctacaccttacacatcataaagcgaggcgatgggactggaggagtaactggatatttcactgtcaccttatactcggagactcccaagccctccatctccagcagcaacttaaaccccagggaggtcatggaggctgtgcgcttaatctgtgatcctgagactccggatgcaagctacctgtggttgctgaatggtcagaacctccctatgactcacaggttgcagctgtccaaaaccaacaggaccctctatctatttggtgtcacaaagtatattgcaggaccctatgaatgtgaaatacggaacccagtgagtgccagccgcagtgacccagtcaccctgaatctcctccgtgggagatgccaactctgaatgaaggatgcctgtggaggaatcaaaggtgccacacaggacaatcttctgttatccacacagcgaagctgcccatgccttacatcaccatcaacaacttaaaccccagggagaagaaggatgtgttagccttcacctgtgaacctaagagtcggaactacacctacatttggtggctaaatggtcagagcctcccggtcagtccgagggtaaagcgacccattgaaaacaggatactcattctacccagtgtcacgagaaatgaaacaggaccctatcaatgtgaaatacgggaccgatatggtggcatccgcagtaacccagtcaccctgaatgtcctctatggtccagacctccccagaatttacccttcattcacctattaccgttcaggagaaaacctcgacttgtcctgctttgcggactctaacccaccggcagagtattcttggacaattaatgggaagtttcagctatcaggacaaaagctctttatcccccaaattactacaaatcatagcgggctctatgcttgctctgttcgtaactcagccactggcaaggaaatctccaaatccatgatagtcaaagtctctggtaagtggatcccagcatccttggcaatagggttttaggtggagtctatctggctttcagagaagagtcaggaaaacatttgtattcccagactgtgtcccatgggcacaagcaaatcccaaattctcctcctgaaccctcccaacttatctctacagactctcttctgcttgtttttctgttttctcatggctgaccttgtgtctggcctgagaaaggtagggagggggctttatcagccctgagccctatgtggtagaagaggcttcacagagggacaagaaggagagtcctcaagatcaagttgcttctcgctgtcacgaacacatccccttctgccatgtctttgttttcttgtacctattccatgagctacaaggaacatctgaggctttgaaacaagctcacacttttcccccaaatgagaggaggaagccctttgggtgagggaggagcagctcagactctgcttcctgctctgctccgggctcctctggtgactggcctggccctgcctgactccacctggggtggaaccaacatgtgtggagaaagggccctggtggcctgtcctgaagttggctaaatcgagctgccagttgaagccaagcctcccccgggccaggctgcagggaaataagaagagagggagcttcagggctgactcctgagctgcatcctggctctgaagtcaccagctgtatgaggctttgggcacagcacgtgggacacagcacggaggacagtgactgatgcagagctagagaaatagggagattcacccctggggctctgcatggcaggaaaggggcagtgccaaaaagtgtgtaattatagagagggcaagaccacgagacactttatatatatctaatattagacttaccattaactaagtgtgcaatttagtgttgtgtaactatcacactatccatttccagaactttttcctcttaccatattaaacctctgtacccaataaacagtaactctcactccttctccccctaacccttaacacccaccattctactttctgtctctatgtaactggctattctaactatcttttataaatggaattatataataattatccttttgtgtctggcttatttcagttggcataatatcttcaaggttcatccattttgcacgatgtattgtaattttcttccttgttaaggttgaataacatttcaatgtatagatacatctcatttgcctacccacttatctttcaatggacttttcagttgtttccatttttggctagtgtgagtaatgcttctctgtacatcagtgtacaaatatttcttcaaatttctttcaattctatagggagtatgtccagaaggggaattgctggatcaaatggtaatttattgtttaattttttgaaaaacagccacactactttttacattggctataacatttcccattcccatcagcaatgcactagagctccaatttttccatctacttggaaacacctgttgtttagtgttgctgtcattgttgttgtttatcaaagccatcctaaagtgtgtgaggtgttgtaacattgtggttttgatttgcatatctctaagtattcgtgatgctgaggaactttgcatgggctatataaaaggttttgatttttatgaagtctgatttatccattttatttgttgcctatgcttttgttgttacaaccaagaaatcattgtgaaatccactatcatgaagtttttcttctaagagttgtatagtttttactcttacatttagatctttgatctattgtgggttaatttttgtacatggtgttaggtaaaggttccactcttcttgcccttggatatccacctttcccaatatcatttggtgagaacactgtcccttccccattgaacgatcttggcacactcgatgaaaatcatttggccatatatgcaagcatttctttctgggctatgatatttcattaatttctatgtcctcctttatgccagtaccacactgtattgattactggggctttgtagtaaatgctgaaatcaggaagtgtgagtcctccagcttcattcttcctcttcaaagctgtgtgtctatttagagtcatgagatgcaatataaattttaggacagatttttctttttctgcaaaaatgtcactgagattctgataggaattgtattgaatctgcagctcactttgggcagcactgtcctcctaacaatattgagtcttccaattcatgaacacaaaatgtctttcaatttattgatgtcatctttcatttctttcagcaatactttgtagatttcaggtataatcatttcacctctttggttaaacttattcctaaatattttattctttttgatgtgaatataaattgaaattatttttcttaatttcccttcagattgttcatggttagtgtattgaaatacaactgatgtttgaatgttgattttgtattgtgcaacattactgaatttattaattctaataggtttgttccatctttaggattttctacaaataagttcaagttatctataaacagaaataattttactccttccttccaatttgaatgtctttttaaaaattcttccctaatttttctgattagacctttcactactatgttgaataaaagtgtcaatagcaggcatccttgtcttttcctgctcatacagggaaagttttcagtctttctctgttatgtaagatgttagcattgggtttttcacatattgcctttatgttgaggtggttgccttccattcttagaatgtttttattatgaaaaaatactgaatttcatcaaatgcttttattgattcaatcttcttactgattatagttatattcatatttttgtgtgtttctaggagtttgtctatttcatctaggttatccaatttattggcatacaattatttatagtactttcataatcattattttattagaattggtagtaatcgcttcatttttcttttttctttttcttttaagacagagagacaggctctcactctgtaggccaccctaggatggaatacagtggtgtgattatggctcactgcagcctcaacctcctgggctcaagcaattctccttcttcagcctcccaagatgctaggactacaggtgcatgtcaacatgcccagctaattggttttttttttttttgtagagacagcatctccccaggttacctatgctggtccaaacacctggtttcaagaaatccttctgctgtgacctcccaaagtgctaggattaaaacatgacccaccatgctcagagtccattttcatttatgatttgagtaattttatcttttctctttttttcttagccaatctagttaatggttgtcaattttgttgattttattttgaagaatcaacttttggtttcagtaatttcctctattctgtttccattctccattttatttatatccaccctaatacttattatttccctcattcactgtgcttgggtttagtttgttcttctttcgtatcctgaagtattaaagtaggttgttgacctgagctctttcttcttttttaatgtaagagtttacagttataaatttcttgcacaagactcaacttctctgaacccctgattcctcacctgaaaattgcaataagagtactttcttcataccattcttttaaaggtttaatgcagtcaatgaaacaagatgccacacaaagaggaaccaatgtcagctgctatattactaccatcatcattagccttgaggtcaaatagtcctagaatcaaatctcagatccacctgtcactagccatatgacaccaggaaagtttttacaccatgctaagcttctgtcttttcatcagcaaaatggaaataatgcctacctgacagggttattgtgtggattaaatgagatacaggtaaagtattgagcacagggcctggcacatagaaagtgcacctcaacagtacctacctttttccatagatatgaaaaaagcggtaacacataaaacactaggacatggttactgactaattgtgggagagaaagaaaaaaagctaagtgcaaagaatcaagtctggtatgttagtttttaccaactgagatgcatccaagatgggattagacatacaagataatttatcagggaagacacctgtgagggaatgtggggcaggcatgaaggtagtatgggagaacccacagaccgctatgcagagctgattcctgtgaaaaagaaagagaaagaagttttaggtaccaatgcagttctaagagtttttgcaaggctgatgaggaatcctccaaccagtcacccattggagttaaagagagcctcggagaactagacttgctttcacacccttgctgggagcctgtgggaaagaagctttctctgtaaaggaggtagtgaatttgaaatgcgctgacctgggccttctgtcaatcaggtccctgccatggaaaccagacagagtctcattaatggctgccacaatagagacactgagaaaaagaacaggttgataccttcatgaaattcaagacaaagaagaaaaaaactcaatgttattggactaaataatcaaaaggataatgttttcataattttttattggaaaatgtgctgattcttggaatgttttattctccagatttatgaactttttttcttcagcaattggtaaagtatacttttgtaaacaaaaattgaaacatttgcttttgctctctatctgagtgccccagaattgggaaactattcatgagtattcataggtttatggtaataaagttatttgcacaagttcaaaaaaaaaaaaaaaaaacaaaaaaaaacatgtgtgttggggcgccctgggcccctgaaaaagcttttctnagaanncattgnntngggncgcgggggcccc

SEQ ID NO: 292023 - DNA, 6531 bp, Homo sapiens
  misc_feature (6500)..(6500): n is a, c, g, or t
  misc_feature (6505)..(6506): n is a, c, g, or t
  misc_feature (6512)..(6513): n is a, c, g, or t
  misc_feature (6515)..(6515): n is a, c, g, or t
  misc_feature (6519)..(6519): n is a, c, g, or t
tgccctactggccctacctcacagctgaaactttaaaaaacaggatgggccaccagccacctcctccaactcaacaacattctataactgataactccctgagcctcaagacacctcccgagtgtctgctcactccccttccaccctcagcggatgataatctcaagaaagaaagagaaagaaggaggaaggacagcacacctgacagccctgctcaggaagtctctggatcctaggctcatctccacaggggagaacacacagacagcagagaccatgggacccctctcagcccctccctgcactcagcacatcacctggaaggggctcctgctcacagcatcacttttaaacttctggaacctgcccaccactgcccaagtaataattgaagccaagccacccaaagtttccgaggggaaggatgttcttctacttgtccacaatttgccccagaatcttactggctacatctggtacaaagggcaaatgacggacctctaccattacattacatcatatgtagtacacggtcaaattatatatgggcctgcctacagtggacgagaaacagtatattccaatgcatccctgctgatccagaatgtcacacaggaggatgcaggatcctacaccttacacatcataaagcgaggcgatgggactggaggagtaactggatatttcactgtcaccttatactatgtgggacaactacaaaggctgtcacatacacttaacgggaatacttgtggtttggggaccagatggaggtggccagcggagactcccaagccctccatctccagcagcaacttaaaccccagggaggtcatggaggctgtgcgcttaatctgtgatcctgagactccggatgcaagctacctgtggttgctgaatggtcagaacctccctatgactcacaggttgcagctgtccaaaaccaacaggaccctctatctatttggtgtcacaaagtatattgcaggaccctatgaatgtgaaatacggaacccagtgagtgccagccgcagtgacccagtcaccctgaatctcctcccgaagctgcccatgccttacatcaccatcaacaacttaaaccccagggagaagaaggatgtgttagccttcacctgtgaacctaagagtcggaactacacctacatttggtggctaaatggtcagagcctcccggtcagtccgagggtaaagcgacccattgaaaacaggatactcattctacccagtgtcacgagaaatgaaacaggaccctatcaatgtgaaatacgggaccgatatggtggcatccgcagtaacccagtcaccctgaatgtcctctatggtccagacctccccagaatttacccttcattcacctattaccgttcaggagaaaacctcgacttgtcctgctttgcggactctaacccaccggcagagtattcttggacaattaatgggaagtttcagctatcaggacaaaagctctttatcccccaaattactacaaatcatagcgggctctatgcttgctctgttcgtaactcagccactggcaaggaaatctccaaatccatgatagtcaaagtctctggtaagtggatcccagcatccttggcaatagggttttaggtggagtctatctggctttcagagaagagtcaggaaaacatttgtattcccagactgtgtcccatgggcacaagcaaatcccaaattctcctcctgaaccctcccaacttatctctacagactctcttctgcttgtttttctgttttctcatggctgaccttgtgtctggcctgagaaaggtagggagggggctttatcagccctgagccctatgtggtagaagaggcttcacagagggacaagaaggagagtcctcaagatcaagttgcttctcgctgtcacgaacacatccccttctgccatgtctttgttttcttgtacctattccatgagctacaaggaacatctgaggctttgaaacaagctcacacttttcccccaaatgagaggaggaagccctttgggtgagggaggagcagctcagactctgcttcctgctctgctccgggctcctctggtgactggcctggccctgcctgactccacctggggtggaaccaacatgtgtggagaaagggccctggtggcctgtcctgaagttggctaaatcgagctgccagttgaagccaagcctcccccgggccaggctgcagggaaataagaagagagggagcttcagggctgactcctgagctgcatcctggctctgaagtcaccagctgtatgaggctttgggcacagcacgtgggacacagcacggaggacagtgactgatgcagagctagagaaatagggagattcacccctggggctctgcatggcaggaaaggggcagtgccaaaaagtgtgtaattatagagagggcaagaccacgagacactttatatatatctaatattagacttaccattaactaagtgtgcaatttagtgttgtgtaactatcacactatccatttccagaactttttcctcttaccatattaaacctctgtacccaataaacagtaactctcactccttctccccctaacccttaacacccaccattctactttctgtctctatgtaactggctattctaactatcttttataaatggaattatataataattatccttttgtgtctggcttatttcagttggcataatatcttcaaggttcatccattttgcacgatgtattgtaattttcttccttgttaaggttgaataacatttcaatgtatagatacatctcatttgcctacccacttatctttcaatggacttttcagttgtttccatttttggctagtgtgagtaatgcttctctgtacatcagtgtacaaatatttcttcaaatttctttcaattctatagggagtatgtccagaaggggaattgctggatcaaatggtaatttattgtttaattttttgaaaaacagccacactactttttacattggctataacatttcccattcccatcagcaatgcactagagctccaatttttccatctacttggaaacacctgttgtttagtgttgctgtcattgttgttgtttatcaaagccatcctaaagtgtgtgaggtgttgtaacattgtggttttgatttgcatatctctaagtattcgtgatgctgaggaactttgcatgggctatataaaaggttttgatttttatgaagtctgatttatccattttatttgttgcctatgcttttgttgttacaaccaagaaatcattgtgaaatccactatcatgaagtttttcttctaagagttgtatagtttttactcttacatttagatctttgatctattgtgggttaatttttgtacatggtgttaggtaaaggttccactcttcttgcccttggatatccacctttcccaatatcatttggtgagaacactgtcccttccccattgaacgatcttggcacactcgatgaaaatcatttggccatatatgcaagcatttctttctgggctatgatatttcattaatttctatgtcctcctttatgccagtaccacactgtattgattactggggctttgtagtaaatgctgaaatcaggaagtgtgagtcctccagcttcattcttcctcttcaaagctgtgtgtctatttagagtcatgagatgcaatataaattttaggacagatttttctttttctgcaaaaatgtcactgagattctgataggaattgtattgaatctgcagctcactttgggcagcactgtcctcctaacaatattgagtcttccaattcatgaacacaaaatgtctttcaatttattgatgtcatctttcatttctttcagcaatactttgtagatttcaggtataatcatttcacctctttggttaaacttattcctaaatattttattctttttgatgtgaatataaattgaaattatttttcttaatttcccttcagattgttcatggttagtgtattgaaatacaactgatgtttgaatgttgattttgtattgtgcaacattactgaatttattaattctaataggtttgttccatctttaggattttctacaaataagttcaagttatctataaacagaaataattttactccttccttccaatttgaatgtctttttaaaaattcttccctaatttttctgattagacctttcactactatgttgaataaaagtgtcaatagcaggcatccttgtcttttcctgctcatacagggaaagttttcagtctttctctgttatgtaagatgttagcattgggtttttcacatattgcctttatgttgaggtggttgccttccattcttagaatgtttttattatgaaaaaatactgaatttcatcaaatgcttttattgattcaatcttcttactgattatagttatattcatatttttgtgtgtttctaggagtttgtctatttcatctaggttatccaatttattggcatacaattatttatagtactttcataatcattattttattagaattggtagtaatcgcttcatttttcttttttctttttcttttaagacagagagacaggctctcactctgtaggccaccctaggatggaatacagtggtgtgattatggctcactgcagcctcaacctcctgggctcaagcaattctccttcttcagcctcccaagatgctaggactacaggtgcatgtcaacatgcccagctaattggttttttttttttttgtagagacagcatctccccaggttacctatgctggtccaaacacctggtttcaagaaatccttctgctgtgacctcccaaagtgctaggattaaaacatgacccaccatgctcagagtccattttcatttatgatttgagtaattttatcttttctctttttttcttagccaatctagttaatggttgtcaattttgttgattttattttgaagaatcaacttttggtttcagtaatttcctctattctgtttccattctccattttatttatatccaccctaatacttattatttccctcattcactgtgcttgggtttagtttgttcttctttcgtatcctgaagtattaaagtaggttgttgacctgagctctttcttcttttttaatgtaagagtttacagttataaatttcttgcacaagactcaacttctctgaacccctgattcctcacctgaaaattgcaataagagtactttcttcataccattcttttaaaggtttaatgcagtcaatgaaacaagatgccacacaaagaggaaccaatgtcagctgctatattactaccatcatcattagccttgaggtcaaatagtcctagaatcaaatctcagatccacctgtcactagccatatgacaccaggaaagtttttacaccatgctaagcttctgtcttttcatcagcaaaatggaaataatgcctacctgacagggttattgtgtggattaaatgagatacaggtaaagtattgagcacagggcctggcacatagaaagtgcacctcaacagtacctacctttttccatagatatgaaaaaagcggtaacacataaaacactaggacatggttactgactaattgtgggagagaaagaaaaaaagctaagtgcaaagaatcaagtctggtatgttagtttttaccaactgagatgcatccaagatgggattagacatacaagataatttatcagggaagacacctgtgagggaatgtggggcaggcatgaaggtagtatgggagaacccacagaccgctatgcagagctgattcctgtgaaaaagaaagagaaagaagttttaggtaccaatgcagttctaagagtttttgcaaggctgatgaggaatcctccaaccagtcacccattggagttaaagagagcctcggagaactagacttgctttcacacccttgctgggagcctgtgggaaagaagctttctctgtaaaggaggtagtgaatttgaaatgcgctgacctgggccttctgtcaatcaggtccctgccatggaaaccagacagagtctcattaatggctgccacaatagagacactgagaaaaagaacaggttgataccttcatgaaattcaagacaaagaagaaaaaaactcaatgttattggactaaataatcaaaaggataatgttttcataattttttattggaaaatgtgctgattcttggaatgttttattctccagatttatgaactttttttcttcagcaattggtaaagtatacttttgtaaacaaaaattgaaacatttgcttttgctctctatctgagtgccccagaattgggaaactattcatgagtattcataggtttatggtaataaagttatttgcacaagttcaaaaaaaaaaaaaaaaaacaaaaaaaaacatgtgtgttggggcgccctgggcccctgaaaaagcttttctnagaanncattgnntngggncgcgggggcccc

SEQ ID NO: 292024 - DNA, 1505 bp, Homo sapiens
tgccctactggccctacctcacagctgaaactttaaaaaacaggatgggccaccagccacctcctccaactcaacaacattctataactgataactccctgagcctcaagacacctcccgagtgtctgctcactccccttccaccctcagcggatgataatctcaagaaagaaagagaaagaaggaggaaggacagcacacctgacagccctgctcaggaagtctctggatcctaggctcatctccacaggggagaacacacagacagcagagaccatgggacccctctcagcccctccctgcactcagcacatcacctggaaggggctcctgctcacagcatcacttttaaacttctggaacctgcccaccactgcccaagtaataattgaagccaagccacccaaagtttccgaggggaaggatgttcttctacttgtccacaatttgccccagaatcttactggctacatctggtacaaagggcaaatgacggacctctaccattacattacatcatatgtagtacacggtcaaattatatatgggcctgcctacagtggacgagaaacagtatattccaatgcatccctgctgatccagaatgtcacacaggaggatgcaggatcctacaccttacacatcataaagcgaggcgatgggactggaggagtaactggatatttcactgtcaccttatactcggagactcccaagccctccatctccagcagcaacttaaaccccagggaggtcatggaggctgtgcgcttaatctgtgatcctgagactccggatgcaagctacctgtggttgctgaatggtcagaacctccctatgactcacaggttgcagctgtccaaaaccaacaggaccctctatctatttggtgtcacaaagtatattgcaggaccctatgaatgtgaaatacggaacccagtgagtgccagccgcagtgacccagtcaccctgaatctcctcccgaagctgcccatgccttacatcaccatcaacaacttaaaccccagggagaagaaggatgtgttagccttcacctgtgaacctaagagtcggaactacacctacatttggtggctaaatggtcagagcctcccggtcagtccgagggtaaagcgacccattgaaaacaggatactcattctacccagtgtcacgagaaatgaaacaggaccctatcaatgtgaaatacgggaccgatatggtggcatccgcagtaacccagtcaccctgaatgtcctctatggtccagacctccccagaatttacccttcattcacctattaccgttcaggagaaaacctcgacttgtcctgctttgcggactctaacccaccggcagagtattcttggacaattaatgggaagtttcagctatcaggacaaaagctctttatcccccaaattactacaaatcatagcgggctctatgcttgctctgttcgtaactcagccactggcaaggctaggacactggcgaggctaga

SEQ ID NO: 292025 - DNA, 1699 bp, Homo sapiens
  misc_feature (1668)..(1668): n is a, c, g, or t
  misc_feature (1673)..(1674): n is a, c, g, or t
  misc_feature (1680)..(1681): n is a, c, g, or t
  misc_feature (1683)..(1683): n is a, c, g, or t
  misc_feature (1687)..(1687): n is a, c, g, or t
tgccctactggccctacctcacagctgaaactttaaaaaacaggatgggccaccagccacctcctccaactcaacaacattctataactgataactccctgagcctcaagacacctcccgagtgtctgctcactccccttccaccctcagcggatgataatctcaagaaagaaagagaaagaaggaggaaggacagcacacctgacagccctgctcaggaagtctctggatcctaggctcatctccacaggggagaacacacagacagcagagaccatgggacccctctcagcccctccctgcactcagcacatcacctggaaggggctcctgctcacagcatcacttttaaacttctggaacctgcccaccactgcccaagtaataattgaagccaagccacccaaagtttccgaggggaaggatgttcttctacttgtccacaatttgccccagaatcttactggctacatctggtacaaagggcaaatgacggacctctaccattacattacatcatatgtagtacacggtcaaattatatatgggcctgcctacagtggacgagaaacagtatattccaatgcatccctgctgatccagaatgtcacacaggaggatgcaggatcctacaccttacacatcataaagcgaggcgatgggactggaggagtaactggatatttcactgtcaccttatactcggagactcccaagccctccatctccagcagcaacttaaaccccagggaggtcatggaggctgtgcgcttaatctgtgatcctgagactccggatgcaagctacctgtggttgctgaatggtcagaacctccctatgactcacaggttgcagctgtccaaaaccaacaggaccctctatctatttggtgtcacaaagtatattgcaggaccctatgaatgtgaaatacggaacccagtgagtgccagccgcagtgacccagtcaccctgaatctcctccatggtccagacctccccagaatttacccttcattcacctattaccgttcaggagaaaacctcgacttgtcctgctttgcggactctaacccaccggcagagtattcttggacaattaatgggaagtttcagctatcaggacaaaagctctttatcccccaaattactacaaatcatagcgggctctatgcttgctctgttcgtaactcagccactggcaaggaaatctccaaatccatgatagtcaaagtctctggtccctgccatggaaaccagacagagtctcattaatggctgccacaatagagacactgagaaaaagaacaggttgataccttcatgaaattcaagacaaagaagaaaaaaactcaatgttattggactaaataatcaaaaggataatgttttcataattttttattggaaaatgtgctgattcttggaatgttttattctccagatttatgaactttttttcttcagcaattggtaaagtatacttttgtaaacaaaaattgaaacatttgcttttgctctctatctgagtgccccagaattgggaaactattcatgagtattcataggtttatggtaataaagttatttgcacaagttcaaaaaaaaaaaaaaaaaacaaaaaaaaacatgtgtgttggggcgccctgggcccctgaaaaagcttttctnagaanncattgnntngggncgcgggggcccc

SEQ ID NO: 292026 - DNA, 1037 bp, Homo sapiens
tgccctactggccctacctcacagctgaaactttaaaaaacaggatgggccaccagccacctcctccaactcaacaacattctataactgataactccctgagcctcaagacacctcccgagtgtctgctcactccccttccaccctcagcggatgataatctcaagaaagaaagagaaagaaggaggaaggacagcacacctgacagccctgctcaggaagtctctggatcctaggctcatctccacaggggagaacacacagacagcagagaccatgggacccctctcagcccctccctgcactcagcacatcacctggaaggggctcctgctcacagcatcacttttaaacttctggaacctgcccaccactgcccaagtaataattgaagccaagccacccaaagtttccgaggggaaggatgttcttctacttgtccacaatttgccccagaatcttactggctacatctggtacaaagggcaaatgacggacctctaccattacattacatcatatgtagtacacggtcaaattatatatgggcctgcctacagtggacgagaaacagtatattccaatgcatccctgctgatccagaatgtcacacaggaggatgcaggatcctacaccttacacatcataaagcgaggcgatgggactggaggagtaactggatatttcactgtcaccttatactcggagactcccaagccctccatctccagcagcaacttaaaccccagggaggtcatggaggctgtgcgcttaatctgtgatcctgagactccggatgcaagctacctgtggttgctgaatggtcagaacctccctatgactcacaggttgcagctgtccaaaaccaacaggaccctctatctatttggtgtcacaaagtatattgcaggaccctatgaatgtgaaatacggaacccagtgagtgccagccgcagtgacccagtcaccctgaatctcctccatggtccagaactccccagaattacccttctgtcgtctttaagcgatgtctagat

SEQ ID NO: 292027 - DNA, 1079 bp, Homo sapiens
tgccctactggccctacctcacagctgaaactttaaaaaacaggatgggccaccagccacctcctccaactcaacaacattctataactgataactccctgagcctcaagacacctcccgagtgtctgctcactccccttccaccctcagcggatgataatctcaagaaagaaagagaaagaaggaggaaggacagcacacctgacagccctgctcaggaagtctctggatcctaggctcatctccacaggggagaacacacagacagcagagaccatgggacccctctcagcccctccctgcactcagcacatcacctggaaggggctcctgctcacagcatcacttttaaacttctggaacctgcccaccactgcccaagtaataattgaagccaagccacccaaagtttccgaggggaaggatgttcttctacttgtccacaatttgccccagaatcttactggctacatctggtacaaagggcaaatgacggacctctaccattacattacatcatatgtagtacacggtcaaattatatatgggcctgcctacagtggacgagaaacagtatattccaatgcatccctgctgatccagaatgtcacacaggaggatgcaggatcctacaccttacacatcataaagcgaggcgatgggactggaggagtaactggatatttcactgtcaccttatactcggagactcccaagccctccatctccagcagcaacttaaaccccagggaggtcatggaggctgtgcgcttaatctgtgatcctgagactccggatgcaagctacctgtggttgctgaatggtcagaaacagccacagagaaccagagaagtgcctgtggatcatacgtgatggccatgtccccacacagatctccaacagccagttagtgtcgcccactgaaaaacattccatccatgagaatacgcccatgaaactggaaatccagcatctctaaggagaccgtactactgctaatatcagagacattttgtgagtagttgctgtcacaactgatggaagttccttcactacatctacagatccggcacagtatg

SEQ ID NO: 292028 - DNA, 797 bp, Homo sapiens
tgccctactggccctacctcacagctgaaactttaaaaaacaggatgggccaccagccacctcctccaactcaacaacattctataactgataactccctgagcctcaagacacctcccgagtgtctgctcactccccttccaccctcagcggatgataatctcaagaaagaaagagaaagaaggaggaaggacagcacacctgacagccctgctcaggaagtctctggatcctaggctcatctccacaggggagaacacacagacagcagagaccatgggacccctctcagcccctccctgcactcagcacatcacctggaaggggctcctgctcacagcggagactcccaagccctccatctccagcagcaacttaaaccccagggaggtcatggaggctgtgcgcttaatctgtgatcctgagactccggatgcaagctacctgtggttgctgaatggtcagaacctccctatgactcacaggttgcagctgtccaaaaccaacaggaccctctatctatttggtgtcacaaagtatattgcaggaccctatgaatgtgaaatacggaacccagtgagtgccagccgcagtgacccagtcaccctgaatctcctccgtgagtatcttctgttcctctgtgagccaggctgccatcccaaatacaagtggccagaggccaggcctctcagtccctctcaggtccaagtacagagacctttatccctgaacatcaaagctggccatgactttctgctccaggcaaaccagagtaggcctaggcttgatcaacaata

SEQ ID NO: 292029 - DNA, 815 bp, Homo sapiens
cccagttaattgctacccagtcagtgttttgcccaacaatctcgacttaagttgcagtgctctcttattaacccccgctacagatacatcgagatatttccaagcagaaggaatgaagttcgaacacatgtcggttcttataagggaaagaaaatcgcatcttttcctactgctaagtatataactgagccagaaatggtctttgaagaacatgaagtaaatgaggatattcaacccatgacagcttttgaaagtgagaaggaaatagaattgcctaaggaggtgccagaaaagcttccagaggctgctgattttggaactacgtcttctctgcattttgtccacatgagaggattacctttccaagccaatgcccaagacattataaacttttttgctccactcaagcctgttagaatcaccatggaatacagctccagtgggaaggccactggagaagctgatgtgcactttgagacccatgaggatgctgttgcagcgatgctcaaggatcggtcccacgttcatcataggtatattgaactgttcctgaattcatgtccaaaaggaaaataagactctaggggctccagataataagggtgaagcaagaagcatttcatttgcacatctttcttggacttgggatatacagttccagtttattagcagcaactgctagggaaatgattttggtgttttgggttaattgcttctaagaaaagtttcatagtggactgtttagaagaagaaatgaaagatccagtttgggattatgaaataaaccacaaattaaaatttttgtttaaactgtc

SEQ ID NO: 292030 - DNA, 738 bp, Homo sapiens
ggccaggctggttttgatctcctgacctcaagcgatccactgtcctcggcctcccaaagtgttgagattacaggtgtgagccaccatgctcgctgagagcagatatttgaaatgtcactttgagttctgagaaaaagtaaaaagccagaagacatactagatatataaatatattactgcttaaaaagatttcctaaaaagaaatgtatcaagtgtatgaatcaaagtctgaaagaaagatgaagagccaccagacttctaggtaggtttacatccatcatgttcctcttgactgcctttgtttgtcgtttagttttttgctccactcaagcctgttagaatcaccatggaatacagctccagtgggaaggccactggagaagctgatgtgcactttgagacccatgaggatgctgttgcagcgatgctcaaggatcggtcccacgttcatcataggtatattgaactgttcctgaattcatgtccaaaaggaaaataagactctaggggctccagataataagggtgaagcaagaagcatttcatttgcacatctttcttggacttgggatatacagttccagtttattagcagcaactgctagggaaatgattttggtgttttgggttaattgcttctaagaaaagtttcatagtggactgtttagaagaagaaatgaaagatccagtttgggattatgaaataaaccacaaattaaaatttttgtttaaactgtc

SEQ ID NO: 292031 - DNA, 882 bp, Homo sapiens
  misc_feature (4)..(4): n is a, c, g, or t
  misc_feature (13)..(13): n is a, c, g, or t
gcgnccgccggtncctaccctgccctccgtcccgacgcgcactatcagccaggagtccaaaactacttacctggaagaccttccaccaccccctgagtatgaattggccccgtccaagttagaagaggaagtggatgatgtctttctcattcgagctcaaggactgccctggtcatgcactatggaagatgtgcttaactttttttcagactgcagaatccgcaacggtgagaatggaatacattttctcctaaacagagatgggaaacgaaggggtgatgccttaattgaaatggagtcagagcaggatgtgcagaaagccttagagaagcaccgcatgtacatgggccagcggtatgtggaagtatatgagataaacaatgaagatgtggatgccttaatgaagagcttgcaggtcaaatcttcgcctgtggtaaatgatggtgtggttcgtttgagaggacttccttatagttgcaatgagaaagacattgtagacttctttgcaggtactttgcagttgtattatgcttgggagctcatatcttttttcccttggtatctccttctatatcttagatgagcctgtttctgggcaaaggcatgcagttatattaggttctttaggggagagctcttcacttaaatttctaatatttatagattttgtatgtgtttttgttctatcaggcagattttaggagggaagtcagatttcagaataatttcatgagggttttactattgaaggaaataacttctcataatagttgctgtatttgtgtaagacaataacaatttatataatttaaaagtattttctaattcctagaaccattagcagtgaagtctgtgatttctattgtttcctagtatataatt

SEQ ID NO: 292032 - DNA, 549 bp, Homo sapiens
tgttaattctaaggataaaaaagcctgctagtagcattaaaatctcttggtgtcctaggactgaatatagttgacattacttttgtgatggactatagagggaggcgaaaaacaggggaagcctatgtgcaatttgaagaaccagaaatggccaaccaagccctgttgaaacacagggaagaaattggtaatcgatacatcgagatatttccaagcagaaggaatgaagttcgaacacatgtcggttcttataagggaaagaaaatcgcatcttttcctactgctaagtatataactgagccagaaatggtctttgaagaacatgaagtaaatgaggatattcaacccatgacagcttttgaaagtgagaaggaaatagaattgcctaaggaggtgccagaaaagcttccagaggctgctgattttggaactacgtcttctctgcattttgtccacatgagaggattacctttccaagccaatgcccaagacattataaacgtgtgtggcagtaagatatccaatctcaatagatttgaacaaaagttc

SEQ ID NO: 292033 - DNA, 2828 bp, Homo sapiens
agactgggcggagcgtcgcgctctcctccacctccttccgactctcggaggccccccacccagtgcccgcggcgcatgtgccaggcacaccccacccccaaccggccctggattccacttccgttccaccatcgctgctggagcagctgccttcaggccctgcgccgcctccggagtccatggccggcacgcgctgggtactcggggcgctgctccggggctgcggctgtaactgcagcagctgccggcgcaccggcgccgcctgcctgcccttctactccgccgctggctctatccccgtcctaccctgccctccgtgcctctctgctgccgcagtcgctggcggcggcggccgccgtcccgacgcgcagctacagccaggagtccaaaactacttacctggaagaccttccaccaccccctgagtatgaattggccccgtccaagttagaagaggaagtggatgatgtctttctcattcgagctcaaggactgccctggtcatgcactatggaagatgtgcttaactttttttcagactgcagaatccgcaacggtgagaatggaatacattttctcctaaacagagatgggaaacgaaggggtgatgccttaattgaaatggagtcagagcaggatgtgcagaaagccttagagaagcaccgcatgtacatgggccagcggtatgtggaagtatatgagataaacaatgaagatgtggatgccttaatgaagagcttgcaggtcaaatcttcgcctgtggtaaatgatggtgtggttcgtttgagaggacttccttatagttgcaatgagaaagacattgtagacttctttgcaggactgaatatagttgacattacttttgtgatggactatagagggaggcgaaaaacaggggaagcctatgtgcaatttgaagaaccagaaatggccaaccaagccctgttgaaacacagggaagaaattggtaatcgatacatcgagatatttccaagcagaaggaatgaagttcgaacacatgtcggttcttataagggaaagaaaatcgcatcttttcctactgctaagtatataactgagccagaaatggtctttgaagaacatgaagtaaatgaggatattcaacccatgacagcttttgaaagtgagaaggaaatagaattgcctaaggaggtgccagaaaagcttccagaggctgctgattttggaactacgtcttctctgcattttgtccacatgagaggattacctttccaagccaatgcccaagacattataaacttttttgctccactcaagcctgttagaatcaccatggaatacagctccagtgggaaggccactggagaagctgatgtgcactttgagacccatgaggatgctgttgcagcgatgctcaaggatcggtcccacgttcatcataggtatattgaactgttcctgaattcatgtccaaaaggaaaataagactctaggggctccagataataagggtgaagcaagaagcatttcatttgcacatctttcttggacttgggatatacagttccagtttattagcagcaactgctagggaaatgattttggtgttttgggttaattgcttctaagaaaagtttcatagtggactgtttagaagaagaaatgaaagatccagtttgggattatgaaataaaccacaaattaaaatttttgtttaaactgtccaggatctgatttaaaaatatggtctttgttttatatgattaaatggtttgttttcatagatgatatgttactcattgtaaagaccacatatttttattcagcagtgttctttaaacgctttcatttaaaaagtaactttttttttttgcctgtgaattgagtgctctgatgtaaaacttctcatggagtgaaacagtgatttattttaaccaaacattcaccaaagcaaagaacggtttcagacctttgaactggtatggtttggcagaatagttttaaattttgctgtatttgattacttagagataggaatttttaaaaatcaaaacaaaaaataccacagcttagtgtaaatgacaatttggcggttttatgtctttagaaatgttttgcctttctaagccttgtgctaaaggcgtataacggtggtgcctatctacttaagggggcattctagtcttaacttaaaagttgtctaaactgtccctccctggctttttttggtttggggtagacctaagggtgtttgttagtctcaaaactgtgaagtgacatgtcagaacagtccagactggtaagaaaattaatggcttcacttgaatttaaaccagctctagataggaaaaaaatcagtctcctcatttgctttttaaatggagtagtacatcccatattttagaacaagtaggggtgccttgcttaaataaaaatagcatttaatgtataattgtgtgaagggtttatggataaagctgtacttctgtcacaatgtggcagtactttctgctttaatattaaacagcttgttatttaaatattggacaaaatggctggcttcaaaatatagtcattaataaactaactttatgtgcacctgtgtaggagaatcaaaatcctgtatgctttctttgccttgttcctgttctcagggtgacgactgccaccaggagatgcagttctagttcttaaaattaaatttgcccaggtttctgacaggtgatacctggaagagagactatgtcttctcttacttaatacataaccatctttgattaccagctaagatgcgaaatcactgtactgtagtcaataaatgaagacttgtttcaggctgaagatta

SEQ ID NO: 292034 - DNA, 2985 bp, Homo sapiens
agactgggcggagcgtcgcgctctcctccacctccttccgactctcggaggccccccacccagtgcccgcggcgcatgtgccaggcacaccccacccccaaccggccctggattccacttccgttccaccatcgctgctggagcagctgccttcaggccctgcgccgcctccggagtccatggccggcacgcgctgggtactcggggcgctgctccggggctgcggctgtaactgcagcagctgccggcgcaccggcgccgcctgcctgcccttctactccgccgctggctctatcccccgtcgggcgtctcgggccgccgccgcctgctgctgctgctcggggccgccgcggccgctgcctcccagacgcgtggcctccagaccgggcctgtgcctcccgggaggctggcggggcctcccgctgtggccacctctgccgcggccgcggccgccgcgtcctaccctgccctccgtgcctctctgctgccgcagtcgctggcggcggcggccgccgtcccgacgcgcagctacagccaggagtccaaaactacttacctggaagaccttccaccaccccctgagtatgaattggccccgtccaagttagaagaggaagtggatgatgtctttctcattcgagctcaaggactgccctggtcatgcactatggaagatgtgcttaactttttttcagactgcagaatccgcaacggtgagaatggaatacattttctcctaaacagagatgggaaacgaaggggtgatgccttaattgaaatggagtcagagcaggatgtgcagaaagccttagagaagcaccgcatgtacatgggccagcggtatgtggaagtatatgagataaacaatgaagatgtggatgccttaatgaagagcttgcaggtcaaatcttcgcctgtggtaaatgatggtgtggttcgtttgagaggacttccttatagttgcaatgagaaagacattgtagacttctttgcaggactgaatatagttgacattacttttgtgatggactatagagggaggcgaaaaacaggggaagcctatgtgcaatttgaagaaccagaaatggccaaccaagccctgttgaaacacagggaagaaattggtaatcgatacatcgagatatttccaagcagaaggaatgaagttcgaacacatgtcggttcttataagggaaagaaaatcgcatcttttcctactgctaagtatataactgagccagaaatggtctttgaagaacatgaagtaaatgaggatattcaacccatgacagcttttgaaagtgagaaggaaatagaattgcctaaggaggtgccagaaaagcttccagaggctgctgattttggaactacgtcttctctgcattttgtccacatgagaggattacctttccaagccaatgcccaagacattataaacttttttgctccactcaagcctgttagaatcaccatggaatacagctccagtgggaaggccactggagaagctgatgtgcactttgagacccatgaggatgctgttgcagcgatgctcaaggatcggtcccacgttcatcataggtatattgaactgttcctgaattcatgtccaaaaggaaaataagactctaggggctccagataataagggtgaagcaagaagcatttcatttgcacatctttcttggacttgggatatacagttccagtttattagcagcaactgctagggaaatgattttggtgttttgggttaattgcttctaagaaaagtttcatagtggactgtttagaagaagaaatgaaagatccagtttgggattatgaaataaaccacaaattaaaatttttgtttaaactgtccaggatctgatttaaaaatatggtctttgttttatatgattaaatggtttgttttcatagatgatatgttactcattgtaaagaccacatatttttattcagcagtgttctttaaacgctttcatttaaaaagtaactttttttttttgcctgtgaattgagtgctctgatgtaaaacttctcatggagtgaaacagtgatttattttaaccaaacattcaccaaagcaaagaacggtttcagacctttgaactggtatggtttggcagaatagttttaaattttgctgtatttgattacttagagataggaatttttaaaaatcaaaacaaaaaataccacagcttagtgtaaatgacaatttggcggttttatgtctttagaaatgttttgcctttctaagccttgtgctaaaggcgtataacggtggtgcctatctacttaagggggcattctagtcttaacttaaaagttgtctaaactgtccctccctggctttttttggtttggggtagacctaagggtgtttgttagtctcaaaactgtgaagtgacatgtcagaacagtccagactggtaagaaaattaatggcttcacttgaatttaaaccagctctagataggaaaaaaatcagtctcctcatttgctttttaaatggagtagtacatcccatattttagaacaagtaggggtgccttgcttaaataaaaatagcatttaatgtataattgtgtgaagggtttatggataaagctgtacttctgtcacaatgtggcagtactttctgctttaatattaaacagcttgttatttaaatattggacaaaatggctggcttcaaaatatagtcattaataaactaactttatgtgcacctgtgtaggagaatcaaaatcctgtatgctttctttgccttgttcctgttctcagggtgacgactgccaccaggagatgcagttctagttcttaaaattaaatttgcccaggtttctgacaggtgatacctggaagagagactatgtcttctcttacttaatacataaccatctttgattaccagctaagatgcgaaatcactgtactgtagtcaataaatgaagacttgtttcaggctgaagatta

SEQ ID NO: 292035 - DNA, 2777 bp, Homo sapiens
agactgggcggagcgtcgcgctctcctccacctccttccgactctcggaggccccccacccagtgcccgcggcgcatgtgccaggcacaccccacccccaaccggccctggattccacttccgttccaccatcgctgctggagcagctgccttcaggccctgcgccgcctccggagtccatggccggcacgcgctgggtactcggggcgctgctccggggctgcggctgtaactgcagcagctgccggcgcaccggcgccgcctgcctgcccttctactccgccgctggctctatccccggccgccgtcccgacgcgcagctacagccaggagtccaaaactacttacctggaagaccttccaccaccccctgagtatgaattggccccgtccaagttagaagaggaagtggatgatgtctttctcattcgagctcaaggactgccctggtcatgcactatggaagatgtgcttaactttttttcagactgcagaatccgcaacggtgagaatggaatacattttctcctaaacagagatgggaaacgaaggggtgatgccttaattgaaatggagtcagagcaggatgtgcagaaagccttagagaagcaccgcatgtacatgggccagcggtatgtggaagtatatgagataaacaatgaagatgtggatgccttaatgaagagcttgcaggtcaaatcttcgcctgtggtaaatgatggtgtggttcgtttgagaggacttccttatagttgcaatgagaaagacattgtagacttctttgcaggactgaatatagttgacattacttttgtgatggactatagagggaggcgaaaaacaggggaagcctatgtgcaatttgaagaaccagaaatggccaaccaagccctgttgaaacacagggaagaaattggtaatcgatacatcgagatatttccaagcagaaggaatgaagttcgaacacatgtcggttcttataagggaaagaaaatcgcatcttttcctactgctaagtatataactgagccagaaatggtctttgaagaacatgaagtaaatgaggatattcaacccatgacagcttttgaaagtgagaaggaaatagaattgcctaaggaggtgccagaaaagcttccagaggctgctgattttggaactacgtcttctctgcattttgtccacatgagaggattacctttccaagccaatgcccaagacattataaacttttttgctccactcaagcctgttagaatcaccatggaatacagctccagtgggaaggccactggagaagctgatgtgcactttgagacccatgaggatgctgttgcagcgatgctcaaggatcggtcccacgttcatcataggtatattgaactgttcctgaattcatgtccaaaaggaaaataagactctaggggctccagataataagggtgaagcaagaagcatttcatttgcacatctttcttggacttgggatatacagttccagtttattagcagcaactgctagggaaatgattttggtgttttgggttaattgcttctaagaaaagtttcatagtggactgtttagaagaagaaatgaaagatccagtttgggattatgaaataaaccacaaattaaaatttttgtttaaactgtccaggatctgatttaaaaatatggtctttgttttatatgattaaatggtttgttttcatagatgatatgttactcattgtaaagaccacatatttttattcagcagtgttctttaaacgctttcatttaaaaagtaactttttttttttgcctgtgaattgagtgctctgatgtaaaacttctcatggagtgaaacagtgatttattttaaccaaacattcaccaaagcaaagaacggtttcagacctttgaactggtatggtttggcagaatagttttaaattttgctgtatttgattacttagagataggaatttttaaaaatcaaaacaaaaaataccacagcttagtgtaaatgacaatttggcggttttatgtctttagaaatgttttgcctttctaagccttgtgctaaaggcgtataacggtggtgcctatctacttaagggggcattctagtcttaacttaaaagttgtctaaactgtccctccctggctttttttggtttggggtagacctaagggtgtttgttagtctcaaaactgtgaagtgacatgtcagaacagtccagactggtaagaaaattaatggcttcacttgaatttaaaccagctctagataggaaaaaaatcagtctcctcatttgctttttaaatggagtagtacatcccatattttagaacaagtaggggtgccttgcttaaataaaaatagcatttaatgtataattgtgtgaagggtttatggataaagctgtacttctgtcacaatgtggcagtactttctgctttaatattaaacagcttgttatttaaatattggacaaaatggctggcttcaaaatatagtcattaataaactaactttatgtgcacctgtgtaggagaatcaaaatcctgtatgctttctttgccttgttcctgttctcagggtgacgactgccaccaggagatgcagttctagttcttaaaattaaatttgcccaggtttctgacaggtgatacctggaagagagactatgtcttctcttacttaatacataaccatctttgattaccagctaagatgcgaaatcactgtactgtagtcaataaatgaagacttgtttcaggctgaagatta

SEQ ID NO: 292036 - DNA, 2663 bp, Homo sapiens
taacgagcgtacacttaggctaggtacgaggctggtttaattcggccgagggcgctccggagtccatggccggcacgcgctgggtactcggggcgctgctccggggctgcggctgtaactgcagcagctgccggcgcaccggcgccgcctgcctgcccttctactccgccgctggctctatccccggccgccgtcccgacgcgcagctacagccaggagtccaaaactacttacctggaagaccttccaccaccccctgagtatgaattggccccgtccaagttagaagaggaagtggatgatgtctttctcattcgagctcaaggactgccctggtcatgcactatggaagatgtgcttaactttttttcagactgcagaatccgcaacggtgagaatggaatacattttctcctaaacagagatgggaaacgaaggggtgatgccttaattgaaatggagtcagagcaggatgtgcagaaagccttagagaagcaccgcatgtacatgggccagcggtatgtggaagtatatgagataaacaatgaagatgtggatgccttaatgaagagcttgcaggtcaaatcttcgcctgtggtaaatgatggtgtggttcgtttgagaggacttccttatagttgcaatgagaaagacattgtagacttctttgcaggactgaatatagttgacattacttttgtgatggactatagagggaggcgaaaaacaggggaagcctatgtgcaatttgaagaaccagaaatggccaaccaagccctgttgaaacacagggaagaaattggtaatcgatacatcgagatatttccaagcagaaggaatgaagttcgaacacatgtcggttcttataagggaaagaaaatcgcatcttttcctactgctaagtatataactgagccagaaatggtctttgaagaacatgaagtaaatgaggatattcaacccatgacagcttttgaaagtgagaaggaaatagaattgcctaaggaggtgccagaaaagcttccagaggctgctgattttggaactacgtcttctctgcattttgtccacatgagaggattacctttccaagccaatgcccaagacattataaacttttttgctccactcaagcctgttagaatcaccatggaatacagctccagtgggaaggccactggagaagctgatgtgcactttgagacccatgaggatgctgttgcagcgatgctcaaggatcggtcccacgttcatcataggtatattgaactgttcctgaattcatgtccaaaaggaaaataagactctaggggctccagataataagggtgaagcaagaagcatttcatttgcacatctttcttggacttgggatatacagttccagtttattagcagcaactgctagggaaatgattttggtgttttgggttaattgcttctaagaaaagtttcatagtggactgtttagaagaagaaatgaaagatccagtttgggattatgaaataaaccacaaattaaaatttttgtttaaactgtccaggatctgatttaaaaatatggtctttgttttatatgattaaatggtttgttttcatagatgatatgttactcattgtaaagaccacatatttttattcagcagtgttctttaaacgctttcatttaaaaagtaactttttttttttgcctgtgaattgagtgctctgatgtaaaacttctcatggagtgaaacagtgatttattttaaccaaacattcaccaaagcaaagaacggtttcagacctttgaactggtatggtttggcagaatagttttaaattttgctgtatttgattacttagagataggaatttttaaaaatcaaaacaaaaaataccacagcttagtgtaaatgacaatttggcggttttatgtctttagaaatgttttgcctttctaagccttgtgctaaaggcgtataacggtggtgcctatctacttaagggggcattctagtcttaacttaaaagttgtctaaactgtccctccctggctttttttggtttggggtagacctaagggtgtttgttagtctcaaaactgtgaagtgacatgtcagaacagtccagactggtaagaaaattaatggcttcacttgaatttaaaccagctctagataggaaaaaaatcagtctcctcatttgctttttaaatggagtagtacatcccatattttagaacaagtaggggtgccttgcttaaataaaaatagcatttaatgtataattgtgtgaagggtttatggataaagctgtacttctgtcacaatgtggcagtactttctgctttaatattaaacagcttgttatttaaatattggacaaaatggctggcttcaaaatatagtcattaataaactaactttatgtgcacctgtgtaggagaatcaaaatcctgtatgctttctttgccttgttcctgttctcagggtgacgactgccaccaggagatgcagttctagttcttaaaattaaatttgcccaggtttctgacaggtgatacctggaagagagactatgtcttctcttacttaatacataaccatctttgattaccagctaagatgcgaaatcactgtactgtagtcaataaatgaagacttgtttcaggctgaagatta

SEQ ID NO: 292037 - DNA, 3021 bp, Homo sapiens
agactgggcggagcgtcgcgctctcctccacctccttccgactctcggaggccccccacccagtgcccgcggcgcatgtgccaggcacaccccacccccaaccggccctggattccacttccgttccaccatcgctgctggagcagctgccttcaggccctgcgccgcctccggagtccatggccggcacgcgctgggtactcggggcgctgctccggggctgcggctgtaactgcagcagctgccggcgcaccggcgccgcctgcctgcccttctactccgccgctggctctatcccccgtcgggcgtctcgggccgccgccgcctgctgctgctgctcggggccgccgcggccgctgcctcccagacgcgtggcctccagaccgggcctgtgcctcccgggaggctggcggggcctcccgctgtggccacctctgccgcggccgcggccgccgcgtcctaccctgccctccgtgcctctctgctgccgcagtcgctggcggcggcggccgccgtcccgacgcgcagctacagccaggagtccaaaactacttacctggaagaccttccaccaccccctgagtatgaattggccccgtccaagttagaagaggaagtggatgatgtctttctcattcgagctcaaggactgccctggtcatgcactatggaagatgtgcttaactttttttcagactgcagaatccgcaacggtgagaatggaatacattttctcctaaacagagatgggaaacgaaggggtgatgccttaattgaaatggagtcagagcaggatgtgcagaaagccttagagaagcaccgcatgtacatgggccagcggtatgtggaagtatatgagataaacaatgaagatgtggatgccttaatgaagagcttgcaggtcaaatcttcgcctgtggtaaatgatggtgtggttcgtttgagaggacttccttatagttgcaatgagaaagacattgtagacttctttgcaggactgaatatagttgacattacttttgtgatggactatagagggaggcgaaaaacaggggaagcctatgtgcaatttgaagaaccagaaatggccaaccaagccctgttgaaacacagggaagaaattggtaatcgatacatcgagatatttccaagcagaaggaatgaagttcgaacacatgtcggttcttataagggaaagaaaatcgcatcttttcctactgctaagtatataactgagccagaaatggtctttgaagaacatgaagtaaatgaggatattcaacccatgacagcttttgaaagtgagaaggaaatagaattgcctaaggaggtgccagaaaagcttccagaggctgctgattttggaactacgtcttctctgcattttgtccacatgagaggattacctttccaagccaatgcccaagacattataaacttttttgctccactcaagcctgttagaatcaccatggaatacagctccagtgggaaggccactggagaagctgatgtgcactttgagacccatgaggatgctgttgcagcgatgctcaaggatcggtcccacgttcatcataggtatattgaactgttcctgaattcatgtccaaaaggaaaataagactctaggggctccagataataagggtgaagcaagaagcatttcatttgcacatctttcttggacttgggatatacagttccagtttattagcagcaactgctagggaaatgattttggtgttttgggttaattgcttctaagaaaagtttcatagtggactgtttagaagaagaaatgaaagatccagtttgggattatgaaataaaccacaaattaaaatttttgtttaaactgtccaggatctgatttaaaaatatggtctttgttttatatgattaaatggtttgttttcatagatgatatgttactcattgtaaagaccacatatttttattcagcagtgttctttaaacgctttcatttaaaaagtaactttttttttttgcctgtgaattgagtgctctgatgtaaaacttctcatggagtgaaacagtgatttattttaaccaaacattcaccaaagcaaagaacggtttcagacctttgaactggtatggtttggcagaatagttttaaattttgctgtatttgattacttagagataggaatttttaaaaatcaaaacaaaaaataccacagcttagtgtaaatgacaatttggcggttttatgtctttagaaatgttttgcctttctaagccttgtgctaaaggcgtataacggtggtgcctatctacttaagggggcattctagtcttaacttaaaagttgtctaaactgtccctccctggctttttttggtttggggtagacctaagggtgtttgttagtctcaaaactgtgaagtgacatgtcagaacagtccagactggtaagaaaattaatggcttcacttgaatttaaaccagctctagataggaaaaaaatcagtctcctcatttgctttttaaatggagtagtacatcccatattttagaacaagtaggggtgccttgcttaaataaaaatagcatttaatgtataattgtgtgaagggtttatggataaagctgtacttctgtcacaatgtggcagtactttctgctttaatattaaacagcttgttatttaaatattggacaaaatggctggcttcaaaatatagtcattaataaactaactttatgtgcacctgtgtaggagaatcaaaatcctgtatgctttctttgccttgttcctgttctcagggtgacgactgccaccaggagatgcagttctagttcttaaaattaaatttgcccaggtttctgacaggtgatacctggaagagagactatgtcttctcttacttaatacataaccatctttgattaccagctaagatgcgaaatcactgtactgtagtcaataaatgaagacttgtttcaggctgaagattaaaaaaaaaataaaagggcggccgctcgcgatctaga

SEQ ID NO: 292038 - DNA, 2743 bp, Homo sapiens
agactgggcggagcgtcgcgctctcctccacctccttccgactctcggaggccccccacccagtgcccgcggcgcatgtgccaggcacaccccacccccaaccggccctggattccacttccgttccaccatcgctgctggagcagctgccttcaggccctgcgccgcctccggagtccatggccggcacgcgctgggtactcggggcgctgctccggggctgcggctgtaactgcagcagctgccggcgcaccggcgccgcctgcctgcccttctactccgccgctggctctatcccccgtcgggcgtctcgggccgccgccgcctgctgctgctgctcggggccgccgcggccgctgcctcccagacgcgtggcctccagaccgggcctgtgcctcccgggaggctggcggggcctcccgctgtggccacctctgccgcggccgcggccgccgcgtcctaccctgccctccgtgcctctctgctgccgcagtcgctggcggcggcggccgccgtcccgacgcgcagctacagccaggagtccaaaactacttacctggaagaccttccaccaccccctgagtatgaattggccccgtccaagttagaagaggaagtggatgatgtctttctcattcgagctcaaggactgccctggtcatgcactatggaagatgtgcttaactttttttcagactgcagaatccgcaacggtgagaatggaatacattttctcctaaacagagatgggaaacgaaggggtgatgccttaattgaaatggagtcagagcaggatgtgcagaaagccttagagaagcaccgcatgtacatgggccagcggtatgtggaagtatatgagataaacaatgaagatgtggatgccttaatgaagagcttgcaggtcaaatcttcgcctgtggtaaatgatggtgtggttcgtttgagaggacttccttatagttgcaatgagaaagacattgtagacttctttgcaggactgaatatagttgacattacttttgtgatggactatagagggaggcgaaaaacaggggaagcctatgtgcaatttgaagaaccagaaatggccaaccaagccctgttgaaacacagggaagaaattggtaatcgatacatcgagatatttccaagcagaaggaatgaagttcgaacacatgtcggttcttataagggaaagaaaatcgcatcttttcctactgctaagtatataactgagccagaaatggtctttgaagaacatgaagtaaatgaggatattcaacccatgacagcttttgaaagtgagaaggaaatagaattgcctaaggaggtgccagaaaagcttccagaggctgctgattttggaactacgtcttctctgcattttgtccacatgagaggattacctttccaagccaatgcccaagacattataaacttttttgctccactcaagcctgttagaatcaccatggaatacagctccagtgggaaggccactggagaagctgatgtgcactttgagacccatgaggatgctgttgcagcgatgctcaaggatcggtcccacgttcatcataggtatattgaactgttcctgaattcatgtccaaaaggaaaataagactctaggggctccagataataagggtgaagcaagaagcatttcatttgcacatctttcttggacttgggatatacagttccagtttattagcagcaactgctagggaaatgattttggtgttttgggttaattgcttctaagaaaagtttcatagtggactgtttagaagaagaaatgaaagatccagtttgggattatgaaataaaccacaaattaaaatttttgtttaaactgtccaggatctgatttaaaaatatggtctttgttttatatgattaaatggtttgttttcatagatgatatgttactcattgtaaagaccacatatttttattcagcagtgttctttaaacgctttcatttaaaaagtaactttttttttttgcctgtgaattgagtgctctgatgtaaaacttctcatggagtgaaacagtgatttattttaaccaaacattcaccaaagcaaagaacggtttcagacctttgaactggtatggtttggcagaatagttttaaattttgctgtatttgattacttagagataggaatttttaaaaatcaaaacaaaaaataccacagcttagtgtaaatgacaatttggcggttttatgtctttagaaatgttttgcctttctaagccttgtgctaaaggcgtataacggtggtgcctatctacttaagggggcattctagtcttaacttaaaagttgtctaaactgtccctccctggctttttttggtttggggtagacctaagggtgtttgttagtctcaaaactgtgaagtgacatgtcagaacagtccagactggtaagaaaattaatggcttcacttgaatttaaaccagctctagataggaaaaaaatcagtctcctcatttgctttttaaatggagtagtacatcccatattttagaacaagtaggggtgccttgcttaaataaaaatagcatttaatgtataattgtgtgaagggtttatggataaagctgtacttctgtcacaatgtggcagtactttctgctttaatattaaacagcttgttatttaaatattggacaaaatggctggcttcaaaatatagtcattaataaactaactttatgtgcacctgtg

SEQ ID NO: 292039 - DNA, 2910 bp, Homo sapiens
agactgggcggagcgtcgcgctctcctccacctccttccgactctcggaggccccccacccagtgcccgcggcgcatgtgccaggcacaccccacccccaaccggccctggattccacttccgttccaccatcgctgctggagcagctgccttcaggccctgcgccgcctccggagtccatggccggcacgcgctgggtactcggggcgctgctccggggctgcggctgtaactgcagcagctgccggcgcaccggcgccgcctgcctgcccttctactccgccgctggctctatcccccgtcgggcgtctcgggccgccgccgcctgctgctgctgctcggggccgccgcggccgctgcctcccagacgcgtggcctccagaccgggcctgtgcctcccgggaggctggcggggcctcccgctgtggccacctctgccgcggccgcggccgccgcgtcctaccctgccctccgtgcctctctgctgccgcagtcgctggcggcggcggccgccgtcccgacgcgcagctacagccaggagtccaaaactacttacctggaagaccttccaccaccccctgagtatgaattggccccgtccaagttagaagaggaagtggatgatgtctttctcattcgagctcaaggactgccctggtcatgcactatggaagatgtgcttaactttttttcagactgcagaatccgcaacggtgagaatggaatacattttctcctaaacagagatgggaaacgaaggggtgatgccttaattgaaatggagtcagagcaggatgtgcagaaagccttagagaagcaccgcatgtacatgggccagcggtatgtggaagtatatgagataaacaatgaagatgtggatgccttaatgaagagcttgcaggtcaaatcttcgcctgtggtaaatgatggtgtggttcgtttgagaggacttccttatagttgcaatgagaaagacattgtagacttctttgcaggactgaatatagttgacattacttttgtgatggactatagagggaggcgaaaaacaggggaagcctatgtgcaatttgaagaaccagaaatggccaaccaagccctgttgaaacacagggaagaaattggtaatcgatacatcgagatatttccaagcagaaggaatgaagttcgaacacatgtcggttcttataagggaaagaaaatcgcatcttttcctactgctaagtatataactgagccagaaatggtctttgaagaacatgaagtaaatgaggatattcaacccatgacagcttttgaaagtgagaaggaaatagaattgcctaaggaggtgccagaaaagcttccagaggctgctgattttggaactacgtcttctctgcattttgtccacatgagaggattacctttccaagccaatgcccaagacattataaacttttttgctccactcaagcctgttagaatcaccatggaatacagctccagtgggaaggccactggagaagctgatgtgcactttgagacccatgaggatgctgttgcagcgatgctcaaggatcggtcccacgttcggtgaagcaagaagcatttcatttgcacatctttcttggacttgggatatacagttccagtttattagcagcaactgctagggaaatgattttggtgttttgggttaattgcttctaagaaaagtttcatagtggactgtttagaagaagaaatgaaagatccagtttgggattatgaaataaaccacaaattaaaatttttgtttaaactgtccaggatctgatttaaaaatatggtctttgttttatatgattaaatggtttgttttcatagatgatatgttactcattgtaaagaccacatatttttattcagcagtgttctttaaacgctttcatttaaaaagtaactttttttttttgcctgtgaattgagtgctctgatgtaaaacttctcatggagtgaaacagtgatttattttaaccaaacattcaccaaagcaaagaacggtttcagacctttgaactggtatggtttggcagaatagttttaaattttgctgtatttgattacttagagataggaatttttaaaaatcaaaacaaaaaataccacagcttagtgtaaatgacaatttggcggttttatgtctttagaaatgttttgcctttctaagccttgtgctaaaggcgtataacggtggtgcctatctacttaagggggcattctagtcttaacttaaaagttgtctaaactgtccctccctggctttttttggtttggggtagacctaagggtgtttgttagtctcaaaactgtgaagtgacatgtcagaacagtccagactggtaagaaaattaatggcttcacttgaatttaaaccagctctagataggaaaaaaatcagtctcctcatttgctttttaaatggagtagtacatcccatattttagaacaagtaggggtgccttgcttaaataaaaatagcatttaatgtataattgtgtgaagggtttatggataaagctgtacttctgtcacaatgtggcagtactttctgctttaatattaaacagcttgttatttaaatattggacaaaatggctggcttcaaaatatagtcattaataaactaactttatgtgcacctgtgtaggagaatcaaaatcctgtatgctttctttgccttgttcctgttctcagggtgacgactgccaccaggagatgcagttctagttcttaaaattaaatttgcccaggtttctgacaggtgatacctggaagagagactatgtcttctcttacttaatacataaccatctttgattaccagctaagatgcgaaatcactgtactgtagtcaataaatgaagacttgtttcaggctgaagatta

SEQ ID NO: 292040 - DNA, 3228 bp, Homo sapiens
agactgggcggagcgtcgcgctctcctccacctccttccgactctcggaggccccccacccagtgcccgcggcgcatgtgccaggcacaccccacccccaaccggccctggattccacttccgttccaccatcgctgctggagcagctgccttcaggccctgcgccgcctccggagtccatggccggcacgcgctgggtactcggggcgctgctccggggctgcggctgtaactgcagcagctgccggcgcaccggcgccgcctgcctgcccttctactccgccgctggctctatcccccgtcgggcgtctcgggccgccgccgcctgctgctgctgctcggggccgccgcggccgctgcctcccagacgcgtggcctccagaccgggcctgtgcctcccgggaggctggcggggcctcccgctgtggccacctctgccgcggccgcggccgccgcgtcctaccctgccctccgtgcctctctgctgccgcagtcgctggcggcggcggccgccgtcccgacgcgcagctacagccaggtacgtgggcgccgtgagggacctggcgcgagatccctcccgggccgcgtgcacgcgcccccgcgcccctccgtccctccgtgtgcgcctcgcgggcacgcccggggatccgcgacactcgccgcacacccgcccccgtccaccctgtgctcctattgggccctggaacaagggaagctctcccaggcgtcgggtcttctgcttgttttgttctcgcctcgaatctctggtcggttgggcagtgagtccaaaactacttacctggaagaccttccaccaccccctgagtatgaattggccccgtccaagttagaagaggaagtggatgatgtctttctcattcgagctcaaggactgccctggtcatgcactatggaagatgtgcttaactttttttcagactgcagaatccgcaacggtgagaatggaatacattttctcctaaacagagatgggaaacgaaggggtgatgccttaattgaaatggagtcagagcaggatgtgcagaaagccttagagaagcaccgcatgtacatgggccagcggtatgtggaagtatatgagataaacaatgaagatgtggatgccttaatgaagagcttgcaggtcaaatcttcgcctgtggtaaatgatggtgtggttcgtttgagaggacttccttatagttgcaatgagaaagacattgtagacttctttgcaggactgaatatagttgacattacttttgtgatggactatagagggaggcgaaaaacaggggaagcctatgtgcaatttgaagaaccagaaatggccaaccaagccctgttgaaacacagggaagaaattggtaatcgatacatcgagatatttccaagcagaaggaatgaagttcgaacacatgtcggttcttataagggaaagaaaatcgcatcttttcctactgctaagtatataactgagccagaaatggtctttgaagaacatgaagtaaatgaggatattcaacccatgacagcttttgaaagtgagaaggaaatagaattgcctaaggaggtgccagaaaagcttccagaggctgctgattttggaactacgtcttctctgcattttgtccacatgagaggattacctttccaagccaatgcccaagacattataaacttttttgctccactcaagcctgttagaatcaccatggaatacagctccagtgggaaggccactggagaagctgatgtgcactttgagacccatgaggatgctgttgcagcgatgctcaaggatcggtcccacgttcatcataggtatattgaactgttcctgaattcatgtccaaaaggaaaataagactctaggggctccagataataagggtgaagcaagaagcatttcatttgcacatctttcttggacttgggatatacagttccagtttattagcagcaactgctagggaaatgattttggtgttttgggttaattgcttctaagaaaagtttcatagtggactgtttagaagaagaaatgaaagatccagtttgggattatgaaataaaccacaaattaaaatttttgtttaaactgtccaggatctgatttaaaaatatggtctttgttttatatgattaaatggtttgttttcatagatgatatgttactcattgtaaagaccacatatttttattcagcagtgttctttaaacgctttcatttaaaaagtaactttttttttttgcctgtgaattgagtgctctgatgtaaaacttctcatggagtgaaacagtgatttattttaaccaaacattcaccaaagcaaagaacggtttcagacctttgaactggtatggtttggcagaatagttttaaattttgctgtatttgattacttagagataggaatttttaaaaatcaaaacaaaaaataccacagcttagtgtaaatgacaatttggcggttttatgtctttagaaatgttttgcctttctaagccttgtgctaaaggcgtataacggtggtgcctatctacttaagggggcattctagtcttaacttaaaagttgtctaaactgtccctccctggctttttttggtttggggtagacctaagggtgtttgttagtctcaaaactgtgaagtgacatgtcagaacagtccagactggtaagaaaattaatggcttcacttgaatttaaaccagctctagataggaaaaaaatcagtctcctcatttgctttttaaatggagtagtacatcccatattttagaacaagtaggggtgccttgcttaaataaaaatagcatttaatgtataattgtgtgaagggtttatggataaagctgtacttctgtcacaatgtggcagtactttctgctttaatattaaacagcttgttatttaaatattggacaaaatggctggcttcaaaatatagtcattaataaactaactttatgtgcacctgtgtaggagaatcaaaatcctgtatgctttctttgccttgttcctgttctcagggtgacgactgccaccaggagatgcagttctagttcttaaaattaaatttgcccaggtttctgacaggtgatacctggaagagagactatgtcttctcttacttaatacataaccatctttgattaccagctaagatgcgaaatcactgtactgtagtcaataaatgaagacttgtttcaggctgaagatta

SEQ ID NO: 292041 - DNA, 3279 bp, Homo sapiens
agactgggcggagcgtcgcgctctcctccacctccttccgactctcggaggccccccacccagtgcccgcggcgcatgtgccaggcacaccccacccccaaccggccctggattccacttccgttccaccatcgctgctggagcagctgccttcaggccctgcgccgcctccggagtccatggccggcacgcgctgggtactcggggcgctgctccggggctgcggctgtaactgcagcagctgccggcgcaccggcgccgcctgcctgcccttctactccgccgctggctctatcccccgtcgggcgtctcgggccgccgccgcctgctgctgctgctcggggccgccgcggccgctgcctcccagacgcgtggcctccagaccgggcctgtgcctcccgggaggctggcggggcctcccgctgtggccacctctgccgcggccgcggccgccgcgtcctaccctgccctccgtgcctctctgctgccgcagtcgctggcggcggcggccgccgtcccgacgcgcagctacagccaggtacgtgggcgccgtgagggacctggcgcgagatccctcccgggccgcgtgcacgcgcccccgcgcccctccgtccctccgtgtgcgcctcgcgggcacgcccggggatccgcgacactcgccgcacacccgcccccgtccaccctgtgctcctattgggccctggaacaagggaagctctcccaggcgtcgggtcttctgcttgttttgttctcgcctcgaatctctggtcggttgggcagtgtaagtgtggctggggtgaatgttgaggccttgttccccgcctggcccatggagtccaaaactacttacctggaagaccttccaccaccccctgagtatgaattggccccgtccaagttagaagaggaagtggatgatgtctttctcattcgagctcaaggactgccctggtcatgcactatggaagatgtgcttaactttttttcagactgcagaatccgcaacggtgagaatggaatacattttctcctaaacagagatgggaaacgaaggggtgatgccttaattgaaatggagtcagagcaggatgtgcagaaagccttagagaagcaccgcatgtacatgggccagcggtatgtggaagtatatgagataaacaatgaagatgtggatgccttaatgaagagcttgcaggtcaaatcttcgcctgtggtaaatgatggtgtggttcgtttgagaggacttccttatagttgcaatgagaaagacattgtagacttctttgcaggactgaatatagttgacattacttttgtgatggactatagagggaggcgaaaaacaggggaagcctatgtgcaatttgaagaaccagaaatggccaaccaagccctgttgaaacacagggaagaaattggtaatcgatacatcgagatatttccaagcagaaggaatgaagttcgaacacatgtcggttcttataagggaaagaaaatcgcatcttttcctactgctaagtatataactgagccagaaatggtctttgaagaacatgaagtaaatgaggatattcaacccatgacagcttttgaaagtgagaaggaaatagaattgcctaaggaggtgccagaaaagcttccagaggctgctgattttggaactacgtcttctctgcattttgtccacatgagaggattacctttccaagccaatgcccaagacattataaacttttttgctccactcaagcctgttagaatcaccatggaatacagctccagtgggaaggccactggagaagctgatgtgcactttgagacccatgaggatgctgttgcagcgatgctcaaggatcggtcccacgttcatcataggtatattgaactgttcctgaattcatgtccaaaaggaaaataagactctaggggctccagataataagggtgaagcaagaagcatttcatttgcacatctttcttggacttgggatatacagttccagtttattagcagcaactgctagggaaatgattttggtgttttgggttaattgcttctaagaaaagtttcatagtggactgtttagaagaagaaatgaaagatccagtttgggattatgaaataaaccacaaattaaaatttttgtttaaactgtccaggatctgatttaaaaatatggtctttgttttatatgattaaatggtttgttttcatagatgatatgttactcattgtaaagaccacatatttttattcagcagtgttctttaaacgctttcatttaaaaagtaactttttttttttgcctgtgaattgagtgctctgatgtaaaacttctcatggagtgaaacagtgatttattttaaccaaacattcaccaaagcaaagaacggtttcagacctttgaactggtatggtttggcagaatagttttaaattttgctgtatttgattacttagagataggaatttttaaaaatcaaaacaaaaaataccacagcttagtgtaaatgacaatttggcggttttatgtctttagaaatgttttgcctttctaagccttgtgctaaaggcgtataacggtggtgcctatctacttaagggggcattctagtcttaacttaaaagttgtctaaactgtccctccctggctttttttggtttggggtagacctaagggtgtttgttagtctcaaaactgtgaagtgacatgtcagaacagtccagactggtaagaaaattaatggcttcacttgaatttaaaccagctctagataggaaaaaaatcagtctcctcatttgctttttaaatggagtagtacatcccatattttagaacaagtaggggtgccttgcttaaataaaaatagcatttaatgtataattgtgtgaagggtttatggataaagctgtacttctgtcacaatgtggcagtactttctgctttaatattaaacagcttgttatttaaatattggacaaaatggctggcttcaaaatatagtcattaataaactaactttatgtgcacctgtgtaggagaatcaaaatcctgtatgctttctttgccttgttcctgttctcagggtgacgactgccaccaggagatgcagttctagttcttaaaattaaatttgcccaggtttctgacaggtgatacctggaagagagactatgtcttctcttacttaatacataaccatctttgattaccagctaagatgcgaaatcactgtactgtagtcaataaatgaagacttgtttcaggctgaagatta

SEQ ID NO: 292042 - DNA, 2561 bp, Homo sapiens
ggcttgtagggaaggagcctgtccccatcgcgccgttccctctcctgtccccagggaaagacgagctgtcccggtttactgaaggtcacctctgcaactccactcatacagaaggagtccaaaactacttacctggaagaccttccaccaccccctgagtatgaattggccccgtccaagttagaagaggaagtggatgatgtctttctcattcgagctcaaggactgccctggtcatgcactatggaagatgtgcttaactttttttcagactgcagaatccgcaacggtgagaatggaatacattttctcctaaacagagatgggaaacgaaggggtgatgccttaattgaaatggagtcagagcaggatgtgcagaaagccttagagaagcaccgcatgtacatgggccagcggtatgtggaagtatatgagataaacaatgaagatgtggatgccttaatgaagagcttgcaggtcaaatcttcgcctgtggtaaatgatggtgtggttcgtttgagaggacttccttatagttgcaatgagaaagacattgtagacttctttgcaggactgaatatagttgacattacttttgtgatggactatagagggaggcgaaaaacaggggaagcctatgtgcaatttgaagaaccagaaatggccaaccaagccctgttgaaacacagggaagaaattggtaatcgatacatcgagatatttccaagcagaaggaatgaagttcgaacacatgtcggttcttataagggaaagaaaatcgcatcttttcctactgctaagtatataactgagccagaaatggtctttgaagaacatgaagtaaatgaggatattcaacccatgacagcttttgaaagtgagaaggaaatagaattgcctaaggaggtgccagaaaagcttccagaggctgctgattttggaactacgtcttctctgcattttgtccacatgagaggattacctttccaagccaatgcccaagacattataaacttttttgctccactcaagcctgttagaatcaccatggaatacagctccagtgggaaggccactggagaagctgatgtgcactttgagacccatgaggatgctgttgcagcgatgctcaaggatcggtcccacgttcatcataggtatattgaactgttcctgaattcatgtccaaaaggaaaataagactctaggggctccagataataagggtgaagcaagaagcatttcatttgcacatctttcttggacttgggatatacagttccagtttattagcagcaactgctagggaaatgattttggtgttttgggttaattgcttctaagaaaagtttcatagtggactgtttagaagaagaaatgaaagatccagtttgggattatgaaataaaccacaaattaaaatttttgtttaaactgtccaggatctgatttaaaaatatggtctttgttttatatgattaaatggtttgttttcatagatgatatgttactcattgtaaagaccacatatttttattcagcagtgttctttaaacgctttcatttaaaaagtaactttttttttttgcctgtgaattgagtgctctgatgtaaaacttctcatggagtgaaacagtgatttattttaaccaaacattcaccaaagcaaagaacggtttcagacctttgaactggtatggtttggcagaatagttttaaattttgctgtatttgattacttagagataggaatttttaaaaatcaaaacaaaaaataccacagcttagtgtaaatgacaatttggcggttttatgtctttagaaatgttttgcctttctaagccttgtgctaaaggcgtataacggtggtgcctatctacttaagggggcattctagtcttaacttaaaagttgtctaaactgtccctccctggctttttttggtttggggtagacctaagggtgtttgttagtctcaaaactgtgaagtgacatgtcagaacagtccagactggtaagaaaattaatggcttcacttgaatttaaaccagctctagataggaaaaaaatcagtctcctcatttgctttttaaatggagtagtacatcccatattttagaacaagtaggggtgccttgcttaaataaaaatagcatttaatgtataattgtgtgaagggtttatggataaagctgtacttctgtcacaatgtggcagtactttctgctttaatattaaacagcttgttatttaaatattggacaaaatggctggcttcaaaatatagtcattaataaactaactttatgtgcacctgtgtaggagaatcaaaatcctgtatgctttctttgccttgttcctgttctcagggtgacgactgccaccaggagatgcagttctagttcttaaaattaaatttgcccaggtttctgacaggtgatacctggaagagagactatgtcttctcttacttaatacataaccatctttgattaccagctaagatgcgaaatcactgtactgtagtcaataaatgaagacttgtttcaggctgaagatta

SEQ ID NO: 292043 - DNA, 2499 bp, Homo sapiens
  misc_feature (4)..(4): n is a, c, g, or t
  misc_feature (13)..(13): n is a, c, g, or t
gcgnccgccggtncctaccctgccctccgtcccgacgcgcactatcagccaggagtccaaaactacttacctggaagaccttccaccaccccctgagtatgaattggccccgtccaagttagaagaggaagtggatgatgtctttctcattcgagctcaaggactgccctggtcatgcactatggaagatgtgcttaactttttttcagactgcagaatccgcaacggtgagaatggaatacattttctcctaaacagagatgggaaacgaaggggtgatgccttaattgaaatggagtcagagcaggatgtgcagaaagccttagagaagcaccgcatgtacatgggccagcggtatgtggaagtatatgagataaacaatgaagatgtggatgccttaatgaagagcttgcaggtcaaatcttcgcctgtggtaaatgatggtgtggttcgtttgagaggacttccttatagttgcaatgagaaagacattgtagacttctttgcaggactgaatatagttgacattacttttgtgatggactatagagggaggcgaaaaacaggggaagcctatgtgcaatttgaagaaccagaaatggccaaccaagccctgttgaaacacagggaagaaattggtaatcgatacatcgagatatttccaagcagaaggaatgaagttcgaacacatgtcggttcttataagggaaagaaaatcgcatcttttcctactgctaagtatataactgagccagaaatggtctttgaagaacatgaagtaaatgaggatattcaacccatgacagcttttgaaagtgagaaggaaatagaattgcctaaggaggtgccagaaaagcttccagaggctgctgattttggaactacgtcttctctgcattttgtccacatgagaggattacctttccaagccaatgcccaagacattataaacttttttgctccactcaagcctgttagaatcaccatggaatacagctccagtgggaaggccactggagaagctgatgtgcactttgagacccatgaggatgctgttgcagcgatgctcaaggatcggtcccacgttcatcataggtatattgaactgttcctgaattcatgtccaaaaggaaaataagactctaggggctccagataataagggtgaagcaagaagcatttcatttgcacatctttcttggacttgggatatacagttccagtttattagcagcaactgctagggaaatgattttggtgttttgggttaattgcttctaagaaaagtttcatagtggactgtttagaagaagaaatgaaagatccagtttgggattatgaaataaaccacaaattaaaatttttgtttaaactgtccaggatctgatttaaaaatatggtctttgttttatatgattaaatggtttgttttcatagatgatatgttactcattgtaaagaccacatatttttattcagcagtgttctttaaacgctttcatttaaaaagtaactttttttttttgcctgtgaattgagtgctctgatgtaaaacttctcatggagtgaaacagtgatttattttaaccaaacattcaccaaagcaaagaacggtttcagacctttgaactggtatggtttggcagaatagttttaaattttgctgtatttgattacttagagataggaatttttaaaaatcaaaacaaaaaataccacagcttagtgtaaatgacaatttggcggttttatgtctttagaaatgttttgcctttctaagccttgtgctaaaggcgtataacggtggtgcctatctacttaagggggcattctagtcttaacttaaaagttgtctaaactgtccctccctggctttttttggtttggggtagacctaagggtgtttgttagtctcaaaactgtgaagtgacatgtcagaacagtccagactggtaagaaaattaatggcttcacttgaatttaaaccagctctagataggaaaaaaatcagtctcctcatttgctttttaaatggagtagtacatcccatattttagaacaagtaggggtgccttgcttaaataaaaatagcatttaatgtataattgtgtgaagggtttatggataaagctgtacttctgtcacaatgtggcagtactttctgctttaatattaaacagcttgttatttaaatattggacaaaatggctggcttcaaaatatagtcattaataaactaactttatgtgcacctgtgtaggagaatcaaaatcctgtatgctttctttgccttgttcctgttctcagggtgacgactgccaccaggagatgcagttctagttcttaaaattaaatttgcccaggtttctgacaggtgatacctggaagagagactatgtcttctcttacttaatacataaccatctttgattaccagctaagatgcgaaatcactgtactgtagtcaataaatgaagacttgtttcaggctgaagatta

SEQ ID NO: 292044 - DNA, 2720 bp, Homo sapiens
agactgggcggagcgtcgcgctctcctccacctccttccgactctcggaggccccccacccagtgcccgcggcgcatgtgccaggcacaccccacccccaaccggccctggattccacttccgttccaccatcgctgctggagcagctgccttcaggccctgcgccgcctccggagtccatggccggcacgcgctgggtactcggggcgctgctccggggctgcggctgtaactgcagcagctgccggcgcaccggcgccgcctgcctgcccttctactccgccgctggctctatcccccgtcgggcgtctcgggccgccgccgcctgctgctgctgctcggggccgccgcggccgctgcctcccagacgcgtggcctccagaccgggcctgtgcctcccgggaggctggcggggcctcccgctgtggccacctctgccgcggccgcggccgccgcgtcctaccctgccctccgtgcctctctgctgccgcagtcgctggcggcggcggccgccgtcccgacgcgcagctacagccaggagtccaaaactacttacctggaagaccttccaccaccccctgagtatgaattggccccgtccaagttagaagaggaagtggatgatgtctttctcattcgagctcaaggactgccctggtcatgcactatggaagatgtgcttaactttttttcagactgcagaatccgcaacggtgagaatggaatacattttctcctaaacagagatgggaaacgaaggggtgatgccttaattgaaatggagtcagagcaggatgtgcagaaagccttagagaagcaccgcatgtacatgggccagcggtatgtggaagtatatgagataaacaatgaagatgtggatgccttaatgaagagcttgcaggtcaaatcttcgcctgtggtaaatgatggtgtggttcgtttgagaggacttccttatagttgcaatgagaaagacattgtagacttctttgcaggactgaatatagttgacattacttttgtgatggactatagagggaggcgaaaaacaggggaagcctatgtgcaatttgaagaaccagaaatggccaaccaagccctgttgaaacacagggaagaaattggtaatcgatacatcgagatatttccaagcagaaggaatgaagttcgaacacatgtcggttcttataagggaaagaaaatcgcatcttttcctactgctaagtatataactgagccagaaatggtctttgaagaacatgaagtaaatgaggatattcaacccatgacagcttttgaaagtgagaaggaaatagaattgcctaaggaggtgccagaaaagcttccagaggctgctgattttggaactacgtcttctctgcattttgtccacatgagaggattacctttccaagccaatgcccaagacattataaacttttttgctccactcaagcctgttagaatcaccatggaatacagctccagtgggaaggccactggagaagctgatgtgcactttgagacccatgaggatgctgttgcagcgatgctcaaggatcggtcccacgttcatcataggtatattgaactgttcctgaattcatgtccaaaaggaaaataagactctaggggctccagataataagggtgaagcaagaagcatttcatttgcacatctttcttggacttgggatatacagttccagtttattagcagcaactgctagggaaatgattttggtgttttgggttaattgcttctaagaaaagtttcatagtggactgtttagaagaagaaatgaaagatccagtttgggattatgaaataaaccacaaattaaaatttttgtttaaactgtccaggatctgatttaaaaatatggtctttgttttatatgattaaatggtttgttttcatagatgatatgttactcattgtaaagaccacatatttttattcagcagtgttctttaaacgctttcatttaaaaagtaactttttttttttgcctgtgaattgagtgctctgatgtaaaacttctcatggagtgaaacagtgatttattttaaccaaacattcaccaaagcaaagaacggtttcagacctttgaactggtatggtttggcagaatagttttaaattttgctgtatttgattacttagagataggaatttttaaaaatcaaaacaaaaaataccacagcttagtgtaaatgacaatttggcggttttatgtctttagaaatgttttgcctttctaagccttgtgctaaaggcgtataacggtggtgcctatctacttaagggggcattctagtcttaacttaaaagttgtctaaactgtccctccctggctttttttggtttggggtagacctaagggtgtttgttagtcagaacagtccagactggtaagaaaattaatggcttcacttgaatttaaaccagctctagataggaaaaaaatcagtctcctcatttgctttttaaatggagtagtacatcccatattttagaacaagtaggggtgccttgcttaaataaaaatagcatttaatgtataattgtgtgaagggtttatggataaagctgtacttctgtcacaatgtggcagtactttctgctttaatattaaacagcttgttatttaaatattggacaaaatggctggcttcaaaatatagtcattaataaactaactttatgtgcacctgtg

SEQ ID NO: 292045 - DNA, 1863 bp, Homo sapiens
agactgggcggagcgtcgcgctctcctccacctccttccgactctcggaggccccccacccagtgcccgcggcgcatgtgccaggcacaccccacccccaaccggccctggattccacttccgttccaccatcgctgctggagcagctgccttcaggccctgcgccgcctccggagtccatggccggcacgcgctgggtactcggggcgctgctccggggctgcggctgtaactgcagcagctgccggcgcaccggcgccgcctgcctgcccttctactccgccgctggctctatcccccgtcgggcgtctcgggccgccgccgcctgctgctgctgctcggggccgccgcggccgctgcctcccagacgcgtggcctccagaccgggcctgtgcctcccgggaggctggcggggcctcccgctgtggccacctctgccgcggccgcggccgccgcgtcctaccctgccctccgtgcctctctgctgccgcagtcgctggcggcggcggccgccgtcccgacgcgcagctacagccaggagtccaaaactacttacctggaagaccttccaccaccccctgagtatgaattggccccgtccaagttagaagaggaagtggatgatgtctttctcattcgagctcaaggactgccctggtcatgcactatggaagatgtgcttaactttttttcagactgcagaatccgcaacggtgagaatggaatacattttctcctaaacagagatgggaaacgaaggggtgatgccttaattgaaatggagtcagagcaggatgtgcagaaagccttagagaagcaccgcatgtacatgggccagcggtatgtggaagtatatgagataaacaatgaagatgtggatgccttaatgaagagcttgcaggtcaaatcttcgcctgtggtaaatgatggtgtggttcgtttgagaggacttccttatagttgcaatgagaaagacattgtagacttctttgcaggactgaatatagttgacattacttttgtgatggactatagagggaggcgaaaaacaggggaagcctatgtgcaatttgaagaaccagaaatggccaaccaagccctgttgaaacacagggaagaaattggtaatcgatacatcgagatatttccaagcagaaggaatgaagttcgaacacatgtcggttcttataagggaaagaaaatcgcatcttttcctactgctaagtatataactgagccagaaatggtctttgaagaacatgaagtaaatgaggatattcaacccatgacagcttttgaaagtgagaaggaaatagaattgcctaaggaggtgccagaaaagcttccagaggctgctgattttggaactacgtcttctctgcattttgtccacatgagaggattacctttccaagccaatgcccaagacattataaacttttttgctccactcaagcctgttagaatcaccatggaatacagctccagtgggaaggccactggagaagctgatgtgcactttgagacccatgaggatgctgttgcagcgatgctcaaggatcggtcccacgttcatcataggtatattgaactgttcctgaattcatgtccaaaaggaaaataagactctaggggctccagataataagggtgaagcaagaagcatttcatttgcacatctttcttggacttgggatatacagttccagtttattagcagcaactgctagggaaatgattttggtgttttgggttaattgcttctaagaaaagtttcatagtggactgtttagaagaagaaatgaaagatccagtttgggattatgaaataaaccacaaattaaaatttttgtttaaactgtc

SEQ ID NO: 292046 - DNA, 2631 bp, Homo sapiens
atggcgacatttcaagcagtttaagattgccaagacaaaatagtgatggtggtcagaaaaataagcctcgtgaacatattatagactgtggagatatagtctggagtcttgcttttgggtcatcagttccagaaaaacagagtcgctgtgtaaatatagaatggcatcgcttcagatttggacaagatcatccttgttgatttccaggtaagccccttgaaatggtcgccaatccggcgaccatttcaagttagaagaggaagtggatgatgtctttctcattcgagctcaaggactgccctggtcatgcactatggaagatgtgcttaactttttttcagactgcagaatccgcaacggtgagaatggaatacattttctcctaaacagagatgggaaacgaaggggtgatgccttaattgaaatggagtcagagcaggatgtgcagaaagccttagagaagcaccgcatgtacatgggccagcggtatgtggaagtatatgagataaacaatgaagatgtggatgccttaatgaagagcttgcaggtcaaatcttcgcctgtggtaaatgatggtgtggttcgtttgagaggacttccttatagttgcaatgagaaagacattgtagacttctttgcaggactgaatatagttgacattacttttgtgatggactatagagggaggcgaaaaacaggggaagcctatgtgcaatttgaagaaccagaaatggccaaccaagccctgttgaaacacagggaagaaattggtaatcgatacatcgagatatttccaagcagaaggaatgaagttcgaacacatgtcggttcttataagggaaagaaaatcgcatcttttcctactgctaagtatataactgagccagaaatggtctttgaagaacatgaagtaaatgaggatattcaacccatgacagcttttgaaagtgagaaggaaatagaattgcctaaggaggtgccagaaaagcttccagaggctgctgattttggaactacgtcttctctgcattttgtccacatgagaggattacctttccaagccaatgcccaagacattataaacttttttgctccactcaagcctgttagaatcaccatggaatacagctccagtgggaaggccactggagaagctgatgtgcactttgagacccatgaggatgctgttgcagcgatgctcaaggatcggtcccacgttcatcataggtatattgaactgttcctgaattcatgtccaaaaggaaaataagactctaggggctccagataataagggtgaagcaagaagcatttcatttgcacatctttcttggacttgggatatacagttccagtttattagcagcaactgctagggaaatgattttggtgttttgggttaattgcttctaagaaaagtttcatagtggactgtttagaagaagaaatgaaagatccagtttgggattatgaaataaaccacaaattaaaatttttgtttaaactgtccaggatctgatttaaaaatatggtctttgttttatatgattaaatggtttgttttcatagatgatatgttactcattgtaaagaccacatatttttattcagcagtgttctttaaacgctttcatttaaaaagtaactttttttttttgcctgtgaattgagtgctctgatgtaaaacttctcatggagtgaaacagtgatttattttaaccaaacattcaccaaagcaaagaacggtttcagacctttgaactggtatggtttggcagaatagttttaaattttgctgtatttgattacttagagataggaatttttaaaaatcaaaacaaaaaataccacagcttagtgtaaatgacaatttggcggttttatgtctttagaaatgttttgcctttctaagccttgtgctaaaggcgtataacggtggtgcctatctacttaagggggcattctagtcttaacttaaaagttgtctaaactgtccctccctggctttttttggtttggggtagacctaagggtgtttgttagtctcaaaactgtgaagtgacatgtcagaacagtccagactggtaagaaaattaatggcttcacttgaatttaaaccagctctagataggaaaaaaatcagtctcctcatttgctttttaaatggagtagtacatcccatattttagaacaagtaggggtgccttgcttaaataaaaatagcatttaatgtataattgtgtgaagggtttatggataaagctgtacttctgtcacaatgtggcagtactttctgctttaatattaaacagcttgttatttaaatattggacaaaatggctggcttcaaaatatagtcattaataaactaactttatgtgcacctgtgtaggagaatcaaaatcctgtatgctttctttgccttgttcctgttctcagggtgacgactgccaccaggagatgcagttctagttcttaaaattaaatttgcccaggtttctgacaggtgatacctggaagagagactatgtcttctcttacttaatacataaccatctttgattaccagctaagatgcgaaatcactgtactgtagtcaataaatgaagacttgtttcaggctgaagatta

SEQ ID NO: 292047 - DNA, 2411 bp, Homo sapiens
gtgggttgactgtgggttgaccgtggctgtgggttgaccgtggcttgtgggttgactgtgggttgaccgtggctgtgggttgaccgtggcttgtgggttgaccgtggcttgtgggttgacccgtagcttgtgggttgaccgtggaatggaatacattttctcctaaacagagatgggaaacgaaggggtgatgccttaattgaaatggagtcagagcaggatgtgcagaaagccttagagaagcaccgcatgtacatgggccagcggtatgtggaagtatatgagataaacaatgaagatgtggatgccttaatgaagagcttgcaggtcaaatcttcgcctgtggtaaatgatggtgtggttcgtttgagaggacttccttatagttgcaatgagaaagacattgtagacttctttgcaggactgaatatagttgacattacttttgtgatggactatagagggaggcgaaaaacaggggaagcctatgtgcaatttgaagaaccagaaatggccaaccaagccctgttgaaacacagggaagaaattggtaatcgatacatcgagatatttccaagcagaaggaatgaagttcgaacacatgtcggttcttataagggaaagaaaatcgcatcttttcctactgctaagtatataactgagccagaaatggtctttgaagaacatgaagtaaatgaggatattcaacccatgacagcttttgaaagtgagaaggaaatagaattgcctaaggaggtgccagaaaagcttccagaggctgctgattttggaactacgtcttctctgcattttgtccacatgagaggattacctttccaagccaatgcccaagacattataaacttttttgctccactcaagcctgttagaatcaccatggaatacagctccagtgggaaggccactggagaagctgatgtgcactttgagacccatgaggatgctgttgcagcgatgctcaaggatcggtcccacgttcatcataggtatattgaactgttcctgaattcatgtccaaaaggaaaataagactctaggggctccagataataagggtgaagcaagaagcatttcatttgcacatctttcttggacttgggatatacagttccagtttattagcagcaactgctagggaaatgattttggtgttttgggttaattgcttctaagaaaagtttcatagtggactgtttagaagaagaaatgaaagatccagtttgggattatgaaataaaccacaaattaaaatttttgtttaaactgtccaggatctgatttaaaaatatggtctttgttttatatgattaaatggtttgttttcatagatgatatgttactcattgtaaagaccacatatttttattcagcagtgttctttaaacgctttcatttaaaaagtaactttttttttttgcctgtgaattgagtgctctgatgtaaaacttctcatggagtgaaacagtgatttattttaaccaaacattcaccaaagcaaagaacggtttcagacctttgaactggtatggtttggcagaatagttttaaattttgctgtatttgattacttagagataggaatttttaaaaatcaaaacaaaaaataccacagcttagtgtaaatgacaatttggcggttttatgtctttagaaatgttttgcctttctaagccttgtgctaaaggcgtataacggtggtgcctatctacttaagggggcattctagtcttaacttaaaagttgtctaaactgtccctccctggctttttttggtttggggtagacctaagggtgtttgttagtctcaaaactgtgaagtgacatgtcagaacagtccagactggtaagaaaattaatggcttcacttgaatttaaaccagctctagataggaaaaaaatcagtctcctcatttgctttttaaatggagtagtacatcccatattttagaacaagtaggggtgccttgcttaaataaaaatagcatttaatgtataattgtgtgaagggtttatggataaagctgtacttctgtcacaatgtggcagtactttctgctttaatattaaacagcttgttatttaaatattggacaaaatggctggcttcaaaatatagtcattaataaactaactttatgtgcacctgtgtaggagaatcaaaatcctgtatgctttctttgccttgttcctgttctcagggtgacgactgccaccaggagatgcagttctagttcttaaaattaaatttgcccaggtttctgacaggtgatacctggaagagagactatgtcttctcttacttaatacataaccatctttgattaccagctaagatgcgaaatcactgtactgtagtcaataaatgaagacttgtttcaggctgaagatta

SEQ ID NO: 292048 - DNA, 1922 bp, Homo sapiens
agactgggcggagcgtcgcgctctcctccacctccttccgactctcggaggccccccacccagtgcccgcggcgcatgtgccaggcacaccccacccccaaccggccctggattccacttccgttccaccatcgctgctggagcagctgccttcaggccctgcgccgcctccggagtccatggccggcacgcgctgggtactcggggcgctgctccggggctgcggctgtaactgcagcagctgccggcgcaccggcgccgcctgcctgcccttctactccgccgctggctctatcccccgtcgggcgtctcgggccgccgccgcctgctgctgctgctcggggccgccgcggccgctgcctcccagacgcgtggcctccagaccgggcctgtgcctcccgggaggctggcggggcctcccgctgtggccacctctgccgcggccgcggccgccgcgtcctaccctgccctccgtgcctctctgctgccgcagtcgctggcggcggcggccgccgtcccgacgcgcagctacagccaggagtccaaaactacttacctggaagaccttccaccaccccctgagtatgaattggccccgtccaagttagaagaggaagtggatgatgtctttctcattcgagctcaaggactgccctggtcatgcactatggaagatgtgcttaactttttttcagactgcagaatccgcaacggtgagaatggaatacattttctcctaaacagagatgggaaacgaaggggtgatgccttaattgaaatggagtcagagcaggatgtgcagaaagccttagagaagcaccgcatgtacatgggccagcggtatgtggaagtatatgagataaacaatgaagatgtggatgccttaatgaagagcttgcaggtcaaatcttcgcctgtggtaaatgatggtgtggttcgtttgagaggacttccttatagttgcaatgagaaagacattgtagacttctttgcaggactgaatatagttgacattacttttgtgatggactatagagggaggcgaaaaacaggggaagcctatgtgcaatttgaagaaccagaaatggccaaccaagccctgttgaaacacagggaagaaattggtaatcgatacatcgagatatttccaagcagaaggaatgaagttcgaacacatgtcggttcttataagggaaagaaaatcgcatcttttcctactgctaagtatataactgagccagaaatggtctttgaagaacatgaagtaaatgaggatattcaacccatgacagcttttgaaagtgagaaggaaatagaattgcctaaggaggtgccagaaaagcttccagaggctgctgattttggaactacgtcttctctgcattttgtccacatgagaggattacctttccaagccaatgcccaagacattataaacttttttgctccactcaagcctgttagaatcaccatggaatacagctccagtgggaaggccactggagaagctgatgtgcactttgagacccatgaggatgctgttgcagcgatgctcaaggatcggtcccacgttcatcataggtatattgaactgttcctgaattcatgtccaaaaggaaaataagactctaggggctccagataataagggtgaagcaagaagcatttcatttgcacatctttcttggacttgggatatacagttccagtttattagcagcaactgctagggaaatgattttggtgttttgggttaattgcttctaagaaaagtttcatagtggactgtttagaagaagaaatgaaagatccagtttgggattatgaaataaaccacaaattaaaatttttgtttaaactgtccaggatctgatttaaaaatatggtctttgttttatatgattaaatggtttgttttcata

SEQ ID NO: 292049 - DNA, 2631 bp, Homo sapiens
agactgggcggagcgtcgcgctctcctccacctccttccgactctcggaggccccccacccagtgcccgcggcgcatgtgccaggcacaccccacccccaaccggccctggattccacttccgttccaccatcgctgctggagcagctgccttcaggccctgcgccgcctccggagtccatggccggcacgcgctgggtactcggggcgctgctccggggctgcggctgtaactgcagcagctgccggcgcaccggcgccgcctgcctgcccttctactccgccgctggctctatcccccgtcgggcgtctcgggccgccgccgcctgctgctgctgctcggggccgccgcggccgctgcctcccagacgcgtggcctccagaccgggcctgtgcctcccgggaggctggcggggcctcccgctgtggccacctctgccgcggccgcggccgccgcgtcctaccctgccctccgtgcctctctgctgccgcagtcgctggcggcggcggccgccgtcccgacgcgcagctacagccaggagtccaaaactacttacctggaagaccttccaccaccccctgagtatgaattggccccgtccaagttagaagaggaagtggatgatgtctttctcattcgaggactgaatatagttgacattacttttgtgatggactatagagggaggcgaaaaacaggggaagcctatgtgcaatttgaagaaccagaaatggccaaccaagccctgttgaaacacagggaagaaattggtaatcgatacatcgagatatttccaagcagaaggaatgaagttcgaacacatgtcggttcttataagggaaagaaaatcgcatcttttcctactgctaagtatataactgagccagaaatggtctttgaagaacatgaagtaaatgaggatattcaacccatgacagcttttgaaagtgagaaggaaatagaattgcctaaggaggtgccagaaaagcttccagaggctgctgattttggaactacgtcttctctgcattttgtccacatgagaggattacctttccaagccaatgcccaagacattataaacttttttgctccactcaagcctgttagaatcaccatggaatacagctccagtgggaaggccactggagaagctgatgtgcactttgagacccatgaggatgctgttgcagcgatgctcaaggatcggtcccacgttcatcataggtatattgaactgttcctgaattcatgtccaaaaggaaaataagactctaggggctccagataataagggtgaagcaagaagcatttcatttgcacatctttcttggacttgggatatacagttccagtttattagcagcaactgctagggaaatgattttggtgttttgggttaattgcttctaagaaaagtttcatagtggactgtttagaagaagaaatgaaagatccagtttgggattatgaaataaaccacaaattaaaatttttgtttaaactgtccaggatctgatttaaaaatatggtctttgttttatatgattaaatggtttgttttcatagatgatatgttactcattgtaaagaccacatatttttattcagcagtgttctttaaacgctttcatttaaaaagtaactttttttttttgcctgtgaattgagtgctctgatgtaaaacttctcatggagtgaaacagtgatttattttaaccaaacattcaccaaagcaaagaacggtttcagacctttgaactggtatggtttggcagaatagttttaaattttgctgtatttgattacttagagataggaatttttaaaaatcaaaacaaaaaataccacagcttagtgtaaatgacaatttggcggttttatgtctttagaaatgttttgcctttctaagccttgtgctaaaggcgtataacggtggtgcctatctacttaagggggcattctagtcttaacttaaaagttgtctaaactgtccctccctggctttttttggtttggggtagacctaagggtgtttgttagtctcaaaactgtgaagtgacatgtcagaacagtccagactggtaagaaaattaatggcttcacttgaatttaaaccagctctagataggaaaaaaatcagtctcctcatttgctttttaaatggagtagtacatcccatattttagaacaagtaggggtgccttgcttaaataaaaatagcatttaatgtataattgtgtgaagggtttatggataaagctgtacttctgtcacaatgtggcagtactttctgctttaatattaaacagcttgttatttaaatattggacaaaatggctggcttcaaaatatagtcattaataaactaactttatgtgcacctgtgtaggagaatcaaaatcctgtatgctttctttgccttgttcctgttctcagggtgacgactgccaccaggagatgcagttctagttcttaaaattaaatttgcccaggtttctgacaggtgatacctggaagagagactatgtcttctcttacttaatacataaccatctttgattaccagctaagatgcgaaatcactgtactgtagtcaataaatgaagacttgtttcaggctgaagatta

SEQ ID NO: 292050 - DNA, 1944 bp, Homo sapiens
agactgggcggagcgtcgcgctctcctccacctccttccgactctcggaggccccccacccagtgcccgcggcgcatgtgccaggcacaccccacccccaaccggccctggattccacttccgttccaccatcgctgctggagcagctgccttcaggccctgcgccgcctccggagtccatggccggcacgcgctgggtactcggggcgctgctccggggctgcggctgtaactgcagcagctgccggcgcaccggcgccgcctgcctgcccttctactccgccgctggctctatcccccgtcgggcgtctcgggccgccgccgcctgctgctgctgctcggggccgccgcggccgctgcctcccagacgcgtggcctccagaccgggcctgtgcctcccgggaggctggcggggcctcccgctgtggccacctctgccgcggccgcggccgccgcgtcctaccctgccctccgtgcctctctgctgccgcagtcgctggcggcggcggccgccgtcccgacgcgcagctacagccaggagtccaaaactacttacctggaagaccttccaccaccccctgagtatgaattggccccgtccaagttagaagaggaagtggatgatgtctttctcattcgagctcaaggactgccctggtcatgcactatggaagatgtgcttaactttttttcagactgcagaatccgcaacggtgagaatggaatacattttctcctaaacagagatgggaaacgaaggggtgatgccttaattgaaatggagtcagagcaggatgtgcagaaagccttagagaagcaccgcatgtacatgggccagcggtatgtggaagtatatgagataaacaatgaagatgtggatgccttaatgaagagcttgcaggtcaaatcttcgcctgtggtaaatgatggtgtggttcgtttgagaggacttccttatagttgcaatgagaaagacattgtagacttctttgcaggactgaatatagttgacattacttttgtgatggactatagagggaggcgaaaaacaggggaagcctatgtgcaatttgaagaaccagaaatggccaaccaagccctgttgaaacacagggaagaaattggtaatcgatacatcgagatatttccaagcagaaggaatgaagttcgaacacatgtcggttcttataagggaaagaaaatcgcatcttttcctactgctaagtatataactgagccagaaatggtctttgaagaacatgaagtaaatgaggatattcaacccatgacagcttttgaaagtgagaaggaaatagaattgcctaaggaggtgccagaaaagcttccagaggctgctgattttggaactacgtcttctctgcattttgtccacatgagaggattacctttccaagccaatgcccaagacattataaacttttttgctccactcaagcctgttagaatcaccatggaatacagctccagtgggaaggccactggagaagctgatgtgcactttgagacccatgaggatgctgttgcagcgatgctcaaggatcggtcccacgttcggtgaagcaagaagcatttcatttgcacatctttcttggacttgggatatacagttccagtttattagcagcaactgctagggaaatgattttggtgttttgggttaattgcttctaagaaaagtttcatagtggactgtttagaagaagaaatgaaagatccagtttgggattatgaaataaaccacaaattaaaatttttgtttaaactgtcaaaaaaaaaacaaccaccctcgccacccgcacagtcaacggcctaacagaccgacacgcacaacacaaccggcggacaggcacacacagagacaggcgggcaacctacggagatctcgacaccatcaaccggacagctgtgactcaagacaccggc

SEQ ID NO: 292051 - DNA, 1942 bp, Homo sapiens
agactgggcggagcgtcgcgctctcctccacctccttccgactctcggaggccccccacccagtgcccgcggcgcatgtgccaggcacaccccacccccaaccggccctggattccacttccgttccaccatcgctgctggagcagctgccttcaggccctgcgccgcctccggagtccatggccggcacgcgctgggtactcggggcgctgctccggggctgcggctgtaactgcagcagctgccggcgcaccggcgccgcctgcctgcccttctactccgccgctggctctatcccccgtcgggcgtctcgggccgccgccgcctgctgctgctgctcggggccgccgcggccgctgcctcccagacgcgtggcctccagaccgggcctgtgcctcccgggaggctggcggggcctcccgctgtggccacctctgccgcggccgcggccgccgcgtcctaccctgccctccgtgcctctctgctgccgcagtcgctggcggcggcggccgccgtcccgacgcgcagctacagccaggagtccaaaactacttacctggaagaccttccaccaccccctgagtatgaattggccccgtccaagttagaagaggaagtggatgatgtctttctcattcgagctcaaggactgccctggtcatgcactatggaagatgtgcttaactttttttcagactgcagaatccgcaacggtgagaatggaatacattttctcctaaacagagatgggaaacgaaggggtgatgccttaattgaaatggagtcagagcaggatgtgcagaaagccttagagaagcaccgcatgtacatgggccagcggtatgtggaagtatatgagataaacaatgaagatgtggatgccttaatgaagagcttgcaggtcaaatcttcgcctgtggtaaatgatggtgtggttcgtttgagaggacttccttatagttgcaatgagaaagacattgtagacttctttgcaggactgaatatagttgacattacttttgtgatggactatagagggaggcgaaaaacaggggaagcctatgtgcaatttgaagaaccagaaatggccaaccaagccctgttgaaacacagggaagaaattggtaatcgatacatcgagatatttccaagcagaaggaatgaagttcgaacacatgtcggttcttataagggaaagaaaatcgcatcttttcctactgctaagtatataactgagccagaaatggtctttgaagaacatgaagtaaatgaggatattcaacccatgacagcttttgaaagtgagaaggaaatagaattgcctaaggaggtgccagaaaagcttccagaggctgctgattttggaactacgtcttctctgcattttgtccacatgagaggattacctttccaagccaatgcccaagacattataaacttttttgctccactcaagcctgttagaatcaccatggaatacagctccagtgggaaggccactggagaagctgatgtgcactttgagacccatgaggatgctgttgcagcgatgctcaaggatcggtcccacgttcatcataggtatattgaactgttcctgaattcatgtccaaaaggaaaataagactctaggggctccagataataaggagcagaagcatttcattgccattcttcttggcctggatatcagtccagtttattagcagcatgtacggcacagcattggggtggggtaatgttctagaaacgtcatgtggctgttacagacaaatgcagccccggtggctttcaactacccaattctaattgggtacggcggctgttaaatgggtgctgttagtacagtggtccgaggatgtcctgtagaaccattttcgggggtaacgccctaaaacgtgggggaggcggaacaggcggggtccacacaacacagcagggg

SEQ ID NO: 292052 - DNA, 1860 bp, Homo sapiens
ggccaggctggttttgatctcctgacctcaagcgatccactgtcctcggcctcccaaagtgttgagattacaggtgtgagccaccatgctcgctgagagcagatatttgaaatgtcactttgagttctgagaaaaagtaaaaagccagaagacatactagatatataaatatattactgcttaaaaagatttcctaaaaagaaatgtatcaagtgtatgaatcaaagtctgaaagaaagatgaagagccaccagacttctaggtaggtttacatccatcatgttcctcttgactgcctttgtttgtcgtttagttttttgctccactcaagcctgttagaatcaccatggaatacagctccagtgggaaggccactggagaagctgatgtgcactttgagacccatgaggatgctgttgcagcgatgctcaaggatcggtcccacgttcatcataggtatattgaactgttcctgaattcatgtccaaaaggaaaataagactctaggggctccagataataagggtgaagcaagaagcatttcatttgcacatctttcttggacttgggatatacagttccagtttattagcagcaactgctagggaaatgattttggtgttttgggttaattgcttctaagaaaagtttcatagtggactgtttagaagaagaaatgaaagatccagtttgggattatgaaataaaccacaaattaaaatttttgtttaaactgtccaggatctgatttaaaaatatggtctttgttttatatgattaaatggtttgttttcatagatgatatgttactcattgtaaagaccacatatttttattcagcagtgttctttaaacgctttcatttaaaaagtaactttttttttttgcctgtgaattgagtgctctgatgtaaaacttctcatggagtgaaacagtgatttattttaaccaaacattcaccaaagcaaagaacggtttcagacctttgaactggtatggtttggcagaatagttttaaattttgctgtatttgattacttagagataggaatttttaaaaatcaaaacaaaaaataccacagcttagtgtaaatgacaatttggcggttttatgtctttagaaatgttttgcctttctaagccttgtgctaaaggcgtataacggtggtgcctatctacttaagggggcattctagtcttaacttaaaagttgtctaaactgtccctccctggctttttttggtttggggtagacctaagggtgtttgttagtctcaaaactgtgaagtgacatgtcagaacagtccagactggtaagaaaattaatggcttcacttgaatttaaaccagctctagataggaaaaaaatcagtctcctcatttgctttttaaatggagtagtacatcccatattttagaacaagtaggggtgccttgcttaaataaaaatagcatttaatgtataattgtgtgaagggtttatggataaagctgtacttctgtcacaatgtggcagtactttctgctttaatattaaacagcttgttatttaaatattggacaaaatggctggcttcaaaatatagtcattaataaactaactttatgtgcacctgtgtaggagaatcaaaatcctgtatgctttctttgccttgttcctgttctcagggtgacgactgccaccaggagatgcagttctagttcttaaaattaaatttgcccaggtttctgacaggtgatacctggaagagagactatgtcttctcttacttaatacataaccatctttgattaccagctaagatgcgaaatcactgtactgtagtcaataaatgaagacttgtttcaggctgaagatta

SEQ ID NO: 292053 - DNA, 1984 bp, Homo sapiens
ttagtagacacaggtttcgccatgttggccaggctggtctcgaactcctgggttcaaatggtccacctgcctcgacctcccaaagtgccgggattacaggcatgagccaccgcatccagcctgtttgtccattttacattttgtttgtttgtggttgtttgagacggagtcttgtctgttgcccagtctgtagtgcagtggtatgatctcagctcactgcaacctccgcctcctgggttcaagtgattgtcctgccacagcctcccgagtagctgggactataggcacccgccaccacactggctaatttttgtatttttagtagagatggggtttcgctacattggccaggctggcttgaactccttacctcaggtgatcctcccacttcggcttcccaaagtactgggattacaataggcgtgagccaccgtgtccggcctaaattttgtttttaattagggaaaggaaagggcaaagggtttgagttgctgtctgaactgtgagaaaaatggctgtaatatttttctaccttttcaactttttaaaactaatctttctcattatcctcagatcataggtatattgaactgttcctgaattcatgtccaaaaggaaaataagactctaggggctccagataataagggtgaagcaagaagcatttcatttgcacatctttcttggacttgggatatacagttccagtttattagcagcaactgctagggaaatgattttggtgttttgggttaattgcttctaagaaaagtttcatagtggactgtttagaagaagaaatgaaagatccagtttgggattatgaaataaaccacaaattaaaatttttgtttaaactgtccaggatctgatttaaaaatatggtctttgttttatatgattaaatggtttgttttcatagatgatatgttactcattgtaaagaccacatatttttattcagcagtgttctttaaacgctttcatttaaaaagtaactttttttttttgcctgtgaattgagtgctctgatgtaaaacttctcatggagtgaaacagtgatttattttaaccaaacattcaccaaagcaaagaacggtttcagacctttgaactggtatggtttggcagaatagttttaaattttgctgtatttgattacttagagataggaatttttaaaaatcaaaacaaaaaataccacagcttagtgtaaatgacaatttggcggttttatgtctttagaaatgttttgcctttctaagccttgtgctaaaggcgtataacggtggtgcctatctacttaagggggcattctagtcttaacttaaaagttgtctaaactgtccctccctggctttttttggtttggggtagacctaagggtgtttgttagtctcaaaactgtgaagtgacatgtcagaacagtccagactggtaagaaaattaatggcttcacttgaatttaaaccagctctagataggaaaaaaatcagtctcctcatttgctttttaaatggagtagtacatcccatattttagaacaagtaggggtgccttgcttaaataaaaatagcatttaatgtataattgtgtgaagggtttatggataaagctgtacttctgtcacaatgtggcagtactttctgctttaatattaaacagcttgttatttaaatattggacaaaatggctggcttcaaaatatagtcattaataaactaactttatgtgcacctgtgtaggagaatcaaaatcctgtatgctttctttgccttgttcctgttctcagggtgacgactgccaccaggagatgcagttctagttcttaaaattaaatttgcccaggtttctgacaggtgatacctggaagagagactatgtcttctcttacttaatacataaccatctttgattaccagctaagatgcgaaatcactgtactgtagtcaataaatgaagacttgtttcaggctgaagatta

SEQ ID NO: 292054 - DNA, 2274 bp, Homo sapiens
agactgggcggagcgtcgcgctctcctccacctccttccgactctcggaggccccccacccagtgcccgcggcgcatgtgccaggcacaccccacccccaaccggccctggattccacttccgttccaccatcgctgctggagcagctgccttcaggccctgcgccgcctccggagtccatggccggcacgcgctgggtactcggggcgctgctccggggctgcggctgtaactgcagcagctgccggcgcaccggcgccgcctgcctgcccttctactccgccgctggctctatcccccgtcgggcgtctcgggccgccgccgcctgctgctgctgctcggggccgccgcggccgctgcctcccagacgcgtggcctccagaccgggcctgtgcctcccgggaggctggcggggcctcccgctgtggccacctctgccgcggccgcggccgccgcgtcctaccctgccctccgtgcctctctgctgccgcagtcgctggcggcggcggccgccgtcccgacgcgcagctacagccaggtacgtgggcgccgtgagggacctggcgcgagatccctcccgggccgcgtgcacgcgcccccgcgcccctccgtccctccgtgtgcgcctcgcgggcacgcccggggatccgcgacactcgccgcacacccgcccccgtccaccctgtgctcctattgggccctggaacaagggaagctctcccaggcgtcgggtcttctgcttgttttgttctcgcctcgaatctctggtcggttgggcagtgagtccaaaactacttacctggaagaccttccaccaccccctgagtatgaattggccccgtccaagttagaagaggaagtggatgatgtctttctcattcgagctcaaggactgccctggtcatgcactatggaagatgtgcttaactttttttcagggtgaagcaagaagcatttcatttgcacatctttcttggacttgggatatacagttccagtttattagcagcaactgctagggaaatgattttggtgttttgggttaattgcttctaagaaaagtttcatagtggactgtttagaagaagaaatgaaagatccagtttgggattatgaaataaaccacaaattaaaatttttgtttaaactgtccaggatctgatttaaaaatatggtctttgttttatatgattaaatggtttgttttcatagatgatatgttactcattgtaaagaccacatatttttattcagcagtgttctttaaacgctttcatttaaaaagtaactttttttttttgcctgtgaattgagtgctctgatgtaaaacttctcatggagtgaaacagtgatttattttaaccaaacattcaccaaagcaaagaacggtttcagacctttgaactggtatggtttggcagaatagttttaaattttgctgtatttgattacttagagataggaatttttaaaaatcaaaacaaaaaataccacagcttagtgtaaatgacaatttggcggttttatgtctttagaaatgttttgcctttctaagccttgtgctaaaggcgtataacggtggtgcctatctacttaagggggcattctagtcttaacttaaaagttgtctaaactgtccctccctggctttttttggtttggggtagacctaagggtgtttgttagtctcaaaactgtgaagtgacatgtcagaacagtccagactggtaagaaaattaatggcttcacttgaatttaaaccagctctagataggaaaaaaatcagtctcctcatttgctttttaaatggagtagtacatcccatattttagaacaagtaggggtgccttgcttaaataaaaatagcatttaatgtataattgtgtgaagggtttatggataaagctgtacttctgtcacaatgtggcagtactttctgctttaatattaaacagcttgttatttaaatattggacaaaatggctggcttcaaaatatagtcattaataaactaactttatgtgcacctgtgtaggagaatcaaaatcctgtatgctttctttgccttgttcctgttctcagggtgacgactgccaccaggagatgcagttctagttcttaaaattaaatttgcccaggtttctgacaggtgatacctggaagagagactatgtcttctcttacttaatacataaccatctttgattaccagctaagatgcgaaatcactgtactgtagtcaataaatgaagacttgtttcaggctgaagatta

SEQ ID NO: 292055 - DNA, 1087 bp, Homo sapiens
agactgggcggagcgtcgcgctctcctccacctccttccgactctcggaggccccccacccagtgcccgcggcgcatgtgccaggcacaccccacccccaaccggccctggattccacttccgttccaccatcgctgctggagcagctgccttcaggccctgcgccgcctccggagtccatggccggcacgcgctgggtactcggggcgctgctccggggctgcggctgtaactgcagcagctgccggcgcaccggcgccgcctgcctgcccttctactccgccgctggctctatcccccgtcgggcgtctcgggccgccgccgcctgctgctgctgctcggggccgccgcggccgctgcctcccagacgcgtggcctccagaccgggcctgtgcctcccgggaggctggcggggcctcccggagtccaaaactacttacctggaagaccttccaccaccccctgagtatgaattggccccgtccaagttagaagaggaagtggatgatgtctttctcattcgagctcaaggactgccctggtcatgcactatggaagatgtgcttaactttttttcagactgcagaatccgcaacggtgagaatggaatacattttctcctaaacagagatgggaaacgaaggggtgatgccttaattgaaatggagtcagagcaggatgtgcagaaagccttagagaagagaacggatgtgtcatgtgggcacagggatagtgtgaagatgatatgagagtatacaccatgtgcaagtatggtgagtatgccgataacacgaaagagcattgacaggatacaaaatcattcgcctggtgagataagatgaatggtgtgagatcacagaaagagagaaggaacctatcgcattaattagataagcacaagtggaagcaaccgggacaaataggataagaaacttgtcactagtcggcaagcgacacgtggaaagtacttaggtgaggaccgattgcaccttgaaggaggagtgggaccgtaattcggcaaggacgaagggcagaaaacacaacaaggcgagaacagcctaatggttgcaacgatttggacagaaaa

SEQ ID NO: 292056 - DNA, 451 bp, Homo sapiens
gagagactatgtcttctcttacttaatacataaccatctttgattaccagctaagatgcgaaatcactgtactgtagtcaataaatgaagacttgtttcaggctgaagattacctaagagtatttattattggagtctgtgagtcaactgaatatattattacctcaagtcctgctatattaatataagtagtaagggttaattttcgtgtgtgtgttctctaaaatcctgtgaacatgacttaaccagcttaacatcatcagtagtactgcctagatggaaatgcgttttcatatatggttgaatatgccaagctatgagaactggtatctgtagttgtacgaactattagaatgtgatctttgttgctctttcacatttggtatctgatttgctgtggaaaagatctgtggggcctactgtgaggaattcatctgcaattgatttaagc

SEQ ID NO: 292057 - DNA, 1368 bp, Homo sapiens
agactgggcggagcgtcgcgctctcctccacctccttccgactctcggaggccccccacccagtgcccgcggcgcatgtgccaggcacaccccacccccaaccggccctggattccacttccgttccaccatcgctgctggagcagctgccttcaggccctgcgccgcctccggagtccatggccggcacgcgctgggtactcggggcgctgctccggggctgcggctgtaactgcagcagctgccggcgcaccggcgccgcctgcctgcccttctactccgccgctggctctatcccccgtcgggcgtctcgggccgccgccgcctgctgctgctgctcggggccgccgcggccgctgcctcccagacgcgtggcctccagaccgggcctgtgcctcccgggaggctggcggggcctcccgctgtggccacctctgccgcggccgcggccgccgcgtcctaccctgccctccgtgcctctctgctgccgcagtcgctggcggcggcggccgccgtcccgacgcgcagctacagccaggagtccaaaactacttacctggaagaccttccaccaccccctgagtatgaattggccccgtccaagttagaagaggaagtggatgatgtctttctcattcgagctcaaggactgccctggtcatgcactatggaagatgtgcttaactttttttcagactgcagaatccgcaacggtgagaatggaatacattttctcctaaacagagatgggaaacgaaggggtgatgccttaattgaaatggagtcagagcaggatgtgcagaaagccttagagaagcaccgcatgtacatgggccagcggtatgtggaagtatatgagataaacaatgaagatgtggatgccttaatgaagagcttgcaggtcaaatcttcgcctgtggtaaatgatggtgtggttcgtttgagaggacttccttatagttgcaatgagaaagacattgtagacttctttgcaggtactttgcagttgtattatgcttgggagctcatatcttttttcccttggtatctccttctatatcttagatgagcctgtttctgggcaaaggcatgcagttatattaggttctttaggggagagctcttcacttaaatttctaatatttatagattttgtatgtgtttttgttctatcaggcagattttaggagggaagtcagatttcagaataatttcatgagggttttactattgaaggaaataacttctcataatagttgctgtatttgtgtaagacaataacaatttatataatttaaaagtattttctaattcctagaaccattagcagtgaagtctgtgatttctattgtttcctagtatataatt

SEQ ID NO: 292058 - DNA, 1393 bp, Homo sapiens
agactgggcggagcgtcgcgctctcctccacctccttccgactctcggaggccccccacccagtgcccgcggcgcatgtgccaggcacaccccacccccaaccggccctggattccacttccgttccaccatcgctgctggagcagctgccttcaggccctgcgccgcctccggagtccatggccggcacgcgctgggtactcggggcgctgctccggggctgcggctgtaactgcagcagctgccggcgcaccggcgccgcctgcctgcccttctactccgccgctggctctatcccccgtcgggcgtctcgggccgccgccgcctgctgctgctgctcggggccgccgcggccgctgcctcccagacgcgtggcctccagaccgggcctgtgcctcccgggaggctggcggggcctcccgctgtggccacctctgccgcggccgcggccgccgcgtcctaccctgccctccgtgcctctctgctgccgcagtcgctggcggcggcggccgccgtcccgacgcgcagctacagccaggtacgtgggcgccgtgagggacctggcgcgagatccctcccgggccgcgtgcacgcgcccccgcgcccctccgtccctccgtgtgcgcctcgcgggcacgcccggggatccgcgacactcgccgcacacccgcccccgtccaccctgtgctcctattgggccctggaacaagggaagctctcccaggcgtcgggtcttctgcttgttttgttctcgcctcgaatctctggtcggttgggcagtgtaagtgtggctggggtgaatgttgaggccttgttccccgcctggcccatggagtccaaaactacttacctggaagaccttccaccaccccctgatatatgagataaacaatgaagatgtggatgccttaatgaagagcttgcaggtcaaatcttcgcctgtggtaaatgatggtgtggttcgtttgagaggacttccttatagttgcaatgagaaagacattgtagacttctttgcaggtactttgcagttgtattatgcttgggagctcatatcttttttcccttggtatctccttctatatcttagatgagcctgtttctgggcaaaggcatgcagttatattaggttctttaggggagagctcttcacttaaatttctaatatttatagattttgtatgtgtttttgttctatcaggcagattttaggagggaagtcagatttcagaataatttcatgagggttttactattgaaggaaataacttctcataatagttgctgtatttgtgtaagacaataacaatttatataatttaaaagtattttctaattcctagaaccattagcagtgaagtctgtgatttctattgtttcctagtatataatt

SEQ ID NO: 292059 - DNA, 323 bp, Homo sapiens
gcactttccgcggctttgacgagcccgcagcggccgggcccgagcgcagagccgggccgagactgcaccatgcaggaagcgccagctgcgctgcccacggagccaggccccagccccgtgcctgccttcctcggcaagctatgggcgctggtgggggacccaggcacagaccacctgatccgctggagcccggtgagggccggggcccctcgattccccctgtggtcccggggtccctccacgtcagtgaacacccatgcccgcccaaccccctcctgagactgggccgtggatccccggatttggccattcagagaagttca

SEQ ID NO: 292060 - DNA, 1703 bp, Homo sapiens
gcactttccgcggctttgacgagcccgcagcggccgggcccgagcgcagagccgggccgagactgcaccatgcaggaagcgccagctgcgctgcccacggagccaggccccagccccgtgcctgccttcctcggcaagctatgggcgctggtgggggacccaggcacagaccacctgatccgctggagcccgagcgggaccagtttcctcgtaagcgaccagagccgtttcgccaaggaagtgctgccccagtatttcaagcatagcaacatggcgagcttcgtgcgccaactcaacatgtacggttttcggaaggtggtgagcatcgagcagggcggcctgcttaggccggagcgcgaccacgtcgagttccagcacccgagcttcgtgcgcggccgcgagcagctactggagcgcgtgcggcgcaaggtgcccgcgctgcgcggcgacgacggccgctggcgcccggaggacctgggtcgactactgggcgaggtgcaggctttgcggggagtgcaggagagcaccgaggcgcggctgcgggagctcaggcagcagaacgagatcttgtggcgggaggtggtgacacttcggcagagccacggtcagcagcaccgggtcattggcaagctgatccagtgtctctttgggccacttcaggcggggccgagcaatgcaggaggcaagagaaagctgtccctgatgctggatgaggggagctcatgcccaacacctgccaagttcaacacctgccctctacctggtgcccttctgcaggacccctacttcatccagtcgcctctcccagagacaaatttgggccttagccctcacagggccaggggccccatcatctctgacatcccagaagactctccatcccctgaggggaccaggctttctccctccagtgatggcaggagcccccccgccactgcctgtggctgtggtgcaggccatcctggaagggaaagggagcttcagccccgaggggcccaggaatgcccaacagcctgaaccaggggatcccagggagatacctgacagggggcctctgggcctggaaagcggggacaggagcccagagagtctgctgcctccgatgctgcttcagccccctcaagaaagtgtggaacctgcagggcctctagatgtgctgggccccagtctccaagggcgagaatggaccctgatggacttggacatggagctgtccttgatgcagcccttggttccagagcggggtgagcctgagctggcggtcaaggggttaaattctccaagcccagggaaggaccccacgctcggggccccactcctgctggatgtccaggcggccttgggaggcccagccctgggcctgcctggggctttaaccatttatagcactcctgagagccggactgcctcctacttgggcccggaagccagtccctccccctaagaccccgcgcctctgaaggggcttggaaccagtccgccgctgcacatccttcttggcttcctggcgccccctatcgggggtgagcgaagcccccactactaaatggcctctctccactaccccgactatccctgcacataaactccgttttttttttttttttttttttttttttttttttttttttttttttttttttttttttttttttattcctttaaaacaggttgatggggggggagttgaacaatggggcatt

SEQ ID NO: 292061 - DNA, 1649 bp, Homo sapiens
gcactttccgcggctttgacgagcccgcagcggccgggcccgagcgcagagccgggccgagactgcaccatgcaggaagcgccagctgcgctgcccacggagccaggccccagccccgtgcctgccttcctcggcaagctatgggcgctggtgggggacccaggcacagaccacctgatccgctggagcccgagcgggaccagtttcctcgtaagcgaccagagccgtttcgccaaggaagtgctgccccagtatttcaagcatagcaacatggcgagcttcgtgcgccaactcaacatgtacggttttcggaaggtggtgagcatcgagcagggcggcctgcttaggccggagcgcgaccacgtcgagttccagcacccgagcttcgtgcgcggccgcgagcagctactggagcgcgtgcggcgcaaggtgcccgcgctgcgcggcgacgacggccgctggcgcccggaggacctgggtcgactactgggcgaggtgcaggctttgcggggagtgcaggagagcaccgaggcgcggctgcgggagctcaggcagcagaacgagatcttgtggcgggaggtggtgacacttcggcagagccacggtcagcagcaccgggtcattggcaagctgatccagtgtctctttgggccacttcaggcggggccgagcaatgcaggaggcaagagaaagctgtccctgatgctggatgaggggagctcatgcccaacacctgccaagttcaacacctgccctctacctggtgcccttctgcaggacccctacttcatccagtcgcctctcccagagacaaatttgggccttagccctcacagggccaggggccccatcatctctgacatcccagaagactctccatcccctgaggggaccaggctttctccctccagtgatggcaggagcccccccgccactgcctgtggctgtggtgcaggccatcctggaagggaaagggagcttcagccccgaggggcccaggaatgcccaacagcctgaaccaggggatcccagggagatacctgacagggggcctctgggcctggaaagcggggacaggagcccagagagtctgctgcctccgatgctgcttcagccccctcaagaaagtgtggaacctgcagggcctctagatgtgctgggccccagtctccaagggcgagaatggaccctgatggacttggacatggagctgtccttgatgcagcccttggttccagagcggggtgagcctgagctggcggtcaaggggttaaattctccaagcccagggaaggaccccacgctcggggccccactcctgctggatgtccaggcggccttgggaggcccagccctgggcctgcctggggctttaaccatttatagcactcctgagagccggactgcctcctacttgggcccggaagccagtccctccccctaagaccccgcgcctctgaaggggcttggaaccagtccgccgctgcacatccttcttggcttcctggcgccccctatcgggggtgagcgaagcccccactactaaatggcctctctccactaccccgactatccctgcacataaactccgttttttttttttttttttttttttttctttttctttttcttcttttttttttttgaga

SEQ ID NO: 292062 - DNA, 1807 bp, Homo sapiens
gcactttccgcggctttgacgagcccgcagcggccgggcccgagcgcagagccgggccgagactgcaccatgcaggaagcgccagctgcgctgcccacggagccaggccccagccccgtgcctgccttcctcggcaagctatgggcgctggtgggggacccaggcacagaccacctgatccgctggagcccgagcgggaccagtttcctcgtaagcgaccagagccgtttcgccaaggaagtgctgccccagtatttcaagcatagcaacatggcgagcttcgtgcgccaactcaacatgtacggttttcggaaggtggtgagcatcgagcagggcggcctgcttaggccggagcgcgaccacgtcgagttccagcacccgagcttcgtgcgcggccgcgagcagctactggagcgcgtgcggcgcaaggtgcccgcgctgcgcggcgacgacggccgctggcgcccggaggacctgggtcgactactgggcgaggtgcaggctttgcggggagtgcaggagagcaccgaggcgcggctgcgggagctcaggcagcagaacgagatcttgtggcgggaggtggtgacacttcggcagagccacggtcagcagcaccgggtcattggcaagctgatccagtgtctctttgggccacttcaggcggggccgagcaatgcaggaggcaagagaaagctgtccctgatgctggatgaggggagctcatgcccaacacctgccaagttcaacacctgccctctacctggtgcccttctgcaggacccctacttcatccagtcgcctctcccagagacaaatttgggccttagccctcacagggccaggggccccatcatctctgacatcccagaagactctccatcccctgaggggaccaggctttctccctccagtgatggcaggagggagaagggcctggcactgctcaaagaagagccggccagtccagggggggatggcgaggccgggctggccctggccccaaacgagtgtgacttctgcgtgacagcccccccgccactgcctgtggctgtggtgcaggccatcctggaagggaaagggagcttcagccccgaggggcccaggaatgcccaacagcctgaaccaggggatcccagggagatacctgacagggggcctctgggcctggaaagcggggacaggagcccagagagtctgctgcctccgatgctgcttcagccccctcaagaaagtgtggaacctgcagggcctctagatgtgctgggccccagtctccaagggcgagaatggaccctgatggacttggacatggagctgtccttgatgcagcccttggttccagagcggggtgagcctgagctggcggtcaaggggttaaattctccaagcccagggaaggaccccacgctcggggccccactcctgctggatgtccaggcggccttgggaggcccagccctgggcctgcctggggctttaaccatttatagcactcctgagagccggactgcctcctacttgggcccggaagccagtccctccccctaagaccccgcgcctctgaaggggcttggaaccagtccgccgctgcacatccttcttggcttcctggcgccccctatcgggggtgagcgaagcccccactactaaatggcctctctccactaccccgactatccctgcacataaactccgttttttttttttttttttttttttttttttttttttttttttttttttttttttttttttttttattcctttaaaacaggttgatggggggggagttgaacaatggggcatt

SEQ ID NO: 292063 - DNA, 1925 bp, Homo sapiens
ttcccaccctaccccatccgacagatgggaaaacagaggccgggagatgggaagggctggtctagctcagggtcacattgcggggctgggaaccccgtcagcctctcctttctgagaactgagtatggagtcagggtctggctgggggtagggactcactgtggtcgctccaggctaggcctcggagcccgttctggcctggcctcgacccatatccccgtaagcggcaggcctggacccaagagtgagcatgagtgtgtgcgcgcgctggagcgcaggactggccgtgagcgggcaccgctcaccctcctggtctccgcccgcacggtgggcgggcggcgttcttggtagagcgggaccagtttcctcgtaagcgaccagagccgtttcgccaaggaagtgctgccccagtatttcaagcatagcaacatggcgagcttcgtgcgccaactcaacatgtgtgagtccctacggccgggcggggagcggggatgggggactcggtgccggggatggggcgacccacgcccccacgccccactccccagacggttttcggaaggtggtgagcatcgagcagggcggcctgcttaggccggagcgcgaccacgtcgagttccagcacccgagcttcgtgcgcggccgcgagcagctactggagcgcgtgcggcgcaaggtgcccgcgctgcgcggcgacgacggccgctggcgcccggaggacctgggtcgactactgggcgaggtgcaggctttgcggggagtgcaggagagcaccgaggcgcggctgcgggagctcaggcagcagaacgagatcttgtggcgggaggtggtgacacttcggcagagccacggtcagcagcaccgggtcattggcaagctgatccagtgtctctttgggccacttcaggcggggccgagcaatgcaggaggcaagagaaagctgtccctgatgctggatgaggggagctcatgcccaacacctgccaagttcaacacctgccctctacctggtgcccttctgcaggacccctacttcatccagtcggaagagaagatggaagccagccttccccccaaccagacccaggccctccagcatggactgagcctcctccctcaaaccttctcccttagacctggcccagcccccccgccactgcctgtggctgtggtgcaggccatcctggaagggaaagggagcttcagccccgaggggcccaggaatgcccaacagcctgaaccaggggatcccagggagatacctgacagggggcctctgggcctggaaagcggggacaggagcccagagagtctgctgcctccgatgctgcttcagccccctcaagaaagtgtggaacctgcagggcctctagatgtgctgggccccagtctccaagggcgagaatggaccctgatggacttggacatggagctgtccttgatgcagcccttggttccagagcggggtgagcctgagctggcggtcaaggggttaaattctccaagcccagggaaggaccccacgctcggggccccactcctgctggatgtccaggcggccttgggaggcccagccctgggcctgcctggggctttaaccatttatagcactcctgagagccggactgcctcctacttgggcccggaagccagtccctccccctaagaccccgcgcctctgaaggggcttggaaccagtccgccgctgcacatccttcttggcttcctggcgccccctatcgggggtgagcgaagcccccactactaaatggcctctctccactaccccgactatccctgcacataaactccgttttttttttttttttttttttttttttttttttttttttttttttttttttttttttttttttattcctttaaaacaggttgatggggggggagttgaacaatggggcatt

SEQ ID NO: 292064 - DNA, 1837 bp, Homo sapiens
ttcccaccctaccccatccgacagatgggaaaacagaggccgggagatgggaagggctggtctagctcagggtcacattgcggggctgggaaccccgtcagcctctcctttctgagaactgagtatggagtcagggtctggctgggggtagggactcactgtggtcgctccaggctaggcctcggagcccgttctggcctggcctcgacccatatccccgtaagcggcaggcctggacccaagagtgagcatgagtgtgtgcgcgcgctggagcgcaggactggccgtgagcgggcaccgctcaccctcctggtctccgcccgcacggtgggcgggcggcgttcttggtagagcgggaccagtttcctcgtaagcgaccagagccgtttcgccaaggaagtgctgccccagtatttcaagcatagcaacatggcgagcttcgtgcgccaactcaacatgtacggttttcggaaggtggtgagcatcgagcagggcggcctgcttaggccggagcgcgaccacgtcgagttccagcacccgagcttcgtgcgcggccgcgagcagctactggagcgcgtgcggcgcaaggtgcccgcgctgcgcggcgacgacggccgctggcgcccggaggacctgggtcgactactgggcgaggtgcaggctttgcggggagtgcaggagagcaccgaggcgcggctgcgggagctcaggcagcagaacgagatcttgtggcgggaggtggtgacacttcggcagagccacggtcagcagcaccgggtcattggcaagctgatccagtgtctctttgggccacttcaggcggggccgagcaatgcaggaggcaagagaaagctgtccctgatgctggatgaggggagctcatgcccaacacctgccaagttcaacacctgccctctacctggtgcccttctgcaggacccctacttcatccagtcggaagagaagatggaagccagccttccccccaaccagacccaggccctccagcatggactgagcctcctccctcaaaccttctcccttagacctggcccagcccccccgccactgcctgtggctgtggtgcaggccatcctggaagggaaagggagcttcagccccgaggggcccaggaatgcccaacagcctgaaccaggggatcccagggagatacctgacagggggcctctgggcctggaaagcggggacaggagcccagagagtctgctgcctccgatgctgcttcagccccctcaagaaagtgtggaacctgcagggcctctagatgtgctgggccccagtctccaagggcgagaatggaccctgatggacttggacatggagctgtccttgatgcagcccttggttccagagcggggtgagcctgagctggcggtcaaggggttaaattctccaagcccagggaaggaccccacgctcggggccccactcctgctggatgtccaggcggccttgggaggcccagccctgggcctgcctggggctttaaccatttatagcactcctgagagccggactgcctcctacttgggcccggaagccagtccctccccctaagaccccgcgcctctgaaggggcttggaaccagtccgccgctgcacatccttcttggcttcctggcgccccctatcgggggtgagcgaagcccccactactaaatggcctctctccactaccccgactatccctgcacataaactccgttttttttttttttttttttttttttttttttttttttttttttttttttttttttttttttttattcctttaaaacaggttgatggggggggagttgaacaatggggcatt

SEQ ID NO: 292065 - DNA, 2302 bp, Homo sapiens
ttcccaccctaccccatccgacagatgggaaaacagaggccgggagatgggaagggctggtctagctcagggtcacattgcggggctgggaaccccgtcagcctctcctttctgagaactgagtatggagtcagggtctggctgggggtagggactcactgtggtcgctccaggctaggcctcggagcccgttctggcctggcctcgacccatatccccgtaagcggcaggcctggacccaagagtgagcatgagtgtgtgcgcgcgctggagcgcaggactggccgtgagcgggcaccgctcaccctcctggtctccgcccgcacggtgggcgggcggcgttcttggtagagcgggaccagtttcctcgtaagcgaccagagccgtttcgccaaggaagtgctgccccagtatttcaagcatagcaacatggcgagcttcgtgcgccaactcaacatgtgtgagtccctacggccgggcggggagcggggatgggggactcggtgccggggatggggcgacccacgcccccacgccccactccccagacggttttcggaaggtggtgagcatcgagcagggcggcctgcttaggccggagcgcgaccacgtcgagttccagcacccgagcttcgtgcgcggccgcgagcagctactggagcgcgtgcggcgcaaggtgcccgcgctgcgcggcgacgacggccgctggcgcccggaggacctgggtcgactactgggcgaggtgcaggctttgcggggagtgcaggagagcaccgaggcgcggctgcgggagctcaggcagcagaacgagatcttgtggcgggaggtggtgacacttcggcagagccacggtcagcagcaccgggtcattggcaagctgatccagtgtctctttgggccacttcaggcggggccgagcaatgcaggaggcaagagaaagctgtccctgatgctggatgaggggagctcatgcccaacacctgccaagttcaacacctgccctctacctggtgcccttctgcaggacccctacttcatccagtcggtaggtttgtcttcttcccccttcccaagggcatggctgggcttatggagagcctgttccttctccccatcccctaaaaggaagagaagatggaagccagccttccccccaaccagacccaggccctccagcatggactgagcctcctccctcaaaccttctcccttagacctggcccaggtgggtgttggtggggttctggctctccctgtgcctacaggccaagggctgggcctagccttctacttcctctcccagagacaaatttgggccttagccctcacagggccaggggccccatcatctctgacatcccagaagactctccatcccctgaggggaccaggctttctccctccagtgatggcaggagggagaagggcctggcactgctcaaagaagagccggccagtccagggggggatggcgaggccgggctggccctggccccaaacgagtgtgacttctgcgtgacagcccccccgccactgcctgtggctgtggtgcaggccatcctggaagggaaagggagcttcagccccgaggggcccaggaatgcccaacagcctgaaccaggggatcccagggagatacctgacagggggcctctgggcctggaaagcggggacaggagcccagagagtctgctgcctccgatgctgcttcagccccctcaagaaagtgtggaacctgcagggcctctagatgtgctgggccccagtctccaagggcgagaatggaccctgatggacttggacatggagctgtccttgatgcagcccttggttccagagcggggtgagcctgagctggcggtcaaggggttaaattctccaagcccagggaaggaccccacgctcggggccccactcctgctggatgtccaggcggccttgggaggcccagccctgggcctgcctggggctttaaccatttatagcactcctgagagccggactgcctcctacttgggcccggaagccagtccctccccctaagaccccgcgcctctgaaggggcttggaaccagtccgccgctgcacatccttcttggcttcctggcgccccctatcgggggtgagcgaagcccccactactaaatggcctctctccactaccccgactatccctgcacataaactccgttttttttttttttttttttttttttttttttttttttttttttttttttttttttttttttttattcctttaaaacaggttgatggggggggagttgaacaatggggcatt

SEQ ID NO: 292066 - DNA, 1609 bp, Homo sapiens
tccatctagacttatgggcgatctctgggatggccagtcagcggggtggtctcctgggtccccagcctcgccattctgtggggggtggtgactgggcgaactctcagatgcctcagcaccctcccaccccttcctcaggcagaacgagatcttgtggcgggaggtggtgacacttcggcagagccacggtcagcagcaccgggtcattggcaaggcggggccgagcaatgcaggaggcaagagaaagctgtccctgatgctggatgaggggagctcatgcccaacacctgccaagttcaacacctgccctctacctggtgcccttctgcaggacccctacttcatccagtcggtaggtttgtcttcttcccccttcccaagggcatggctgggcttatggagagcctgttccttctccccatcccctaaaaggaagagaagatggaagccagccttccccccaaccagacccaggccctccagcatggactgagcctcctccctcaaaccttctcccttagacctggcccaggtgggtgttggtggggttctggctctccctgtgcctacaggccaagggctgggcctagccttctacttcctctcccagagacaaatttgggccttagccctcacagggccaggggccccatcatctctgacatcccagaagactctccatcccctgaggggaccaggctttctccctccagtgatggcaggagggagaagggcctggcactgctcaaagaagagccggccagtccagggggggatggcgaggccgggctggccctggccccaaacgagtgtgacttctgcgtgacagcccccccgccactgcctgtggctgtggtgcaggccatcctggaagggaaagggagcttcagccccgaggggcccaggaatgcccaacagcctgaaccaggggatcccagggagatacctgacagggggcctctgggcctggaaagcggggacaggagcccagagagtctgctgcctccgatgctgcttcagccccctcaagaaagtgtggaacctgcagggcctctagatgtgctgggccccagtctccaagggcgagaatggaccctgatggacttggacatggagctgtccttgatgcagcccttggttccagagcggggtgagcctgagctggcggtcaaggggttaaattctccaagcccagggaaggaccccacgctcggggccccactcctgctggatgtccaggcggccttgggaggcccagccctgggcctgcctggggctttaaccatttatagcactcctgagagccggactgcctcctacttgggcccggaagccagtccctccccctaagaccccgcgcctctgaaggggcttggaaccagtccgccgctgcacatccttcttggcttcctggcgccccctatcgggggtgagcgaagcccccactactaaatggcctctctccactaccccgactatccctgcacataaactccgttttttttttttttttttttttttttttttttttttttttttttttttttttttttttttttttattcctttaaaacaggttgatggggggggagttgaacaatggggcatt

SEQ ID NO: 292067 - DNA, 1639 bp, Homo sapiens
tccatctagacttatgggcgatctctgggatggccagtcagcggggtggtctcctgggtccccagcctcgccattctgtggggggtggtgactgggcgaactctcagatgcctcagcaccctcccaccccttcctcaggcagaacgagatcttgtggcgggaggtggtgacacttcggcagagccacggtcagcagcaccgggtcattggcaagctgatccagtgtctctttgggccacttcaggcggggccgagcaatgcaggaggcaagagaaagctgtccctgatgctggatgaggggagctcatgcccaacacctgccaagttcaacacctgccctctacctggtgcccttctgcaggacccctacttcatccagtcggtaggtttgtcttcttcccccttcccaagggcatggctgggcttatggagagcctgttccttctccccatcccctaaaaggaagagaagatggaagccagccttccccccaaccagacccaggccctccagcatggactgagcctcctccctcaaaccttctcccttagacctggcccaggtgggtgttggtggggttctggctctccctgtgcctacaggccaagggctgggcctagccttctacttcctctcccagagacaaatttgggccttagccctcacagggccaggggccccatcatctctgacatcccagaagactctccatcccctgaggggaccaggctttctccctccagtgatggcaggagggagaagggcctggcactgctcaaagaagagccggccagtccagggggggatggcgaggccgggctggccctggccccaaacgagtgtgacttctgcgtgacagcccccccgccactgcctgtggctgtggtgcaggccatcctggaagggaaagggagcttcagccccgaggggcccaggaatgcccaacagcctgaaccaggggatcccagggagatacctgacagggggcctctgggcctggaaagcggggacaggagcccagagagtctgctgcctccgatgctgcttcagccccctcaagaaagtgtggaacctgcagggcctctagatgtgctgggccccagtctccaagggcgagaatggaccctgatggacttggacatggagctgtccttgatgcagcccttggttccagagcggggtgagcctgagctggcggtcaaggggttaaattctccaagcccagggaaggaccccacgctcggggccccactcctgctggatgtccaggcggccttgggaggcccagccctgggcctgcctggggctttaaccatttatagcactcctgagagccggactgcctcctacttgggcccggaagccagtccctccccctaagaccccgcgcctctgaaggggcttggaaccagtccgccgctgcacatccttcttggcttcctggcgccccctatcgggggtgagcgaagcccccactactaaatggcctctctccactaccccgactatccctgcacataaactccgttttttttttttttttttttttttttttttttttttttttttttttttttttttttttttttttattcctttaaaacaggttgatggggggggagttgaacaatggggcatt

SEQ ID NO: 292068 - DNA, 1387 bp, Homo sapiens
tccatctagacttatgggcgatctctgggatggccagtcagcggggtggtctcctgggtccccagcctcgccattctgtggggggtggtgactgggcgaactctcagatgcctcagcaccctcccaccccttcctcaggcagaacgagatcttgtggcgggaggtggtgacacttcggcagagccacggtcagcagcaccgggtcattggcaagctgatccagtgtctctttgggccacttcaggcggggccgagcaatgcaggaggcaagagaaagctgtccctgatgctggatgaggggagctcatgcccaacacctgccaagttcaacacctgccctctacctggtgcccttctgcaggacccctacttcatccagtcggaagagaagatggaagccagccttccccccaaccagacccaggccctccagcatggactgagcctcctccctcaaaccttctcccttagacctggcccagcctctcccagagacaaatttgggccttagccctcacagggccaggggccccatcatctctgacatcccagaagactctccatcccctgaggggaccaggctttctccctccagtgatggcaggagcccccccgccactgcctgtggctgtggtgcaggccatcctggaagggaaagggagcttcagccccgaggggcccaggaatgcccaacagcctgaaccaggggatcccagggagatacctgacagggggcctctgggcctggaaagcggggacaggagcccagagagtctgctgcctccgatgctgcttcagccccctcaagaaagtgtggaacctgcagggcctctagatgtgctgggccccagtctccaagggcgagaatggaccctgatggacttggacatggagctgtccttgatgcagcccttggttccagagcggggtgagcctgagctggcggtcaaggggttaaattctccaagcccagggaaggaccccacgctcggggccccactcctgctggatgtccaggcggccttgggaggcccagccctgggcctgcctggggctttaaccatttatagcactcctgagagccggactgcctcctacttgggcccggaagccagtccctccccctaagaccccgcgcctctgaaggggcttggaaccagtccgccgctgcacatccttcttggcttcctggcgccccctatcgggggtgagcgaagcccccactactaaatggcctctctccactaccccgactatccctgcacataaactccgttttttttttttttttttttttttttttttttttttttttttttttttttttttttttttttttattcctttaaaacaggttgatggggggggagttgaacaatggggcatt

SEQ ID NO: 292069 - DNA, 1980 bp, Homo sapiens
ttcccaccctaccccatccgacagatgggaaaacagaggccgggagatgggaagggctggtctagctcagggtcacattgcggggctgggaaccccgtcagcctctcctttctgagaactgagtatggagtcagggtctggctgggggtagggactcactgtggtcgctccaggctaggcctcggagcccgttctggcctggcctcgacccatatccccgtaagcggcaggcctggacccaagagtgagcatgagtgtgtgcgcgcgctggagcgcaggactggccgtgagcgggcaccgctcaccctcctggtctccgcccgcacggtgggcgggcggcgttcttggtagagcgggaccagtttcctcgtaagcgaccagagccgtttcgccaaggaagtgctgccccagtatttcaagcatagcaacatggcgagcttcgtgcgccaactcaacatgtgtgagtccctacggccgggcggggagcggggatgggggactcggtgccggggatggggcgacccacgcccccacgccccactccccagacggttttcggaaggtggtgagcatcgagcagggcggcctgcttaggccggagcgcgaccacgtcgagttccagcacccgagcttcgtgcgcggccgcgagcagctactggagcgcgtgcggcgcaaggtgcccgcgctgcgcggcgacgacggccgctggcgcccggaggacctgggtcgactactgggcgaggtgcaggctttgcggggagtgcaggagagcaccgaggcgcggctgcgggagctcaggcagcagaacgagatcttgtggcgggaggtggtgacacttcggcagagccacggtcagcagcaccgggtcattggcaagctgatccagtgtctctttgggccacttcaggcggggccgagcaatgcaggaggcaagagaaagctgtccctgatgctggatgaggggagctcatgcccaacacctgccaagttcaacacctgccctctacctggtgcccttctgcaggacccctacttcatccagtcggaagagaagatggaagccagccttccccccaaccagacccaggccctccagcatggactgagcctcctccctcaaaccttctcccttagacctggcccagcctctcccagagacaaatttgggccttagccctcacagggccaggggccccatcatctctgacatcccagaagactctccatcccctgaggggaccaggctttctccctccagtgatggcaggagcccccccgccactgcctgtggctgtggtgcaggccatcctggaagggaaagggagcttcagccccgaggggcccaggaatgcccaacagcctgaaccaggggatcccagggagatacctgacagggggcctctgggcctggaaagcggggacaggagcccagagagtctgctgcctccgatgctgcttcagccccctcaagaaagtgtggaacctgcagggcctctagatgtgctgggccccagtctccaagggcgagaatggaccctgatggacttggacatggagctgtccttgggaaggaccccacgctcggggccccactcctgctggatgtccaggcggccttgggaggcccagccctgggcctgcctggggctttaaccatttatagcactcctgagagccggactgcctcctacttgggcccggaagccagtccctccccctaagaccccgcgcctctgaaggggcttggaaccagtccgccgctgcacatccttcttggcttcctggcgccccctatcgggggtgagcgaagcccccactactaaatggcctctctccactaccccgactatccctgcacataaactccgttttttttttttttttttttttttttttttttttttttttttttttttttttttttttttttttattcctttaaaacaggttgatggggggggagttgaacaatggggcatt

SEQ ID NO: 292070 - DNA, 1462 bp, Homo sapiens
tccatctagacttatgggcgatctctgggatggccagtcagcggggtggtctcctgggtccccagcctcgccattctgtggggggtggtgactgggcgaactctcagatgcctcagcaccctcccaccccttcctcaggcagaacgagatcttgtggcgggaggtggtgacacttcggcagagccacggtcagcagcaccgggtcattggcaagctgatccagtgtctctttgggccacttcaggcggggccgagcaatgcaggaggcaagagaaagctgtccctgatgctggatgaggggagctcatgcccaacacctgccaagttcaacacctgccctctacctggtgcccttctgcaggacccctacttcatccagtcggaagagaagatggaagccagccttccccccaaccagacccaggccctccagcatggactgagcctcctccctcaaaccttctcccttagacctggcccagccctcacagggccaggggccccatcatctctgacatcccagaagactctccatcccctgaggggaccaggctttctccctccagtgatggcaggagggagaagggcctggcactgctcaaagaagagccggccagtccagggggggatggcgaggccgggctggccctggccccaaacgagtgtgacttctgcgtgacagcccccccgccactgcctgtggctgtggtgcaggccatcctggaagggaaagggagcttcagccccgaggggcccaggaatgcccaacagcctgaaccaggggatcccagggagatacctgacagggggcctctgggcctggaaagcggggacaggagcccagagagtctgctgcctccgatgctgcttcagccccctcaagaaagtgtggaacctgcagggcctctagatgtgctgggccccagtctccaagggcgagaatggaccctgatggacttggacatggagctgtccttgatgcagcccttggttccagagcggggtgagcctgagctggcggtcaaggggttaaattctccaagcccagggaaggaccccacgctcggggccccactcctgctggatgtccaggcggccttgggaggcccagccctgggcctgcctggggctttaaccatttatagcactcctgagagccggactgcctcctacttgggcccggaagccagtccctccccctaagaccccgcgcctctgaaggggcttggaaccagtccgccgctgcacatccttcttggcttcctggcgccccctatcgggggtgagcgaagcccccactactaaatggcctctctccactaccccgactatccctgcacataaactccgttttttttttttttttttttttttttttttttttttttttttttttttttttttttttttttttattcctttaaaacaggttgatggggggggagttgaacaatggggcatt

SEQ ID NO: 292071 - DNA, 599 bp, Homo sapiens
tgagttcaggctgcactgcagagcgttccttgagccacccatgccctcaccattgggcgagagtggggaggttaagaatggatgttttatcctaactgagcagaaggcaggcgggcagggctctccttccctgaagaaaggagggggaacatttcccctggtgagcgcagtcccacttctcctagggaaggaccccacgctcggggccccactcctgctggatgtccaggcggccttgggaggcccagccctgggcctgcctggggctttaaccatttatagcactcctgagagccggactgcctcctacttgggcccggaagccagtccctccccctaagaccccgcgcctctgaaggggcttggaaccagtccgccgctgcacatccttcttggcttcctggcgccccctatcgggggtgagcgaagcccccactactaaatggcctctctccactaccccgactatccctgcacataaactccgttttttttttttttttttttttttttttttttttttttttttttttttttttttttttttttttattcctttaaaacaggttgatggggggggagttgaacaatggggcatt

SEQ ID NO: 292072 - DNA, 1465 bp, Homo sapiens
ttcccaccctaccccatccgacagatgggaaaacagaggccgggagatgggaagggctggtctagctcagggtcacattgcggggctgggaaccccgtcagcctctcctttctgagaactgagtatggagtcagggtctggctgggggtagggactcactgtggtcgctccaggctaggcctcggagcccgttctggcctggcctcgacccatatccccgtaagcggcaggcctggacccaagagtgagcatgagtgtgtgcgcgcgctggagcgcaggactggccgtgagcgggcaccgctcaccctcctggtctccgcccgcacggtgggcgggcggcgttcttggtagagcgggaccagtttcctcgtaagcgaccagagccgtttcgccaaggaagtgctgccccagtatttcaagcatagcaacatggcgagcttcgtgcgccaactcaacatgtgtgagtccctacggccgggcggggagcggggatgggggactcggtgccggggatggggcgacccacgcccccacgccccactccccagacggttttcggaaggtggtgagcatcgagcagggcggcctgcttaggccggagcgcgaccacgtcgagttccagcacccgagcttcgtgcgcggccgcgagcagctactggagcgcgtgcggcgcaaggtgcccgcgctgcgcggcgacgacggccgctggcgcccggaggacctgggtcgactactgggcgaggcagaacgagatcttgtggcgggaggtggtgacacttcggcagagccacggtcagcagcaccgggtcattggcaagctgatccagtgtctctttgggccacttcaggcggggccgagcaatgcaggaggcaagagaaagctgtccctgatgctggatgaggggagctcatgcccaacacctgccaagttcaacacctgccctctacctggtgcccttctgcaggacccctacttcatccagtcggaagagaagatggaagccagccttccccccaaccagacccaggccctccagcatggactgagcctcctccctcaaaccttctcccttagacctggcccagcctctcccagagacaaatttgggccttagccctcacagggccaggggccccatcatctctgacatcccagaagactctccatcccctgaggggaccaggctttctccctccagtgatggcaggagcccccccgccactgcctgtggctgtggtgcaggccatcctggaagggaaagggagcttcagccccctatcgggggtgagcgaagcccccactactaaatggcctctctccactaccccgactatccctgcacataaactccgttttttttttttttttttttttttttttttttttttttttttttttttttttttttttttttttattcctttaaaacaggttgatggggggggagttgaacaatggggcatt

SEQ ID NO: 292073 - DNA, 885 bp, Homo sapiens
ttcccaccctaccccatccgacagatgggaaaacagaggccgggagatgggaagggctggtctagctcagggtcacattgcggggctgggaaccccgtcagcctctcctttctgagaactgagtatggagtcagggtctggctgggggtagggactcactgtggtcgctccaggctaggcctcggagcccgttctggcctggcctcgacccatatccccgtaagcggcaggcctggacccaagagtgagcatgagtgtgtgcgcgcgctggagcgcaggactggccgtgagcgggcaccgctcaccctcctggtctccgcccgcacggtgggcgggcggcgttcttggtagagcgggaccagtttcctcgtaagcgaccagagccgtttcgccaaggaagtgctgccccagtatttcaagcatagcaacatggcgagcttcgtgcgccaactcaacatgtgtgagtccctacggccgggcggggagcggggatgggggactcggtgccggggatggggcgacccacgcccccacgccccactccccagacggttttcggaaggtggtgagcatcgagcagggcggcctgcttaggccggagcgcgaccacgtcgagttccagcacccgagcttcgtgcgcggccgcgagcagctactggagcgcgtgcggcgcaaggtgcccgcgctgcgcggcgacgacggccgctggcgcccggaggacctgggtcgactactgggcgaggtgcaggctttgcggggagtgcaggagagcaccgaggcgcggctgcgggagctcaggcagtgcgggggcgggcggggaaagaggggacaggggtggggggttcgggatgagaccataactggccggccagcagttctgggcag

SEQ ID NO: 292074 - DNA, 211 bp, Homo sapiens
ccctgttaagccttcctccctcacctggaagtgcgggggtgggggggctgtgtccaaagtatgaattaaacctttgctttctcttcagctgatccagtgtctctttgggccacttcaggcggggccgagcaatgcaggaggcaagagaaagctgtgagtgagaaagccaagaaggcccacacccacttccaagaccccccagaagtcccct

SEQ ID NO: 292075 - DNA, 1233 bp, Homo sapiens
  misc_feature (631)..(631): n is a, c, g, or t
  misc_feature (1058)..(1058): n is a, c, g, or t
gtgcaagatttaataaaaaacaaacaaaaataggaatggttgctttcaacattttccaggttgtgaaaggttttgactgatttggggaaagaatggtgaaaaagagcttctcagttctcctgaggtgctcgctgacaaccacacctgtgtgtctgggtggggccgagtccgtcacacagaggtgacatgtgagctgctgtttccattcagagctacaggagtaacgggctgggaaaaacaggtgtcctgctagacagtggctgtgaggatgtgtaggcaggagcagtggcagccacctgggagtcaggagcttgcagcacaatggtgctggctgtgtgcgcgcctggctctgccacatgagcgtggaaggcaccacctgaacatggcttttgaggggcctagtcatcctagtcatttactggggcagcttcctgagtggaaggaacataagggcacaggtatcatggtaaacttttgagtctaagggatgatgcttgacagccacacatggtgggtgtggcctgcagctacaaagggtggggccagacagctgggcctccactcagcccaccaccacctccagggcctggcatttcgcctttgtgctccaggacctcaggggcggggatgnaggacagttctggggaaaatctacttgtaaaggtcctggggaaggggacaggagtggctggaggctgtgctccgtgggaaagttcttctcaccagagcacacatcaaatgccagttccagagagggaccctccgcccgactgtgctctcctagggcaatcaggaggagactgccctccaactgggccctggctctccggggtgttgctgtgagtacaaggctgtcctcaggcagctgcctcagatttgggctgggactgggccagacggggttcccggggcaggggcaggaaggaggcaaggctggcaaggggattgggggctgctctcaggaacacggagaggccgcattaggcaggcagggaagtgctgggaagactacgtgctcctctcccaccagggaccctggcggccctcctgctagttcncctcctggtggaggacactgggggatgccgaacaagaggctaagcctgcggcccaggccctgctgagaccacaccatggctagcaagtagagggacagcagcatatcccctcaattctgcctgcacggtagctgagccagacgtccccacacccaccccattatcaaggaagatc

SEQ ID NO: 292076 - DNA, 920 bp, Homo sapiens
agggaaggggcggggcgaacggaagccgggaaggcgattcatagctcgcggggtacgggcgcgcgtgcgcactccgcagcccgttcaggaccccggcgcgggcagggcgcccacgagctggctggctgcttgcacccacatccttctttctctgggacctggggtcgcggttacttgggctggccggcgaacccttgagtggcctggcggggagcgggcctcgcgcgcctggagggccctgtggaacgaagagaggcacacagcatggcagaaaaccgagagccccgcggtgctgtggaggctgaactggatccagtggaatacacccttaggaaaaggcttcccagccgcctgccccggagacccaatgacatttatgtcaacatgaagacggactttaaggcccagctggcccgctgccagaagctgctggacggaggggcccggggtcagaacgcgtgctctgagatctacattcacggcttgggcctggccatcaaccgcgccatcaacatcgcgctgcagctgcaggcgggcagcttcgggtccttgcaggtggctgccaatacctccaccgtggagcttgttgatgagctggagccagagaccgacacacgggagccactgactcggatccgcaacaactcagccatccacatccgagtcttcagggtcacacccaagtaattgaaaagacactcctccacttatcccctccgtgatatggctcttcgcatgctgagtactggacctcggaccagagccatgtaagaaaaggcctgttccctggaagcccaaaggactctgcattgagggtgggggtaattgtctcttggtgggcccagttagtgggccttcctgagtgtgtgtatgcggtctgtaactattgccatataaataaaaaatcctgttgcactagt

SEQ ID NO: 292077 - DNA, 1099 bp, Homo sapiens
agggaaggggcggggcgaacggaagccgggaaggcgattcatagctcgcggggtacgggcgcgcgtgcgcactccgcagcccgttcaggaccccggcgcgggcagggcgcccacgagctggctggctgcttgcacccacatccttctttctctgggacctggggtcgcggttacttgggctggccggcgaacccttgagtggcctggcggggagcgggcctcgcgcgcctggagggccctgtggaacgaagagaggcacacagcatggcagaaaaccgagagccccgcggtgctgtggaggctgaactggatccagtggaatacacccttaggaaaaggcttcccagccgcctgccccggagacccaatgacatttatgtcaacatgaagacggactttaaggcccagctggcccgctgccagaagctgctggacggaggggcccggggtcagaacgcgtgctctgagatctacattcacggcttgggcctggccatcaaccgcgccatcaacatcgcgctgcagctgcaggcgggcagcttcgggtccttgcaggtggctgccaatacctccaccgtggagcttgttgatgagctggagccagagaccgacacacgggagccactgactcggatccgcaacaactcagccatccacatccgagtcttcagggtcacacccaagtaattgaaaagacactcctccacttatcccctccgtgatatggctcttcgcatgctgagtactggacctcggaccagagccatgtaagaaaaggcctgttccctggaagcccaaaggactctgcattgagggtgggggtaattgtctcttggtgggcccagttagtgggccttcctgagtgtgtgtatgcggtctgtaactattgccatataaataaaaaatcctgttgcactagtaaaaaaaaaaatcaccacacacaaaaacccgggcgacccatatcggggtcgggcaaaaacgggtctacacattgcgctgcgccaacaacgtgtccctggaccagctttctggaccacggggcaacactggcgggaccccataaggagcgctaattgaaaccgtaccgatacatcaaacg

SEQ ID NO: 292078 - DNA, 571 bp, Homo sapiens
agggaaggggcggggcgaacggaagccgggaaggcgattcatagctcgcggggtacgggcgcgcgtgcgcactccgcagcccgttcaggaccccggcgcgggcagggcgcccacgagctggctggctgcttgcacccacatccttctttctctgggacctggggtcgcggttacttgggctggccggcgaacccttgagtggcctggcggggagcgggcctcgcgcgcctggagggccctgtggaacgaagagagagaccgacacacgggagccactgactcggatccgcaacaactcagccatccacatccgagtcttcagggtcacacccaagtaattgaaaagacactcctccacttatcccctccgtgatatggctcttcgcatgctgagtactggacctcggaccagagccatgtaagaaaaggcctgttccctggaagcccaaaggactctgcattgagggtgggggtaattgtctcttggtgggcccagttagtgggccttcctgagtgtgtgtatgcggtctgtaactattgccatataaataaaaaatcctgttgcactagt

SEQ ID NO: 292079 - DNA, 1654 bp, Homo sapiens
agggaaggggcggggcgaacggaagccgggaaggcgattcatagctcgcggggtacgggcgcgcgtgcgcactccgcagcccgttcaggaccccggcgcgggcagggcgcccacgagctggctggctgcttgcacccacatccttctttctctgggacctggggtcgcggttacttgggctggccggcgaacccttgagtggcctggcggggagcgggcctcgcgcgcctggagggccctgtggaacgaagagaggcacacagcatggcagaaaaccgagagccccgcggtgctgtggaggctgaactggatccagtggaatacacccttaggaaaaggcttcccagccgcctgccccggagacccaatgacatttatgtcaacatgaagacggactttaaggcccagctggcccgctgccagaagctgctggacggaggggcccggggtcagaacgcgtgctctgagatctacattcacggcttgggcctggccatcaaccgcgccatcaacatcgcgctgcagctgcaggcgggcagcttcgggtccttgcaggtggctgccaatacctccaccgtggagcttgttgatgagctggagccagagaccgacacacgggagccactgactcggatccgcaacaactcagccatccacatccgagtcttcagggtcacacccaagtaattgaaaagacactcctccacttatcccctccgtgatatggctcttcgcatgctgagtactggacctcggaccagagccatgtaagaaaaggcctgttccctggaagcccaaaggactctgcattgagggtgggggtaattgtctcttggtgggcccagttagtgggccttcctgagtgtgtgtatgcggtctgtaactattgccatataaataaaaaatcctgttgcactagtaaaacaaaaaaaaaaaaaaaaacctgggggctctcacactgccgagaggcggggcaaaaagaggacaagaaacgggccaagggcccaacaccgcggcacccggagccccacagaaacggtcgaacaacgggagcacaaccgcagcgggacacccaaacacaggaaccacacaacacacccacaaaacacacggcaacacgtcgcgctcaagggacccggcacaacaacaccacaaacgcagcaccacacacacagacggagcgacaaccaacacacgcacgcaacgcaggacaacggacccagccaaccccacgaaacaccaccacacacgccaaagaacaacgaaacggagagggaagaacagaaagggaaacgacgagccgacgacgggagaaggggcacacgggaagccggctcaagaagcgggcccgagcggaaagcagcgggagagagggtgaccaaaagagcaagcagggagagacacaacgacgcgagcgggcagcaagggcgagaagaggaacgcgagaacaggaccgcaaggaggaacgcacagaaagccgaaaaaacaagaagaaccggagaggccggagaacagaggagcgggcacgcaggagcagggcgggaacgaggccgaggcagagaaaaagggacgcgagaagagggaagaacaaacaccccaagaaacgagggaacgagggagaaggaagagaggaaggaaacccaacagcccagcg

SEQ ID NO: 292080 - DNA, 889 bp, Homo sapiens
agggaaggggcggggcgaacggaagccgggaaggcgattcatagctcgcggggtacgggcgcgcgtgcgcactccgcagcccgttcaggaccccggcgcgggcagggcgcccacgagctggctggctgcttgcacccacatccttctttctctgggacctggggtcgcggttacttgggctggccggcgaacccttgagtggcctggcggggagcgggcctcgcgcgcctggagggccctgtggaacgaagagaggcacacagcatggcagaaaaccgagagccccgcggtgctgtggaggctgaactggatccagtggaatacacccttaggaaaaggcttcccagccgcctgccccggagacccaatgacatttatgtcaacatgaagacggactttaaggcccagctggcccgctgccagaagctgctggacggaggggcccggggtcagaacgcgtgctctgagatctacattcacggcttgggcctggccatcaaccgcgccatcaacatcgcgctgcagtggctgccaatacctccaccgtggagcttgttgatgagctggagccagagaccgacacacgggagccactgactcggatccgcaacaactcagccatccacatccgagtcttcagggtcacacccaagtaattgaaaagacactcctccacttatcccctccgtgatatggctcttcgcatgctgagtactggacctcggaccagagccatgtaagaaaaggcctgttccctggaagcccaaaggactctgcattgagggtgggggtaattgtctcttggtgggcccagttagtgggccttcctgagtgtgtgtatgcggtctgtaactattgccatataaataaaaaatcctgttgcactagt

SEQ ID NO: 292081 - DNA, 859 bp, Homo sapiens
agggaaggggcggggcgaacggaagccgggaaggcgattcatagctcgcggggtacgggcgcgcgtgcgcactccgcagcccgttcaggaccccggcgcgggcagggcgcccacgagctggctggctgcttgcacccacatccttctttctctgggacctggggtcgcggttacttgggctggccggcgaacccttgagtggcctggcggggagcgggcctcgcgcgcctggagggccctgtggaacgaagagaggcacacagcatggcagaaaaccgagagccccgcggtgctgtggaggctgaactggatccagtggaatacacccttaggaaaaggcttcccagccgcctgccccggagacccaatgacatttatgtcaacatgaagacggactttaaggcccagctggcccgctgccagaagctgctggacggaggggcccggggtcagaacgcgtgctctgagatctacattcacggcttgggcctggccatcaaccgcgccatcaacatcgcgctgcagctgcaggcgggcagcttcgggtccttgcaggtggctgccaatacctccaccgtggagcttgttgatgagctggagccatcttcagggtcacacccaagtaattgaaaagacactcctccacttatcccctccgtgatatggctcttcgcatgctgagtactggacctcggaccagagccatgtaagaaaaggcctgttccctggaagcccaaaggactctgcattgagggtgggggtaattgtctcttggtgggcccagttagtgggccttcctgagtgtgtgtatgcggtctgtaactattgccatataaataaaaaatcctgttgcactagt

SEQ ID NO: 292082 - DNA, 2544 bp, Homo sapiens
tgagacaaggttttactctgtcacccaggctggagtgcagtgatgtgatctcagtttactgcagtctcaaccccccaagctcaggtgatcctcacacttcggcccctgcgtgtagctgggaccacaggtgcatgtcaccactcatggctactttttgtattttttaattaagtacaatttccattttatttttctcaagagaatagtccgtcttcagactttaaggactcaactccttacgtgggctttggtgggggttgtggggcagcatccgcaggtctaaattggagtaggggtgttcagtccttgtgggcttcacaagatcgattcctgactactttgctgtgaattgcacaactcagacagtaatgtagcttcaaatacagcttgggaagcacataggcatcaaagacgctcgcttcagaaatgtccctgactgctgcagcctccactgtgtttccaatgatgaatttgttaatagccttgtccttgggcacacattgggcacagttcgtgtcgcaaataggctgcacgtggccgcggccctttttggtacgaccgttgttccttctttttttcatcatattggaggcacggactggaggaagcactaatttttgtatttttattagagatggggtttcaccgtgttgcccgggctggtctcaacctctgaggctcaggcagtcttcccaccttggcctcccaaagtgctggggttacaggtgtgagccaccacacccagcctgtttctgctttttaaagcaacagtaaatatatttttattttattttattttttgagacaggctcttactctgccaccaaggctggagtgcagtggtatgatcatggctcactgcagcctttggcttcgtgggctcaagcgatccccccacctcagcctcccaagtagttgggaccacaggttcaagccaccacgcccagctaatttttaaatttttttttgtagagatagagtctctctgttgctcaggctggtctcaaacagctgggttcaagggatcctcccaccttgccctcccaaggtgcttggattccaggcttgagccactgtgcctggccaacagtaaatatttgtgatttattttttcccaccctcactttccctggagaagttagctgggctgtagcaagctgcgctatccatggtcccacctagaattttggaggtggctcggctggaaggcacagctggccctcacggttattttgagcctaactgtaaatgtctctgagcctcccttgtgcattctttgtagaccccattaggaacgggcctctggggagtctcacctgtggcctcgcggagcacacctgggttggagcagaggccacggaggagtgccactgtgctctttagggttagctcgcgcctctttttcttcttagcttcaccctcagcctctatgttggccgtgggcactatggattgggactgatgttgcagttgcttttaattgagactagtaccctgaccaggcatacgtatctaaggacgtgggaccacacactgggtcctggtgtgaggcaaggcagggatccaaaaacaaacaggaattcaccaccctcgccttcagctcaacaaaggaaaggaaagtctctttgctttgccaatgcctgcataggtatctgttagtttatttctcttcctagagctggacctgagtgcctgtctttttaactgatggccatctacatcttttgaccctctgccttcttgactgtccatttttagctaatcaaaacccttcatgtcatatttggtagatgcgtgaccctcttttctctctgtgttttattcattaattccttcttaataaaatgagtatctgtaaacctgatatctaataatctgaatatatgtctatccacgtgctcctccctgcctctctccctccaggtaacctctggtttgaattttatgtgccaggcgtggtggctcacacctgtaatcccagcactttgggaggtcgaggcaggcagatcacaaggtcaggagatcgagaccatcctggctaacacggtgaaaccctgtctctactaaaaatacaaaaaaattcgccgggcatggtggtgggcgcttatagtcccagctactcaggaggctgaggcaggataatggcatgaacccgggaggcggagcttgcagtgagctgagattgcgccactgcactccagcctgggcgacagagcgagactccatctcaaaaaaaaaaaaaaaaatgaattttatgtttattatccctttgctctttctgaaagtagtttgatcacatatatatgactgcctaaacaatgttttgtttagttttggttgtttttgcactatataaaacaaacaggagcagcatactctgtgcaatcttttgagacttgcttttccactcagcagagacttcttgacgttgccatgtgtggctgtggggaagtactgttatgcatagtccattgtgaaaacgtatggcagtgtagccatcctcctgctggtaggcacttgagatgcttccaggttttgtttttt

SEQ ID NO: 292083 - DNA, 1610 bp, Homo sapiens
ttcaacctcaaaaaatgtctattgttatgccaccactatcccagcatgggggacctctaaccaatttgtcttatcttgactagtccttaatcaccttctgaggcctgaagggatgggctaaggacatcatacccccaacagtagaaaatgatctaatctcaaggtgggggagggtggttagagaaatcaaatttaacttttcttatttgaaacttgatctactgcccatggtatggggagaaagggagttagaatcctgaggtgcattaggaatgatccgggcctgaccagagacatgactatctctcccactcttatcactgacagccccatgatccagacagtcagaagaaactcagaaagaagtctatcacaaagactgtacaacaagcacgaagtccaaccataattccaagctccccagctgccaacctcaattccccagatgaactccaaagctcacacccctctgcaggtcatactccaggtccccaaagaccagccaaatcctaagagcccacctggaagtccacgtatgctagaactctgggcagggcctaatctagctgaggtccagaaatacaaacctggaacttcatatggaccaagtggccacacactgaaaaacccgtatagcgactcagtgaaataaacaagagcccccagtcagaactgtgaaacagggaaattttggggtgggagtaaaagcaaatttggaaaataaacttttttttgttgaatcttttactgatctggattttccattcttgctatggctgcctcttgtaacacaattaggagaaggaaggtaggagaaaataaagtagggaaaagaaccatacagtggtttgggtggaacacatttttacaagaattgagtcagttatactccagaaatgaccaagagaaagttggtctgaatcatggaaaaagggcagaacctcaaagaaccagtccctcaaccctacccactcattttttatcctgagcatggacaactaacaactacaaaatcagaaatagaattgagtagagtatgtatatgtgtgtttggagaaggtggggaagaaaaggtagggaaaaccaaagtagaagatactatgcttgtgtaagactttctatctaagcccaagtacaaatatagtttgaaaattgaagatattaaagtgattggaagacagagaagaaaaagacagtaagtagaaatttaaggcagaataacaaacatgatgctctgtcacaccccccacccacccactaccatgcttcaatcacccaaatggtacgaaaccaccaaaaaattcaactgccctacccattttccagcctctaacagctgtttatcattgaccccattttatattttcctggcactggctgttaaatttaatgcccttgccaaacctttcccagtcccaatgacaaagtgttctgtcatgatcacttgtccctcattccaaggacaaagtagagaacagctggtttaaaatggaggaaaggtacaaggacttcccagggcccctctagtaaaaagggaaaaccaatcattacttaaagccaaatactatttgggaccctgaatgaagactgttaaaacagcgggtccccac

SEQ ID NO: 292084 - DNA, 1755 bp, Homo sapiens
  misc_feature (22)..(22): n is a, c, g, or t
  misc_feature (33)..(34): n is a, c, g, or t
  misc_feature (36)..(36): n is a, c, g, or t
  misc_feature (55)..(55): n is a, c, g, or t
  misc_feature (121)..(121): n is a, c, g, or t
  misc_feature (128)..(129): n is a, c, g, or t
  misc_feature (131)..(132): n is a, c, g, or t
  misc_feature (134)..(134): n is a, c, g, or t
  misc_feature (138)..(138): n is a, c, g, or t
  misc_feature (144)..(144): n is a, c, g, or t
cagcgtgacacgcataagcacngcttcatcagnntngatgctcttatcagtcttnccatgaagaagtctggagaagcttctgaatcttggggatacgagtagaaccaccaaccaggacaanatcatgnncnntnactncagtgncaaccagtatgaaaaggctttctcatccaagtatctgcagaactggtctcccactaagccaacaaaagagagcatctcttctcatgaaggctacactcaaattattgccaacgatcgtggtcatctactgccttctgtgccccgttccaaggcaaatccttggggttccttcatgggcacctggcaaatgcctctgaagataccccctgctcgggtgaccctgacctcccgtacaactgctggtgctgcctccctcaccaaatggatacagaaaaatcctgatttactcaaggcctccaatgggctgtgtcctgaaatcttaggcaagccccatgatccagacagtcagaagaaactcagaaagaagtctatcacaaagactgtacaacaagcacgaagtccaaccataattccaagctccccagctgccaacctcaattccccagatgaactccaaagctcacacccctctgcaggtcatactccaggtccccaaagaccagccaaatcctaagagcccacctggaagtccacgtatgctagaactctgggcagggcctaatctagctgaggtccagaaatacaaacctggaacttcatatggaccaagtggccacacactgaaaaacccgtatagcgactcagtgaaataaacaagagcccccagtcagaactgtgaaacagggaaattttggggtgggagtaaaagcaaatttggaaaataaacttttttttgttgaatcttttactgatctggattttccattcttgctatggctgcctcttgtaacacaattaggagaaggaaggtaggagaaaataaagtagggaaaagaaccatacagtggtttgggtggaacacatttttacaagaattgagtcagttatactccagaaatgaccaagagaaagttggtctgaatcatggaaaaagggcagaacctcaaagaaccagtccctcaaccctacccactcattttttatcctgagcatggacaactaacaactacaaaatcagaaatagaattgagtagagtatgtatatgtgtgtttggagaaggtggggaagaaaaggtagggaaaaccaaagtagaagatactatgcttgtgtaagactttctatctaagcccaagtacaaatatagtttgaaaattgaagatattaaagtgattggaagacagagaagaaaaagacagtaagtagaaatttaaggcagaataacaaacatgatgctctgtcacaccccccacccacccactaccatgcttcaatcacccaaatggtacgaaaccaccaaaaaattcaactgccctacccattttccagcctctaacagctgtttatcattgaccccattttatattttcctggcactggctgttaaatttaatgcccttgccaaacctttcccagtcccaatgacaaagtgttctgtcatgatcacttgtccctcattccaaggacaaagtagagaacagctggtttaaaatggaggaaaggtacaaggacttcccagggcccctctagtaaaaagggaaaaccaatcattacttaaagccaaatactatttgggaccctgaatgaagactgttaaaacagcgggtccccac

SEQ ID NO: 292085 - DNA, 691 bp, Homo sapiens
  misc_feature (22)..(22): n is a, c, g, or t
  misc_feature (33)..(34): n is a, c, g, or t
  misc_feature (36)..(36): n is a, c, g, or t
  misc_feature (55)..(55): n is a, c, g, or t
  misc_feature (121)..(121): n is a, c, g, or t
  misc_feature (128)..(129): n is a, c, g, or t
  misc_feature (131)..(132): n is a, c, g, or t
  misc_feature (134)..(134): n is a, c, g, or t
  misc_feature (138)..(138): n is a, c, g, or t
  misc_feature (144)..(144): n is a, c, g, or t
cagcgtgacacgcataagcacngcttcatcagnntngatgctcttatcagtcttnccatgaagaagtctggagaagcttctgaatcttggggatacgagtagaaccaccaaccaggacaanatcatgnncnntnactncagtgncaaccagtatgaaaaggctttctcatccaagtatctgcagaactggtctcccactaagccaacaaaagagagcatctcttctcatgaaggctacactcaaattattgccaacgatcgtggtcatctactgccttctgtgccccgttccaaggtgagatactatcttcactcctatcaagaaagtcaaataattaaggcacagaactgggagatgtgcagtctctcacagccattatcgggaaaattaaagtttaatctaattcatgttgtaatgtgagagcccctgaacttccggccagcttacccagcaggatagagttgtgtttagcacccttcagaagttcttaaattgatcaatgatctgtataaatgaaagccttcaggtgatgacatttgtgcagtgggtactcctttgccacactcggcctaaggatgtggaatttaagttggcagagtaaaggggatgaaaaaattaggcctgcaaagcctaaatgagggagggggataaggaagggtgggaagattatgctttcagtcttgtttcata

SEQ ID NO: 292086 - DNA, 1158 bp, Homo sapiens
ccagtgttcccagttcccaccagtccaactgcgaggagtgcgacgtgagtctgagtctgatccctccgaaaaccgtacttccggcgctgtctcggaggcctcccgtcccctcccttgtccgtcttctaactcttccccacgccaggtccgtcaagcctaagtccttgagttccgggtccgggcagcagagaaaggaagtcctctccctggaggcctatctccctcagaactgcgcgagaagcgagaccttagaaggcagcgcttcccgcgaaggaccggaaaggagcgcctactaaggacgccgtcgaggtccggggcgcctcaactctatagctctaactggctagaagtgcccaacgtggaatgtttcttttttaaaggcggctcttgaagcgacccggaagcggaagtggaagaaagttctagtggcttgaggtatccgcaggagcggccgggtggcgggaggaaccgttacgggaactgaagttgcggattaagcctgatcaagatgacaacctcccaaaagcaccgagacttcgtggcagagcccatgggggagaagccagtggggagcctggctgggattggtgaagtcctgggcaagaagctggaggaaaggggttttgacaaggcctatgttgtccttggccagtttctggtgctaaagaaagatgaagacctcttccgggaatggctgaaagacacttgtggcgccaacgccaagcagtcccgggactgcttcggatgccttcgagagtggtgcgacgccttcttgtgatgctctctgggaagctctcaatccccagccctcatccagagtttgcagccgagtagggactcctcccctgtcctctacgaaggaaaagattgctattgtcgtactcacctccgacgtactccggggtcttttgggagttttctcccctaaccatttcaacttttttttggattctcgctcttgcatgcctcccccgtcctttttcccttgccagttccctggtgacagttaccagctttcctgaatggattcccggccccatccctcacccccaccctcactttcaatccgtttgataccatttggctccttttttggcagaacagtcactgtccttgtaaagttttttagatcaataaagtcagtggctttcaaaaaaa

SEQ ID NO: 292087 - DNA, 767 bp, Homo sapiens
cggacgcgtgggtcgacccacgcgtccggttctagtggcttgaggtatccgcaggagcggccgggtggcgggaggaaccgttacgggaactgaagttgcggattaagcctgatcaagatgacaacctcccaaaagcaccgagacttcgtggcagagcccatgggggagaagccagtggggagcctggctgggattggtgaagtcctgggcaagaagctggaggaaaggggttttgacaaggcctatgttgtccttggccagtttctggtgctaaagaaagatgaagacctcttccgggaatggctgaaagacacttgtggcgccaacgccaagcagtcccgggactgcttcggatgccttcgagagtggtgcgacgccttcttgtgatgctctctgggaagctctcaatccccagccctcatccagagtttgcagccgagtagggactcctcccctgtcctctacgaaggaaaagattgctattgtcgtactcacctccgacgtactccggggtcttttgggagttttctcccctaaccatttcaacttttttttggattctcgctcttgcatgcctcccccgtcctttttcccttgccagttccctggtgacagttaccagctttcctgaatggattcccggccccatccctcacccccaccctcactttcaatccgtttgataccatttggctccttttttggcagaacagtcactgtccttgtaaagttttttagatcaataaagtcagtggctttcaaaaaaa

SEQ ID NO: 292088 - DNA, 1322 bp, Homo sapiens
  misc_feature (1164)..(1164): n is a, c, g, or t
  misc_feature (1169)..(1169): n is a, c, g, or t
  misc_feature (1172)..(1172): n is a, c, g, or t
  misc_feature (1176)..(1176): n is a, c, g, or t
  misc_feature (1182)..(1184): n is a, c, g, or t
ccagtgttcccagttcccaccagtccaactgcgaggagtgcgacgtgagtctgagtctgatccctccgaaaaccgtacttccggcgctgtctcggaggcctcccgtcccctcccttgtccgtcttctaactcttccccacgccaggtccgtcaagcctaagtccttgagttccgggtccgggcagcagagaaaggaagtcctctccctggaggcctatctccctcagaactgcgcgagaagcgagaccttagaaggcagcgcttcccgcgaaggaccggaaaggagcgcctactaaggacgccgtcgaggtccggggcgcctcaactctatagctctaactggctagaagtgcccaacgtggaatgtttcttttttaaaggcggctcttgaagcgacccggaagcggaagtggaagaaagttctagtggcttgaggtatccgcaggagcggccgggtggcgggaggaaccgttacgggaactgaagttgcggattaagcctgatcaagatgacaacctcccaaaagcaccgagacttcgtggcagagcccatgggggagaagccagtggggagcctggctgggattggtgaagtcctgggcaagaagctggaggaaaggggttttgacaaggcctatgttgtccttggccagtttctggtgctaaagaaagatgaagacctcttccgggaatggctgaaagacacttgtggcgccaacgccaagcagtcccgggactgcttcggatgccttcgagagtggtgcgacgccttcttgtgatgctctctgggaagctctcaatccccagccctcatccagagtttgcagccgagtagggactcctcccctgtcctctacgaaggaaaagattgctattgtcgtactcacctccgacgtactccggggtcttttgggagttttctcccctaaccatttcaacttttttttggattctcgctcttgcatgcctcccccgtcctttttcccttgccagttccctggtgacagttaccagctttcctgaatggattcccggccccatccctcacccccaccctcactttcaatccgtttgataccatttggctccttttttggcagaacagtcactgtccttgtaaagttttttagatcaataaagtcagtggctttcaaaaaaacacccnccaangancacnccacannnaagggggggctcaatatccgggggccctctggcccctttttaagggccatgggttataaccgcgcgcaacccgcggacgctgtgctcggaccttcgggttggcaccctgccgaatagtttcaccgcggatgcgtatac

SEQ ID NO: 292089 - DNA, 721 bp, Homo sapiens
ggacgcgtgggtcgcggacgcgtgggcgaccacgcgtggggaactgaagttgcggattaagcctgatcaagatgacaacctcccaaaagcaccgagacttcgtggcagagcccatgggggagaagccagtggggagcctggctgggattggtgaagtcctgggcaagaagctggaggaaaggggttttgacaaggcctatgttgtccttggccagtttctggtgctaaagaaagatgaagacctcttccgggaatggctgaaagacacttgtggcgccaacgccaagcagtcccgggactgcttcggatgccttcgagagtggtgcgacgccttcttgtgatgctctctgggaagctctcaatccccagccctcatccagagtttgcagccgagtagggactcctcccctgtcctctacgaaggaaaagattgctattgtcgtactcacctccgacgtactccggggtcttttgggagttttctcccctaaccatttcaacttttttttggattctcgctcttgcatgcctcccccgtcctttttcccttgccagttccctggtgacagttaccagctttcctgaatggattcccggccccatccctcacccccaccctcactttcaatccgtttgataccatttggctccttttttggcagaacagtcactgtccttgtaaagttttttagatcaataaagtcagtggctttcaaaaaaa

SEQ ID NO: 292090 - DNA, 796 bp, Homo sapiens
cggacgcgtgggtcgacccacgcgtccggttctagtggcttgaggtatccgcaggagcggccgggtggcgggaggaaccgttacgggaactgaagttgcggattaagcctgatcaagatgacaacctcccaaaagcaccgagacttcgtggcagagcccatgggggagaagccagtggggagcctggctgggattggtgaagtcctgggcaagaagctggaggaaaggggttttgacaaggcctatgttgtccttggccagtttctggtgctaaagaaagatgaagacctcttccgggaatggctgaaagacacttgtggcgccaacgccaagcagtcccgggactgcttcggatgccttcgagagtggtgcgacgccttcttgtgatgctctctgggaagctctcaatccccagccctcatccagagtttgcagccgagtagggactcctcccctgtcctctacgaaggaaaagattgctattgtcgtactcacctccgacgtactccggggtcttttgggagttttctcccctaaccatttcaacttttttttggattctcgctcttgcatgcctcccccgtcctttttcccttgccagttccctggtgacagttaccagctttcctgaatggattcccggccccatccctcacccccaccctcactttcaatccgtttgataccatttggctccttttttggcagaacagtcactgtccttgtaaagttttttagatcaataaagtcagtggctttcaaaaaaagggcttgtgcactggagaaaaaagaaaaa

SEQ ID NO: 292091 - DNA, 554 bp, Homo sapiens
gggccaagaacggaggaaaggggaaaggcctatgttgtccttggccagtttctggtgctaaagaaagatgaagacctcttccgggaatggctgaaagacacttgtggcgccaacgccaagcagtcccgggactgcttcggatgccttcgagagtggtgcgacgccttcttgtgatgctctctgggaagctctcaatccccagccctcatccagagtttgcagccgagtagggactcctcccctgtcctctacgaaggaaaagattgctattgtcgtactcacctccgacgtactccggggtcttttgggagttttctcccctaaccatttcaacttttttttggattctcgctcttgcatgcctcccccgtcctttttcccttgccagttccctggtgacagttaccagctttcctgaatggattcccggccccatccctcacccccaccctcactttcaatccgtttgataccatttggctccttttttggcagaacagtcactgtccttgtaaagttttttagatcaataaagtcagtggctttcaaaaaaa

SEQ ID NO: 292092 - DNA, 1100 bp, Homo sapiens
ccagtgttcccagttcccaccagtccaactgcgaggagtgcgacgtgagtctgagtctgatccctccgaaaaccgtacttccggcgctgtctcggaggcctcccgtcccctcccttgtccgtcttctaactcttccccacgccaggtccgtcaagcctaagtccttgagttccgggtccgggcagcagagaaaggaagtcctctccctggaggcctatctccctcagaactgcgcgagaagcgagaccttagaaggcagcgcttcccgcgaaggaccggaaaggagcgcctactaaggacgccgtcgaggtccggggcgcctcaactctatagctctaactggctagaagtgcccaacgtggaatgtttcttttttaaaggcggctcttgaagcgacccggaagcggaagtggaagaaagttctagtggcttgaggtatccgcaggagcggccgggtggcgggaggaaccgttacgggaactgaagttgcggattaagcctgatcaagatgacaacctcccaaaagcaccgagacttcgtggcagagcccatgggggagaagccagtggggagcctggctgggattggtgaagtcctgggcaagaagctggaggaaaggggttttgacaaggcctatgttgtccttggccagtttctggtgctaaagaaagatgaagacctcttccgggaatggctgaaagacacttgtggcgccaacgccaagcagtcccgggactgcttcggatgccttcgagagtggtgcgacgccttcttgtgatgctctctgggaagctctcaatccccagccctcatccagagtttgcagccgagtagggactcctcccctgtcctctacgaaggaaaagattgctattgtcgtactcacctccgacgtactccggggtcttttgggagttcctttttcccttgccagttccctggtgacagttaccagctttcctgaatggattcccggccccatccctcacccccaccctcactttcaatccgtttgataccatttggctccttttttggcagaacagtcactgtccttgtaaagttttttagatcaataaagtcagtggctttcaaaaaaa

SEQ ID NO: 292093 - DNA, 1202 bp, Homo sapiens
  misc_feature (1202)..(1202): n is a, c, g, or t
gcgggccctgggggagagcttggccgcgctgcggggagggggcggggtgcatgcgcgtgggagccgggccgcgggaaggggcgggccgcagcggcgcgcggtgggggcggagctggggcgcggacgtgaaccccgcgggcggggagcgggtgtgcgcagcgctaggtgtgcgcttcgccctgtaggtagagagaccctttggttagctttccacgccaagtggccgttccaggcaggcagtgtcgtcttggttcagccaaggtcacagagggagtgatagcttccgcgcagccctggctacggactctgggcatctttccactgccccgcttgcgccacctgttaggcaggatcgtttttcctctggggcaagatcaaaatccaggtcctgcaggaagaaactcctcttaaaaatagattaagcctgatcaagatgacaacctcccaaaagcaccgagacttcgtggcagagcccatgggggagaagccagtggggagcctggctgggattggtgaagtcctgggcaagaagctggaggaaaggggttttgacaaggcctatgttgtccttggccagtttctggtgctaaagaaagatgaagacctcttccgggaatggctgaaagacacttgtggcgccaacgccaagcagtcccgggactgcttcggatgccttcgagagtggtgcgacgccttcttgtgatgctctctgggaagctctcaatccccagccctcatccagagtttgcagccgagtagggactcctcccctgtcctctacgaaggaaaagatggtcatggatccggagatcgacctggactccatgagaaatctgaaggccagcttggagaacagcctgagggaggtggaggcccgctacgccctacagatggagcagctcaacgggatcctgctgcaccttgagtcagagctggcacagacccgggcagagggacagcgccaggcccaggagtatgaggccctgctgaacatcaaggtcaagctggaggctgagatcgccacctaccgccgcctgctggaagatggcgaggactttaatcttggtgatgccttggacagcagcaactccatgcaaaccatccaaaagaccaccacccgccggatagtggatggcaaagtggtgtctgagaccaatgacaccaaagttctgaggcattaagccagcagaagcagggtaccn

SEQ ID NO: 292094 - DNA, 776 bp, Homo sapiens
gagagagagagagagagagagagagagagagagagagagagagagagagagagagagagagagagagagagagagagagagaggaaccgttacgggaactgaagttgcggattaagcctgatcaagatgacaacctcccaaaagcaccgagacttcgtggcagagcccatgggggagaagccagtggggagcctggctgggattggtgaagtcctgggcaagaagctggaggaaaggggttttgacaaggcctatgttgtccttggccagtttctggtgctaaagaaagatgaagacctcttccgggaatggctgaaagacacttgtggcgccaacgccaagcagtcccgggactgcttcggatgccttcgagagtggtgcgacgccttcttgtgatgctctctgggaagctctcaatccccagccctcatccagagtttgcagccgagtagggactcctcccctgtcctctacgaaggaaaagattgctattgtcgtactcacctccgacgtactccggggtcttttgggagttttctcccctaaccatttcaacttttttttggattctcgctcttgcatgcctcccccgtcctttttcccttgccagttccctggtgacagttaccagctttcctgaatggattcccggccccatccctcacccccaccctcactttcaatccgtttgataccatttggctccttttttggcagaacagtcactgtccttgtaaagttttttagatcaataaagtcagtggctttcaaaaaaa

SEQ ID NO: 292095 - DNA, 726 bp, Homo sapiens
aatccattcaggaaagctggtaactgtcaccaggaaccgttacgggaactgaagttgcggattaagcctgatcaagatgacaacctcccaaaagcaccgagacttcgtggcagagcccatgggggagaagccagtggggagcctggctgggattggtgaagtcctgggcaagaagctggaggaaaggggttttgacaaggcctatgttgtccttggccagtttctggtgctaaagaaagatgaagacctcttccgggaatggctgaaagacacttgtggcgccaacgccaagcagtcccgggactgcttcggatgccttcgagagtggtgcgacgccttcttgtgatgctctctgggaagctctcaatccccagccctcatccagagtttgcagccgagtagggactcctcccctgtcctctacgaaggaaaagattgctattgtcgtactcacctccgacgtactccggggtcttttgggagttttctcccctaaccatttcaacttttttttggattctcgctcttgcatgcctcccccgtcctttttcccttgccagttccctggtgacagttaccagctttcctgaatggattcccggccccatccctcacccccaccctcactttcaatccgtttgataccatttggctccttttttggcagaacagtcactgtccttgtaaagttttttagatcaataaagtcagtggctttcaaaaaaa

SEQ ID NO: 292096 - DNA, 1410 bp, Homo sapiens
  misc_feature (1162)..(1162): n is a, c, g, or t
  misc_feature (1164)..(1164): n is a, c, g, or t
ccagtgttcccagttcccaccagtccaactgcgaggagtgcgacgtgagtctgagtctgatccctccgaaaaccgtacttccggcgctgtctcggaggcctcccgtcccctcccttgtccgtcttctaactcttccccacgccaggtccgtcaagcctaagtccttgagttccgggtccgggcagcagagaaaggaagtcctctccctggaggcctatctccctcagaactgcgcgagaagcgagaccttagaaggcagcgcttcccgcgaaggaccggaaaggagcgcctactaaggacgccgtcgaggtccggggcgcctcaactctatagctctaactggctagaagtgcccaacgtggaatgtttcttttttaaaggcggctcttgaagcgacccggaagcggaagtggaagaaagttctagtggcttgaggtatccgcaggagcggccgggtggcgggaggaaccgttacgggaactgaagttgcggattaagcctgatcaagatgacaacctcccaaaagcaccgagacttcgtggcagagcccatgggggagaagccagtggggagcctggctgggattggtgaagtcctgggcaagaagctggaggaaaggggttttgacaaggcctatgttgtccttggccagtttctggtgctaaagaaagatgaagacctcttccgggaatggctgaaagacacttgtggcgccaacgccaagcagtcccgggactgcttcggatgccttcgagagtggtgcgacgccttcttgtgatgctctctgggaagctctcaatccccagccctcatccagagtttgcagccgagtagggactcctcccctgtcctctacgaaggaaaagattgctattgtcgtactcacctccgacgtactccggggtcttttgggagttttctcccctaaccatttcaacttttttttggattctcgctcttgcatgcctcccccgtcctttttcccttgccagttccctggtgacagttaccagctttcctgaatggattcccggccccatccctcacccccaccctcactttcaatccgtttgataccatttggctccttttttggcagaacagtcactgtccttgtaaagttttttagatcaataaagtcagtggctttcaaaaaaagcananaaaaaccgaaacggaaatacaggaaaaaaggggggggcgccactaaaagatccccggggggggccacaattggggacccccacaggtgggaaacagggggccccaaaagacgacggggaatatgagacacagagcagggccgccttatacaaagagggtggagcgtgggacaccgccgcaccggagcaccttggcagagcaccacacacgcggggggggcaccagtggggcagaacccgaggacat

SEQ ID NO: 292097 - DNA, 1332 bp, Homo sapiens
ccagtgttcccagttcccaccagtccaactgcgaggagtgcgacgtgagtctgagtctgatccctccgaaaaccgtacttccggcgctgtctcggaggcctcccgtcccctcccttgtccgtcttctaactcttccccacgccaggtccgtcaagcctaagtccttgagttccgggtccgggcagcagagaaaggaagtcctctccctggaggcctatctccctcagaactgcgcgagaagcgagaccttagaaggcagcgcttcccgcgaaggaccggaaaggagcgcctactaaggacgccgtcgaggtccggggcgcctcaactctatagctctaactggctagaagtgcccaacgtggaatgtttcttttttaaaggcggctcttgaagcgacccggaagcggaagtggaagaaagttctagtggcttgaggtatccgcaggagcggccgggtggcgggaggaaccgttacgggaactgaagttgcggattaagcctgatcaagatgacaacctcccaaaagcaccgagacttcgtggcagagcccatgggggagaagccagtggggagcctggctgggattggtgaagtcctgggcaagaagctggaggaaaggggttttgacaaggcctatgttgtccttggccagtttctggtgctaaagaaagatgaagacctcttccgggaatggctgaaagacacttgtggcgccaacgccaagcagtcccgggactgcttcggatgccttcgagagtggtgcgacgccttcttgtgatgctctctgggaagctctcaatccccagccctcatccagagtttgcagccgagtagggactcctcccctgtcctctacgaaggaaaagattgctattgtcgtactcacctccgacgtactccggggtcttttgggagttttctcccctaaccatttcaacttttttttggattctcgctcttgcatgcctcccccgtcctttttcccttgccagttccctggtgacagttaccagctttcctgaatggattcccggccccatccctcacccccaccctcactttcaatccgtttgataccatttggctccttttttggcagaacagtcactgtccttgtaaagttttttagatcaataaagtcagtggctttcaaaaaaaaaaaaaaaaaaaaagaaaggaaaaaaaaaggggggggggaaaaaatccgggagggcaagataagtaccgtttttaaaaggggcaaaagggggataaaaagaggggggtaaagggggggaaggcggggtttggaagcccttctggggtgtggccccaggagcggagaagttggga

SEQ ID NO: 292098 - DNA, 1261 bp, Homo sapiens
ccagtgttcccagttcccaccagtccaactgcgaggagtgcgacgtgagtctgagtctgatccctccgaaaaccgtacttccggcgctgtctcggaggcctcccgtcccctcccttgtccgtcttctaactcttccccacgccaggtccgtcaagcctaagtccttgagttccgggtccgggcagcagagaaaggaagtcctctccctggaggcctatctccctcagaactgcgcgagaagcgagaccttagaaggcagcgcttcccgcgaaggaccggaaaggagcgcctactaaggacgccgtcgaggtccggggcgcctcaactctatagctctaactggctagaagtgcccaacgtggaatgtttcttttttaaaggcggctcttgaagcgacccggaagcggaagtggaagaaagttctagtggcttgaggtatccgcaggagcggccgggtggcgggaggaaccgttacgggaactgaagttgcggattaagcctgatcaagatgacaacctcccaaaagcaccgagacttcgtggcagagcccatgggggagaagccagtggggagcctggctgggattggtgaagtcctgggcaagaagctggaggaaaggggttttgacaaggcctatgttgtccttggccagtttctggtgctaaagaaagatgaagacctcttccgggaatggctgaaagacacttgtggcgccaacgccaagcagtcccgggactgcttcggatgccttcgagagtggtgcgacgccttcttgtgatgctctctgggaagctctcaatccccagccctcatccagagtttgcagccgagtagggactcctcccctgtcctctacgaaggaaaagattgctattgtcgtactcacctccgacgtactccggggtcttttgggagttttctcccctaaccatttcaacttttttttggattctcgctcttgcatgcctcccccgtcctttttcccttgccagttccctggtgacagttaccagctttcctgaatggattcccggccccatccctcacccccaccctcactttcaatccgtttgataccatttggctccttttttggcagaacagtcactgtccttgtaaagttttttagatcaataaagtcagtggctttcaaaaaaacattgtctaaccggcacctcctgttagaacctgctcttttcaatggggggccccttcccctttacttggagaaaaataaacttcgggggggggccctgttccc

SEQ ID NO: 292099 - DNA, 1329 bp, Homo sapiens
ccagtgttcccagttcccaccagtccaactgcgaggagtgcgacgtgagtctgagtctgatccctccgaaaaccgtacttccggcgctgtctcggaggcctcccgtcccctcccttgtccgtcttctaactcttccccacgccaggtccgtcaagcctaagtccttgagttccgggtccgggcagcagagaaaggaagtcctctccctggaggcctatctccctcagaactgcgcgagaagcgagaccttagaaggcagcgcttcccgcgaaggaccggaaaggagcgcctactaaggacgccgtcgaggtccggggcgcctcaactctatagctctaactggctagaagtgcccaacgtggaatgtttcttttttaaaggcggctcttgaagcgacccggaagcggaagtggaagaaagttctagtggcttgagagagaccctttggttagctttccacgccaagtggccgttccaggcaggcagtgtcgtcttggttcagccaaggtcacagagggagtgatagcttccgcgcagccctggctacggactctgggcatctttccactgccccgcttgcgccacctgttaggcaggatcgtttttcctctggggcaagatcaaaatccaggtcctgcaggaagaaactcctcttaaaaatagattaagcctgatcaagatgacaacctcccaaaagcaccgagacttcgtggcagagcccatgggggagaagccagtggggagcctggctgggattggtgaagtcctgggcaagaagctggaggaaaggggttttgacaaggcctatgttgtccttggccagtttctggtgctaaagaaagatgaagacctcttccgggaatggctgaaagacacttgtggcgccaacgccaagcagtcccgggactgcttcggatgccttcgagagtggtgcgacgccttcttgtgatgctctctgggaagctctcaatccccagccctcatccagagtttgcagccgagtagggactcctcccctgtcctctacgaaggaaaagattgctattgtcgtactcacctccgacgtactccggggtcttttgggagttttctcccctaaccatttcaacttttttttggattctcgctcttgcatgcctcccccgtcctttttcccttgccagttccctggtgacagttaccagctttcctgaatggattcccggccccatccctcacccccaccctcactttcaatccgtttgataccatttggctccttttttggcagaacagtcactgtccttgtaaagttttttagatcaataaagtcagtggctttcaaaaaaa

SEQ ID NO: 292100 - DNA, 1245 bp, Homo sapiens
gcgggccctgggggagagcttggccgcgctgcggggagggggcggggtgcatgcgcgtgggagccgggccgcgggaaggggcgggccgcagcggcgcgcggtgggggcggagctggggcgcggacgtgaaccccgcgggcggggagcgggtgtgcgcagcgctaggtgtgcgcttcgccctgtaggtagagagaccctttggttagctttccacgccaagtggccgttccaggcaggcagtgtcgtcttggttcagccaaggtcacagagggagtgatagcttccgcgcagccctggctacggactctgggcatctttccactgccccgcttgcgccacctgttaggcaggatcgtttttcctctggggcaagatcaaaatccaggtcctgcaggaagaaactcctcttaaaaatagtagggaagagtctccctggaactgttttctcctttcaggatgagggggatcgagcaagccactgtaacccctggcttggcttcctcttactatgagattgctcgtgggcccttagaagttccaggtcttcagccctaatctgcctttttttgggattcctagattaagcctgatcaagatgacaacctcccaaaagcaccgagacttcgtggcagagcccatgggggagaagccagtggggagcctggctgggattggtgaagtcctgggcaagaagctggaggaaaggggttttgacaaggcctatgttgtccttggccagtttctggtgctaaagaaagatgaagacctcttccgggaatggctgaaagacacttgtggcgccaacgccaagcagtcccgggactgcttcggatgccttcgagagtggtgcgacgccttcttgtgatgctctctgggaagctctcaatccccagccctcatccagagtttgcagccgagtagggactcctcccctgtcctctacgaaggaaaagattgctattgtcgtactcacctccgacgtactccggggtcttttgggagttttctcccctaaccatttcaacttttttttggattctcgctcttgcatgcctcccccgtcctttttcccttgccagttccctggtgacagttaccagctttcctgaatggattcccggccccatccctcacccccaccctcactttcaatccgtttgataccatttggctccttttttggcagaacagtcactgtccttgtaaagttttttagatcaataaagtcagtggctttcaaaaaaa

SEQ ID NO: 292101 - DNA, 1033 bp, Homo sapiens
gcgggccctgggggagagcttggccgcgctgcggggagggggcggggtgcatgcgcgtgggagccgggccgcgggaaggggcgggccgcagcggcgcgcggtgggggcggagctggggcgcggacgtgaaccccgcgggcggggagcgggtgtgcgcagcgctaggtgtgcgcttcgccctgtaggtagagagaccctttggttagctttccacgccaagtggccgttccaggcaggcagtgtcgtcttggttcagccaaggtcacagagggagtgatagcttccgcgcagccctggctacggactctgggcatctttccactgccccgcttgcgccacctgttaggcaggatcgtttttcctctggggcaagatcaaaatccaggtcctgcaggaagaaactcctcttaaaaatagattaagcctgatcaagatgacaacctcggagcctggctgggattggtgaagtcctgggcaagaagctggaggaaaggggttttgacaaggcctatgttgtccttggccagtttctggtgctaaagaaagatgaagacctcttccgggaatggctgaaagacacttgtggcgccaacgccaagcagtcccgggactgcttcggatgccttcgagagtggtgcgacgccttcttgtgatgctctctgggaagctctcaatccccagccctcatccagagtttgcagccgagtagggactcctcccctgtcctctacgaaggaaaagattgctattgtcgtactcacctccgacgtactccggggtcttttgggagttttctcccctaaccatttcaacttttttttggattctcgctcttgcatgcctcccccgtcctttttcccttgccagttccctggtgacagttaccagctttcctgaatggattcccggccccatccctcacccccaccctcactttcaatccgtttgataccatttggctccttttttggcagaacagtcactgtccttgtaaagttttttagatcaataaagtcagtggctttcaaaaaaa

SEQ ID NO: 292102 - DNA, 1072 bp, Homo sapiens
ccagtgttcccagttcccaccagtccaactgcgaggagtgcgacgtgagtctgagtctgatccctccgaaaaccgtacttccggcgctgtctcggaggcctcccgtcccctcccttgtccgtcttctaactcttccccacgccaggtccgtcaagcctaagtccttgagttccgggtccgggcagcagagaaaggaagtcctctccctggaggcctatctccctcagaactgcgcgagaagcgagaccttagaaggcagcgcttcccgcgaaggaccggaaaggagcgcctactaaggacgccgtcgaggtccggggcgcctcaactctatagctctaactggctagaagtgcccaacgtggaatgtttcttttttaaaggcggctcttgaagcgacccggaagcggaagtggaagaaagttctagtggcttgaggtatccgcaggagcggccgggtggcgggaggaaccgttacgggaactgaagttgcggattaagcctgatcaagatgacaacctcccaaaagcaccgagacttcgtggcagagcccatgggggagaagccagtggggagcctggctgggattggtgaagtcctgggcaagaagctggaggaaaggggttttgacaaggcctatgttgtccttggccagtttctggtgctaaagaaagatgaagacctcttccgggaatggctgaaagacacttgtggcgccaacgccaagcagtcccgggactgcttcggatgccttcgagagtggtgcgacgccttcttgtgatgctctctgggaagctctcaatccccagccctcatccagagtttgcagccgagtagggactcctcccctgtcctctacgaaggaaaagattgctattgtcgtactcacctccgacgtactccggggtcttttgggagttttctcccctaaccatttcaacttttttttggattctcgctcttgcatgcctcccccgtcctttttcccttgccagttccctggtgacagttaccagctttcctgaatggattcccgccccatccgaagcagtgccgggatcctctagtcacctca

SEQ ID NO: 292103 - DNA, 1096 bp, Homo sapiens
ccagtgttcccagttcccaccagtccaactgcgaggagtgcgacgtgagtctgagtctgatccctccgaaaaccgtacttccggcgctgtctcggaggcctcccgtcccctcccttgtccgtcttctaactcttccccacgccaggtccgtcaagcctaagtccttgagttccgggtccgggcagcagagaaaggaagtcctctccctggaggcctatctccctcagaactgcgcgagaagcgagaccttagaaggcagcgcttcccgcgaaggaccggaaaggagcgcctactaaggacgccgtcgaggtccggggcgcctcaactctatagctctaactggctagaagtgcccaacgtggaatgtttcttttttaaaggcggctcttgaagcgacccggaagcggaagtggaagaaagttctagtggcttgaggtatccgcaggagcggccgggtggcgggaggaaccgttacgggaactgaagttgcggattaagcctgatcaagatgacaacctcccaaaagcaccgagacttcgtggcagagcccatgggggagaagccagtgggcctatgttgtccttggccagtttctggtgctaaagaaagatgaagacctcttccgggaatggctgaaagacacttgtggcgccaacgccaagcagtcccgggactgcttcggatgccttcgagagtggtgcgacgccttcttgtgatgctctctgggaagctctcaatccccagccctcatccagagtttgcagccgagtagggactcctcccctgtcctctacgaaggaaaagattgctattgtcgtactcacctccgacgtactccggggtcttttgggagttttctcccctaaccatttcaacttttttttggattctcgctcttgcatgcctcccccgtcctttttcccttgccagttccctggtgacagttaccagctttcctgaatggattcccggccccatccctcacccccaccctcactttcaatccgtttgataccatttggctccttttttggcagaacagtcactgtccttgtaaagttttttagatcaataaagtcagtggctttcaaaaaaa

SEQ ID NO: 292104 - DNA, 1002 bp, Homo sapiens
ccagtgttcccagttcccaccagtccaactgcgaggagtgcgacgtgagtctgagtctgatccctccgaaaaccgtacttccggcgctgtctcggaggcctcccgtcccctcccttgtccgtcttctaactcttccccacgccaggtccgtcaagcctaagtccttgagttccgggtccgggcagcagagaaaggaagtcctctccctggaggcctatctccctcagaactgcgcgagaagcgagaccttagaaggcagcgcttcccgcgaaggaccggaaaggagcgcctactaaggacgccgtcgaggtccggggcgcctcaactctatagctctaactggctagaagtgcccaacgtggaatgtttcttttttaaaggcggctcttgaagcgacccggaagcggaagtggaagaaagttctagtggcttgaggtatccgcaggagcggccgggtggcgggaggaaccgttacgggaactgaagttgcggattaagcctgatcaagatgacaacctcccaaaagcaccgagacttcgtggcagagcccatgggggagaagccagtggggagcctggctgggattggtgaagtcctgggcaagaagctggaggaaaggggttttgacaaggcctatgttgtccttggccagtttctggtgctaaagaaagatgaagacctcttccgggaatggctgaaagacacttgtggcgccaacgccaagcagtcccgggactgcttcggatgccttcgagagtggtgcgacgccttcttgtgatgctctctgggaagctctcaatccccagccctcatccagagtttgcagccgagtagggactcctcccctgtcctctacgaaggaaaagattgctattgtcgtactcacctccgacgtactccggggtcttttgggagttttctcccctaaccatttcaacttttttttggattctcgctcttgcatgcctcccccgtacgcccgtacgaaggccaatgttaccg

SEQ ID NO: 292105 - DNA, 1277 bp, Homo sapiens
  misc_feature (1277)..(1277): n is a, c, g, or t
ccagtgttcccagttcccaccagtccaactgcgaggagtgcgacgtgagtctgagtctgatccctccgaaaaccgtacttccggcgctgtctcggaggcctcccgtcccctcccttgtccgtcttctaactcttccccacgccaggtccgtcaagcctaagtccttgagttccgggtccgggcagcagagaaaggaagtcctctccctggaggcctatctccctcagaactgcgcgagaagcgagaccttagaaggcagcgcttcccgcgaaggaccggaaaggagcgcctactaaggacgccgtcgaggtccggggcgcctcaactctatagctctaactggctagaagtgcccaacgtggaatgtttcttttttaaaggcggctcttgaagcgacccggaagcggaagtggaagaaagttctagtggcttgaggtatccgcaggagcggccgggtggcgggaggaaccgttacgggaactgaagttgcggattaagcctgatcaagatgacaacctcccaaaagcaccgagacttcgtggcagagcccatgggggagaagccagtggggagcctggctgggattggtgaagtcctgggcaagaagctggaggaaaggggttttgacaaggcctatgttgtccttggccagtttctggtgctaaagaaagatgaagacctcttccgggaatggctgaaagacacttgtggcgccaacgccaagcagtcccgggactgcttcggatgccttcgagagtggtgcgacgccttcttgtgatgctctctgggaagctctcaatccccagccctcatccagagtttgcagccgagtagggactcctcccctgtcctctacgaaggaaaagatggtcatggatccggagatcgacctggactccatgagaaatctgaaggccagcttggagaacagcctgagggaggtggaggcccgctacgccctacagatggagcagctcaacgggatcctgctgcaccttgagtcagagctggcacagacccgggcagagggacagcgccaggcccaggagtatgaggccctgctgaacatcaaggtcaagctggaggctgagatcgccacctaccgccgcctgctggaagatggcgaggactttaatcttggtgatgccttggacagcagcaactccatgcaaaccatccaaaagaccaccacccgccggatagtggatggcaaagtggtgtctgagaccaatgacaccaaagttctgaggcattaagccagcagaagcagggtaccn

SEQ ID NO: 292106 - DNA, 1101 bp, Homo sapiens
ccagtgttcccagttcccaccagtccaactgcgaggagtgcgacgtgagtctgagtctgatccctccgaaaaccgtacttccggcgctgtctcggaggcctcccgtcccctcccttgtccgtcttctaactcttccccacgccaggtccgtcaagcctaagtccttgagttccgggtccgggcagcagagaaaggaagtcctctccctggaggcctatctccctcagaactgcgcgagaagcgagaccttagaaggcagcgcttcccgcgaaggaccggaaaggagcgcctactaaggacgccgtcgaggtccggggcgcctcaactctatagctctaactggctagaagtgcccaacgtggaatgtttcttttttaaaggcggctcttgaagcgacccggaagcggaagtggaagaaagttctagtggcttgagattaagcctgatcaagatgacaacctcccaaaagcaccgagacttcgtggcagagcccatgggggagaagccagtggggagcctggctgggattggtgaagtcctgggcaagaagctggaggaaaggggttttgacaaggcctatgttgtccttggccagtttctggtgctaaagaaagatgaagacctcttccgggaatggctgaaagacacttgtggcgccaacgccaagcagtcccgggactgcttcggatgccttcgagagtggtgcgacgccttcttgtgatgctctctgggaagctctcaatccccagccctcatccagagtttgcagccgagtagggactcctcccctgtcctctacgaaggaaaagattgctattgtcgtactcacctccgacgtactccggggtcttttgggagttttctcccctaaccatttcaacttttttttggattctcgctcttgcatgcctcccccgtcctttttcccttgccagttccctggtgacagttaccagctttcctgaatggattcccggccccatccctcacccccaccctcactttcaatccgtttgataccatttggctccttttttggcagaacagtcactgtccttgtaaagttttttagatcaataaagtcagtggctttcaaaaaaa

SEQ ID NO: 292107 - DNA, 1265 bp, Homo sapiens
  misc_feature (1107)..(1107): n is a, c, g, or t
  misc_feature (1112)..(1112): n is a, c, g, or t
  misc_feature (1115)..(1115): n is a, c, g, or t
  misc_feature (1119)..(1119): n is a, c, g, or t
  misc_feature (1125)..(1127): n is a, c, g, or t
ccagtgttcccagttcccaccagtccaactgcgaggagtgcgacgtgagtctgagtctgatccctccgaaaaccgtacttccggcgctgtctcggaggcctcccgtcccctcccttgtccgtcttctaactcttccccacgccaggtccgtcaagcctaagtccttgagttccgggtccgggcagcagagaaaggaagtcctctccctggaggcctatctccctcagaactgcgcgagaagcgagaccttagaaggcagcgcttcccgcgaaggaccggaaaggagcgcctactaaggacgccgtcgaggtccggggcgcctcaactctatagctctaactggctagaagtgcccaacgtggaatgtttcttttttaaaggcggctcttgaagcgacccggaagcggaagtggaagaaagttctagtggcttgagattaagcctgatcaagatgacaacctcccaaaagcaccgagacttcgtggcagagcccatgggggagaagccagtggggagcctggctgggattggtgaagtcctgggcaagaagctggaggaaaggggttttgacaaggcctatgttgtccttggccagtttctggtgctaaagaaagatgaagacctcttccgggaatggctgaaagacacttgtggcgccaacgccaagcagtcccgggactgcttcggatgccttcgagagtggtgcgacgccttcttgtgatgctctctgggaagctctcaatccccagccctcatccagagtttgcagccgagtagggactcctcccctgtcctctacgaaggaaaagattgctattgtcgtactcacctccgacgtactccggggtcttttgggagttttctcccctaaccatttcaacttttttttggattctcgctcttgcatgcctcccccgtcctttttcccttgccagttccctggtgacagttaccagctttcctgaatggattcccggccccatccctcacccccaccctcactttcaatccgtttgataccatttggctccttttttggcagaacagtcactgtccttgtaaagttttttagatcaataaagtcagtggctttcaaaaaaacacccnccaangancacnccacannnaagggggggctcaatatccgggggccctctggcccctttttaagggccatgggttataaccgcgcgcaacccgcggacgctgtgctcggaccttcgggttggcaccctgccgaatagtttcaccgcggatgcgtatac

SEQ ID NO: 292108 - DNA, 558 bp, Homo sapiens
aatccattcaggaaagctggtaactgtcaccggagcctggctgggattggtgaagtcctgggcaagaagctggaggaaaggggttttgacaaggcctatgttgtccttggccagtttctggtgctaaagaaagatgaagacctcttccgggaatggctgaaagacacttgtggcgccaacgccaagcagtcccgggactgcttcggatgccttcgagagtggtgcgacgccttcttgtgatgctctctgggaagctctcaatccccagccctcatccagagtttgcagccgagtagggactcctcccctgtcctctacgaaggaaaagattgctattgtcgtactcacctccgacgtactccggggtcttttgggagttttctcccctaaccatttcaacttttttttggattctcgctcttgcatgcctcccccgtcctttttcccttgccagttccctggtgacagttaccagctttcctgaatggattcccggccgtattcgctcagcccgcacggtcatttggtagctgatgttgaacgttggtcgtgttatga

SEQ ID NO: 292109 - DNA, 1505 bp, Homo sapiens
  misc_feature (1215)..(1215): n is a, c, g, or t
  misc_feature (1219)..(1219): n is a, c, g, or t
ccagtgttcccagttcccaccagtccaactgcgaggagtgcgacgtgagtctgagtctgatccctccgaaaaccgtacttccggcgctgtctcggaggcctcccgtcccctcccttgtccgtcttctaactcttccccacgccaggtccgtcaagcctaagtccttgagttccgggtccgggcagcagagaaaggaagtcctctccctggaggcctatctccctcagaactgcgcgagaagcgagaccttagaaggcagcgcttcccgcgaaggaccggaaaggagcgcctactaaggacgccgtcgaggtccggggcgcctcaactctatagctctaactggctagaagtgcccaacgtggaatgtttcttttttaaaggcggctcttgaagcgacccggaagcggaagtggaagaaagttctagtggcttgaggtatccgcaggagcggccgggtggcgggaggaaccgttacgggaactgaagttgcggattaagcctgatcaagatgacaacctcccaaaagcaccgagacttcgtggcagagcccatgggggagaagccagtggggagcctggctgggattggtgaagtcctgggcaagaagctggaggaaaggggttttgacaaggcctatgttgtccttggccagtttctggtgctaaagaaagatgaagacctcttccgggaatggctgaaagacacttgtggcgccaacgccaagcagtcccgggactgcttcggatgccttcgagagtggtgcgacgccttcttgtgatgctctctgggaagctctcaatccccagccctcatccagagtttgcagccgagtagggactcctcccctgtcctctacgaaggaaaagattgctattgtcgtactcacctccgacgtactccggggtcttttgggagttttctcccctaaccatttcaacttttttttggattctcgctcttgcatgcctcccccgtcctttttcccttgccagttccctggtgacagttaccagctttcctgaatggattcccggccccatccctcacccccaccctcactttcaatccgtttgataccatttggctccttttttggcagaacagtcactgtccttgtaaagttttttagatcaataaagtcagtggctttcaaaaaaaaaaaaaaaaaaaaaaaaaaaccacaacaacaaaacaaaaaaaaaaaagggggggggnacanaaaggacacaccaggggggcacacggaagagaggacagcgactgggggggaggggggaaaaaaagaagagacaaaaaaaaaagaaaagaaaagaaacacagcgccccgaaggacaacaggaatacggacaagcgcaggaacaacaacagacgcgcgccaccaagcgaaaacacacaagagccaaaaagacagggacacaaaacagagagcgagccggccacacgagggaaaaaagagcagaagaaagaaagggagaagaaaacctaaagcgcagaaaccaacacac

SEQ ID NO: 292110 - DNA, 1083 bp, Homo sapiens
gcgggccctgggggagagcttggccgcgctgcggggagggggcggggtgcatgcgcgtgggagccgggccgcgggaaggggcgggccgcagcggcgcgcggtgggggcggagctggggcgcggacgtgaaccccgcgggcggggagcgggtgtgcgcagcgctaggtgtgcgcttcgccctgtaggtagagagaccctttggttagctttccacgccaagtggccgttccaggcaggcagtgtcgtcttggttcagccaaggtcacagagggagtgatagcttccgcgcagccctggctacggactctgggcatctttccactgccccgcttgcgccacctgttaggcaggatcgtttttcctctggggcaagatcaaaatccaggtcctgcaggaagaaactcctcttaaaaatagattaagcctgatcaagatgacaacctcccaaaagcaccgagacttcgtggcagagcccatgggggagaagccagtggggagcctggctgggattggtgaagtcctgggcaagaagctggaggaaaggggttttgacaaggcctatgttgtccttggccagtttctggtgctaaagaaagatgaagacctcttccgggaatggctgaaagacacttgtggcgccaacgccaagcagtcccgggactgcttcggatgccttcgagagtggtgcgacgccttcttgtgatgctctctgggaagctctcaatccccagccctcatccagagtttgcagccgagtagggactcctcccctgtcctctacgaaggaaaagattgctattgtcgtactcacctccgacgtactccggggtcttttgggagttttctcccctaaccatttcaacttttttttggattctcgctcttgcatgcctcccccgtcctttttcccttgccagttccctggtgacagttaccagctttcctgaatggattcccggccccatccctcacccccaccctcactttcaatccgtttgataccatttggctccttttttggcagaacagtcactgtccttgtaaagttttttagatcaataaagtcagtggctttcaaaaaaa

SEQ ID NO: 292111 - DNA, 1018 bp, Homo sapiens
ccagtgttcccagttcccaccagtccaactgcgaggagtgcgacgtgagtctgagtctgatccctccgaaaaccgtacttccggcgctgtctcggaggcctcccgtcccctcccttgtccgtcttctaactcttccccacgccaggtccgtcaagcctaagtccttgagttccgggtccgggcagcagagaaaggaagtcctctccctggaggcctatctccctcagaactgcgcgagaagcgagaccttagaaggcagcgcttcccgcgaaggaccggaaaggagcgcctactaaggacgccgtcgaggtccggggcgcctcaactctatagctctaactggctagaagtgcccaacgtggaatgtttcttttttaaaggcggctcttgaagcgacccggaagcggaagtggaagaaagttctagtggcttgaggtatccgcaggagcggccgggtggcgggaggaaccgttacgggaactgaagttgcggcctatgttgtccttggccagtttctggtgctaaagaaagatgaagacctcttccgggaatggctgaaagacacttgtggcgccaacgccaagcagtcccgggactgcttcggatgccttcgagagtggtgcgacgccttcttgtgatgctctctgggaagctctcaatccccagccctcatccagagtttgcagccgagtagggactcctcccctgtcctctacgaaggaaaagattgctattgtcgtactcacctccgacgtactccggggtcttttgggagttttctcccctaaccatttcaacttttttttggattctcgctcttgcatgcctcccccgtcctttttcccttgccagttccctggtgacagttaccagctttcctgaatggattcccggccccatccctcacccccaccctcactttcaatccgtttgataccatttggctccttttttggcagaacagtcactgtccttgtaaagttttttagatcaataaagtcagtggctttcaaaaaaa

SEQ ID NO: 292112 - DNA, 695 bp, Homo sapiens
gcatatctagaagaggctgcagatcctgggcacctgtggagaggagaggggggcaaaacccgcgctgcttcctgggcttgtgtgctctgaatggcacaggaatggctgtcttgctcttatctctcactgagcactgagcagcacgctccctccttttccctgttttgcgcctatgttgtccttggccagtttctggtgctaaagaaagatgaagacctcttccgggaatggctgaaagacacttgtggcgccaacgccaagcagtcccgggactgcttcggatgccttcgagagtggtgcgacgccttcttgtgatgctctctgggaagctctcaatccccagccctcatccagagtttgcagccgagtagggactcctcccctgtcctctacgaaggaaaagattgctattgtcgtactcacctccgacgtactccggggtcttttgggagttttctcccctaaccatttcaacttttttttggattctcgctcttgcatgcctcccccgtcctttttcccttgccagttccctggtgacagttaccagctttcctgaatggattcccggccccatccctcacccccaccctcactttcaatccgtttgataccatttggctccttttttggcagaacagtcactgtccttgtaaagttttttagatcaataaagtcagtggctttcaaaaaaa

SEQ ID NO: 292113 - DNA, 563 bp, Homo sapiens
aaaactgaggaagaaaactgacaaggttttcaagggaatttccaggctgagaatctacgatggccagtgagctggtatgattcatacgaagttccatgtctcacttatctctccaaatcatggttcttcacgagggagcccttcttcaggctgttcttccgctccacgtagttggacggtacatagcccgtcctgttggccgcgttcctcacccgccaccacgtcttggagtcgtccagcaaccacagccgctcgttcttcttgatgtccagctcctggtcctgctgggcggtgtagtcccacttggctatcacaataacttcttctgtcatctttcatggagtccttctgccagcaaaacatttggagatgctcattagagaactacccggacacttcatcctttgcaccaacttgaaaaattaggcactgacagcttttattacaactctgcaaccagttttctcctgggtcttgaaatgctcaactttaaaatgaccttctttcaacaagctttagtatttggtttagaaacagcaaccttataaaacaaatcttatgtt

SEQ ID NO: 292114 - DNA, 440 bp, Homo sapiens
agataccttaattttctctacccagtgtttattcaaccaattctgactcaagtttcagagccaaggtttatatgtgtacctgtgaatgcacaggcacgtgtgcatatgaaagagagaaaaagagatggattctatttatgcgaacatacagcaagaatggggcctctataaacggtggcttccacttgctggcacaagttgtcagggaaagcagagcctttggaaggtatcctcagcagtgtgcctcctactggttttaaaaataatctcacacattccggattttgacaacctttcgctttttaccttcaactgtacttcagataccaccttttctgttgtgagtagaaacttctaggtagggagttccgacgcatcaacacctgcagatgtgaaaacaacctaacaatttttactcacagagaagcatccaaagaaag

SEQ ID NO: 292115 - DNA, 507 bp, Homo sapiens
gatctcggtccaaagaggctccacttatctgacaagtttctgtccttatccccacttccagagtccatggtgctaggatttgggccaggcctgccacgccactgcttaacccaagctgcacaccaaacaatgatcacgtttgaattttctcaaacgctcaacagatccattcatgtgttactgatgctgccggtcccaagaccacaccttgaggaccactgctcccaaggttcaagtaatggtcttttgaaacaaacaaaaaaaatctacttagctcctcattttcaacctgcaagagctggcagcctccaccttctgcaatcgaaacacctgataccttgctcaggcctagcagggaggagagaacaagacttattctttattctgtgcttgtctggaagaactgagaagaaagtaagatggttgaaaaggggggacagataaaaagtaatgaaaaatgttgtatccttactacaaaacagaatttatacctttaagctgtgaaaa

SEQ ID NO: 292116 - DNA, 545 bp, Homo sapiens
  misc_feature (13)..(13): n is a, c, g, or t
  misc_feature (67)..(67): n is a, c, g, or t
  misc_feature (401)..(401): n is a, c, g, or t
  misc_feature (545)..(545): n is a, c, g, or t
cctgtattcaccnagacaccctgcccctctactgtctgcttcagaagatgcactcttagcgcttgtngcagtcgcgtcactgcctgccgtgtcatgcgcagggacgtacatctggcctcggtgaacacctgaaatgtcctgggtacactcatgtttattcacatatgggggctaaagccaagggctcaaagcttttatcagcctcccaaagggaaacagctgtagaaaactgtgagatccctgctccttcgagtctgagccttcatcatactcacctgacatactcagaggggttctctctgctccaccagagctgttccatagaccaccttgtctaaggccaagtggactggattagatgatctccctggagcaccaagttttcaggacttccgtggagnaccaagtccccagaaccccactatgggggctcagccctgctacctgccccgagtcacttgtgggactgacactgacaaagtctggtgattacactgcacagagccatcaccactccaatggtcacacccattcttctccccctn

SEQ ID NO: 292117 - DNA, 367 bp, Homo sapiens
cataaattccagcagatggggaatgtggtccaagacttctcaagaggtgagaaattctttggcatatgtttgggaattcgtgaaatcaatcttttgaaagaatgggggcattccttcaaaagatgcagtaccatctgtaacttaccaggcagagtttctaccaaaatttccacaacctttaaaatcagagtggaatggccaggtgtggtgcctcacacatgtaatcccagcactttgggaggccgaggtgggtggaccacaaggtcaagagatcgagaccatcctggccaacatggtgaaaacccatctctactaaaaatacaaaaattagctgagcgtgttggcaggtgcctgtattcccagctac

SEQ ID NO: 292118 - DNA, 1469 bp, Homo sapiens
tggaaaagtattggagttaatctgtattatatttatatagtccatatggcacatttgattcttccacatatattttgtgttaatgtttaggtatgatttttttctaaattctagaaaagaacataatttcagttatcagaagccattccatcattatagaccctttttcattatttcatttgctctcatatatcagtattatttttgagcattttgttacatgtcattcacaacttacctaagtgtgctgtgttctggtagcccgtatttgaggtaagctgctgaaaacaaaagtctctatattctttgcctattccaaagagctaaaaaagtctaacccaggaaagcttttgatattttgtgtttgttttcttgttcttatggttgttgttgctgtattatgattgctgttttacataaaatctatgggaactgtgaatacagacaagagagccacagtagagaggcttgtttaatgcagtaccattggagagttaacagaataatctagtagaaaaataactggttgcatgtaaaattccttccagccagaaagaaagaaagacaaggagtaagggggatttagagttatgtctcagctacacattacattgtgatactgcagctcaaattcagaatggcaatgatacatgatatcatggcctagatccttgagagggacctggctttcctttttaaaagatattttactgaagagctaaaaactggccagtgtggggttagcagatcgaataacttgaaatagaccgtgcagtattcctagcactcaatgtaatcaccctatttgtgacagagaaagggaaaaaaatataataagatcatctacctataatttgaataattttgagctatcaaaatgtctttgtaattttcacaaccgctgtccattgtttgaggatgttacctactaaactgaaaacattcattccatatctacttacacatacaccagcaacagtataaatgtaagcctaactttgcaaaattcgtaataatttagtgatggaattttttaataacatgcagtatataaatgtgcagattttatgcgtgttgacaaaatcatttttcagcttgcaaaatgggactgcaatattacatttttcacttaagcagttttttacatctacgttgttgctttctaaaatgaatgtgaatgccatcttttatgactgcaacttgccttttccattacagaaatttttgtttgatgtaatcaataaactttggtatgataaaaaaaaagagggggggataaaaaaccggagggccagataggtaccggctttggaaaaaggcccaaggaaggataaaaaaggaaggggggataagagggcggaaagtgtgatgtgggaactcggggggagggagaacaaagggaaaaaaggtatgcattaggggagtggtatagaagaaagaagaagagtgggagggtaaagagaatgaca

SEQ ID NO: 292119 - DNA, 1258 bp, Homo sapiens
tggaaaagtattggagttaatctgtattatatttatatagtccatatggcacatttgattcttccacatatattttgtgttaatgtttaggtatgatttttttctaaattctagaaaagaacataatttcagttatcagaagccattccatcattatagaccctttttcattatttcatttgctctcatatatcagtattatttttgagcattttgttacatgtcattcacaacttacctaagtgtgctgtgttctggtagcccgtatttgaggtaagctgctgaaaacaaaagtctctatattctttgcctattccaaagagctaaaaaagtctaacccaggaaagcttttgatattttgtgtttgttttcttgttcttatggttgttgttgctgtattatgattgctgttttacataaaatctatgggaactgtgaatacagacaagagagccacagtagagaggcttgtttaatgcagtaccattggagagttaacagaataatctagtagaaaaataactggttgcatgtaaaattccttccagccagaaagaaagaaagacaaggagtaagggggatttagagttatgtctcagctacacattacattgtgatactgcagctcaaattcagaatggcaatgatacatgatatcatggcctagatccttgagagggacctggctttcctttttaaaagatattttactgaagagctaaaaactggccagtgtggggttagcagatcgaataacttgaaatagaccgtgcagtattcctagcactcaatgtaatcaccctatttgtgacagagaaagggaaaaaaatataataagatcatctacctataatttgaataattttgagctatcaaaatgtctttgtaattttcacaaccgctgtccattgtttgaggatgttacctactaaactgaaaacattcattccatatctacttacacatacaccagcaacagtataaatgtaagcctaactttgcaaaattcgtaataatttagtgatggaattttttaataacatgcagtatataaatgtgcagattttatgcgtgttgacaaaatcatttttcagcttgcaaaatgggactgcaatattacatttttcacttaagcagttttttacatctacgttgttgctttctaaaatgaatgtgaatgccatcttttatgactgcaacttgccttttccattacagaaatttttgtttgatgtaatcaataaactttggtatgata

SEQ ID NO: 292120 - DNA, 504 bp, Homo sapiens
tgagggtaatgaatttatgaagtactcgaattaacatttatacccgccttgtctatagtatgaaaacctctggactcacgtgattgccatcatgtgccacgttgatgaaattgagctcttagataatcagagtcaatgttgattaatatttttatattttatcacattgtaatttgttaacattgctgaagagtgttatacgtgatcagtaacttgcatgattaataagcattgatgtttatacatattcgtttgttttctaggtattccaactttattatatggacttggctcctggttatttgccagagtcacagagactgtgcataccagttatggacccataacagtttattttctcaataaagaagatgaaggtgccatgtattgaaagtgtgcgtcaaagaacataaatatcagtggattttctctgtgtatatgtgcagtatttatttttgatcctttaaaataaaacttttgcaaatacttttttctttctacagt

SEQ ID NO: 292121 - DNA, 1147 bp, Homo sapiens
cccagcgcctcggaggtgctgacgcggcatctgctgcagcggcgcctgccgcctggacctccttctgcgtgccctacagcgccgtccgcaacgaccagttcggcctctcgcacttcaactggccggtgcagggcgccaactaccacgtcctgcgcaccggctgcttccccttcatcaagtaccactgctccaaggctccctggcaggacctggcccggcagaaccgcttcttcacggcgctcaaggtcgtcaacctcggtgagtggcgactgccgcgcccacgcggtgaagcccgcccggccgggacggcccctcagccaccgagcacgtgacgaacgctcgcaggccggtagagtcccgcgggagtcagctctgcctcccggcgccggcttcgcctggggtcctttgtactcctcgcccagggggtccccagcttgctgagctcctggcacccgaagccgttcgcctgctgcgggcgcgtcctcgggcctagggaggggcgggtcgccctcctgtcctgcccatgttaaccagagtagacccctggcctgggcagtaagccagggggcgtcaggaaacgccccctagaaagtggctctgaagttgacatccgtcctactgcatggcaggactcattcccgtgaacatcactttgcagctgcgtttatgttgcaataactggaactactcttttaagtttcttttgttttctttgtatgaattcccggcaagttcgttttactaaaagcaccaaaggttttcaccagacataacagcttcctgaggtgctaggcctaaaagatttttaaagatctttaatatttgtatattttcatggagacgccctgaggatgtttactgtcactaggtgtttattttcttttggtttaatgacagaagagggaggtattccaactttattatatggacttggctcctggttatttgccagagtcacagagactgtgcataccagttatggacccataacagtttattttctcaataaagaagatgaaggtgccatgtattgaaagtgtgcgtcaaagaacataaatatcagtggattttctctgtgtatatgtgcagtatttatttttgatcctttaaaataaaacttttgcaaatacttttttctttctacagt

SEQ ID NO: 292122 - DNA, 1109 bp, Homo sapiens
cccagcgcctcggaggtgctgacgcggcatctgctgcagcggcgcctgccgcctggacctccttctgcgtgccctacagcgccgtccgcaacgaccagttcggcctctcgcacttcaactggccggtgcagggcgccaactaccacgtcctgcgcaccggctgcttccccttcatcaagtaccactgctccaaggctccctggcaggacctggcccggcagaaccgcttcttcacggcgctcaaggtcgtcaacctcggtgagtggcgactgccgcgcccacgcggtgaagcccgcccggccgggacggcccctcagccaccgagcacgtgacgaacgctcgcaggccggtagagtcccgcgggagtcagctctgcctcccggcgccggcttcgcctggggtcctttgtactcctcgcccagggggtccccagcttgctgagctcctggcacccgaagccgttcgcctgctgcgggcgcgtcctcgggcctagggaggggcgggtcgccctcctgtcctgcccatgttaaccagagtagacccctggcctgggcagtaagccagggggcgtcaggaaacgccccctagaaagtggctctgaagttgacatccgtcctactgcatggcaggactcattcccgtgaacatcactttgcagctgcgtttatgttgcaataactggaactactcttttaagtttcttttgttttctttgtatgaattcccggcaagttcgttttactaaaagcaccaaaggttttcaccagacataacagcttcctgaggtgctaggcctaaaagatttttaaagatctttaatatttgtatattttcatggagacgccctgaggatgtttactgtcactaggtattccaactttattatatggacttggctcctggttatttgccagagtcacagagactgtgcataccagttatggacccataacagtttattttctcaataaagaagatgaaggtgccatgtattgaaagtgtgcgtcaaagaacataaatatcagtggattttctctgtgtatatgtgcagtatttatttttgatcctttaaaataaaacttttgcaaatacttttttctttctacagt

SEQ ID NO: 292123 - DNA, 499 bp, Homo sapiens
cccagcgcctcggaggtgctgacgcggcatctgctgcagcggcgcctgccgcctggacctccttctgcgtgccctacagcgccgtccgcaacgaccagttcggcctctcgcacttcaactggccggtgcagggcgccaactaccacgtcctgcgcaccggctgcttccccttcatcaagtaccactgctccaaggctccctggcaggacctggcccggcagaaccgcttcttcacggcgctcaaggtcgtcaacctcggtattccaactttattatatggacttggctcctggttatttgccagagtcacagagactgtgcataccagttatggacccataacagtttattttctcaataaagaagatgaaggtgccatgtattgaaagtgtgcgtcaaagaacataaatatcagtggattttctctgtgtatatgtgcagtatttatttttgatcctttaaaataaaacttttgcaaatacttttttctttctacagt

SEQ ID NO: 292124 - DNA, 1026 bp, Homo sapiens
cccagcgcctcggaggtgctgacgcggcatctgctgcagcggcgcctgccgcctggacctccttctgcgtgccctacagcgccgtccgcaacgaccagttcggcctctcgcacttcaactggccggtgcagggcgccaactaccacgtcctgcgcaccggctgcttccccttcatcaagtaccactgctccaaggctccctggcaggacctggcccggcagaaccgcttcttcacggcgctcaaggtcgtcaacctcggtgagtggcgactgccgcgcccacgcggtgaagcccgcccggccgggacggcccctcagccaccgagcacgtgacgaacgctcgcaggccggtagagtcccgcgggagtcagctctgcctcccggcgccggcttcgcctggggtcctttgtactcctcgcccagggggtccccagcttgctgagctcctggcacccgaagccgttcgcctgctgcgggcgcgtcctcgggcctagggaggggcgggtcgccctcctgtcctgcccatgttaaccagagtagacccctggcctgggcagtaagccagggggcgtcaggaaacgccccctagaaagtggctctgaagttgacatccgtcctactgcatggcaggactcattcccgtgaacatcactttgcagctgcgtttatgttgcaataactggaactactcttttaagtttcttttgttttctttgtatgaattcccggcaagttcgttttactaaaagcaccaaaggttttcaccagacataacagcttcctgaggtattccaactttattatatggacttggctcctggttatttgccagagtcacagagactgtgcataccagttatggacccataacagtttattttctcaataaagaagatgaaggtgccatgtattgaaagtgtgcgtcaaagaacataaatatcagtggattttctctgtgtatatgtgcagtatttatttttgatcctttaaaataaaacttttgcaaatacttttttctttctacagt

SEQ ID NO: 292125 - DNA, 832 bp, Homo sapiens
ttactcctcctagaagcaatggaaccttgcctgttccctgggggtgagacggatgactgcccctacattagctacctaacatttttgcttctccggacagaagagtaagggcaaggggacaagacccatctccccaaagcagctgatccccacttgcacaccaaactaccaatgaagctagccatttctggtctcccatcctgacttttctgagcacatggtgaagatctgtggaaaacattttgatgaagagagagtccttggaaggtgtcatcaggtattgaccaaacaagccactgtcctggatttgcctgtttttccggttccaaggccattcttctgccttgagtggttccttgagactctttatcatcttgaccttcccagaagagagctccacaaagagcacatcagtttgtgtgcttgaactaccgtagatgttatattggtgggcttcagtaaaggatggttgaaatgccagatcagatatgtgcagatttgtgtaaatatcaaaagcctcctgtatttctcctctgatggtaatgtactgaacccttacaagacctttcacatcattaatgctgacaaggtagtggccatctggagagacatatggagtgcccgtcacatcactattgaacccaatgactgagtcagttacaccgtccaccatgacctgtggggaaactgctccggtgctgtcaggtttgcagccaatgaagtagtagcctcccaagtgtgtatatgccaatgactgaggaacgcacttatagtccttcaagttaattgtcttgatgtatgacatggtttcaagatcaattttttgtagtgc

SEQ ID NO: 292126 - DNA, 530 bp, Homo sapiens
attgttgtctttgaacatagcaatgaagagttatttttatttgggaaaaagtgtagaaataagaaaatagcatagtaaggctgctcttgactttcgtacagcttcagccttttcatgaaacataactcagatgatcttcttctgaattagtgaaccctgatgttagttatataaccaggggaccacggtgtcagccttgttattttaagggtcttttccagtctgcaagacccaaccaatttccttcacctttcacatgtggacttctcattgttactaaactaaccatcccttcctgctcatctctacacatactttaggacttattgatttcatggacgttcatttgtctcacaaacttggtgatatagaaactgcattttctgctttggtgcaccccttagagagcctagtgtggttcagacaaacctgatgagatgcacaacttggaggtctcgattttctcatctgtaaaactgggcaagttgttataaggattgtgatactatacaggaaagtgctaaataccg

SEQ ID NO: 292127 - DNA, 431 bp, Homo sapiens
taattaccagagagtagggccagggaagaagcttctctaactcaagaaccctctcttctgctgctcaccaggtctgaatagcccttgtgaaggcagcatttgagagaacttctctgccacatgctgattcctctcaccgcgggaagaaaccaacctaccctggggagcctgagagctctttgagtatctgggggtgaatcaactaatctgattaattgttttcagaggtgaggagctgggtactgaggaagggaaaattttgatgagaaagaatctgggcctttagcatgtgaaacatgaggctcagaatttaatgacttgttcaaagggagatttttaatagacatgctttaaccagctattttggacatcttatacaggtgagaagagaagggggatagcagttggccaagctataaggacacttaaaa

SEQ ID NO: 292128 - DNA, 425 bp, Homo sapiens
taattaccagagagtagggccagggaagaagcttctctaactcaagaaccctctcttctgctgctcaccaggtctgaatagcccttgtgaaggcagcatttgagagaacttctctgccacatgctgattcctctcaccgcgggaagaaaccaacctaccctggggagcctgagagctctttgagtatctgggggtgaatcaactaatctgattaattgttttcagagttaaaaaggcttagtcctggaaaagtcgaagaggtgaaaacctgcctggggaggctgctgaaggacgccaggaagaattcttatctccaaattcaatcctgcctcccagctagctgctggtgtttgaaattccaactctgaagtggtagtctggtatcttcttttaaaatgtggaagagagtaaacaaagttattcac

SEQ ID NO: 292129 - DNA, 990 bp, Homo sapiens
acagtcagcagctgacagaataatccacacattggtttccttacctatggagtgagggctattatggtggaaaaggccaagtagaagccactagaactatctgtacttaggaaaatagtaaaccaaaagcaatgctcaattcctatagggactgaagagattagtgccaccataagtacttgaaggaaggcggggtggtgattcctaccatatgtccattcaactcgcctatttagcctgggcagaagacagatggattatcacaaacttaactaggtggtgactccaattgcagctacagtaccagatgtattgcttgagcaaattaacacaactcctggttcctggtatgcagctacctggaatcttgattgccttttctttccacatcacattggtccattacattgacgacattatgctcactggacctaatgagtgagacatagcaactactccagacctattggtaagacatttgcatgtcagaagtgggaagtaaatccaacaaaaattcaaaggctttttcatgtctcagtaaaatttctaggggtccagtggtatgaggcatgttgagataccccttctaaggaactgacttcacctgcaacagagcttggagaagctgaagcctaagggtgctctaaagcaggggtccccaacctccgggctacagaccaatacccatccaaggcctgttaggaacccggctgcagagcaggagcttttctgcatggaagaattaaattgagaaaaacatagttatttaaaaaatcacatcgtaactgagttaacaaggcactgaggttctaatcatagattaccttccttcttcatcttccagctgttttctaaagtcttcctcctgttgcttgagttggttctgcaaatcagttattttttgaagaaaagaaactgtgatttctttaatttctgtttcctttagtgctgacttggtctgcagatctagaagcatcctttggtttgaga

SEQ ID NO: 292130 - DNA, 868 bp, Homo sapiens
acagtcagcagctgacagaataatccacacattggtttccttacctatggagtgagggctattatggtggaaaaggccaagtagaagccactagaactatctgtacttaggaaaatagtaaaccaaaagcaatgctcaattcctatagggactgaagagattagtgccaccataagtacttgaaggaaggcggggtggtgattcctaccatatgtccattcaactcgcctatttagcctgggcagaagacagatggattatcacaaacttaactaggtggtgactccaattgcagctacagtaccagatgtattgcttgagcaaattaacacaactcctggttcctggtatgcagctacctggaatcttgattgccttttctttccacatcacattggtccattacattgacgacattatgctcactggacctaatgagtgagacatagcaactactccagacctattggaactgacttcacctgcaacagagcttggagaagctgaagcctaagggtgctctaaagcaggggtccccaacctccgggctacagaccaatacccatccaaggcctgttaggaacccggctgcagagcaggagcttttctgcatggaagaattaaattgagaaaaacatagttatttaaaaaatcacatcgtaactgagttaacaaggcactgaggttctaatcatagattaccttccttcttcatcttccagctgttttctaaagtcttcctcctgttgcttgagttggttctgcaaatcagttattttttgaagaaaagaaactgtgatttctttaatttctgtttcctttagtgctgacttggtctgcagatctagaagcatcctttggtttgaga

SEQ ID NO: 292131 - DNA, 1160 bp, Homo sapiens
ggcgtagaaccgtccctgtggttggcacagcatggccggacgatcgatatgaccagtggatcaatactatgctaatcaccttgtaagaagtacgtgccccgtgaatctatatgacgtggctcatgtctctagccatgataacgacaattgtactgcgtgacggaatgaacgaagatgatccggagagactattgcacggacatgaatgtatcactgacgtgtattgattacacatgcaattcataattatgcagtgcttgtgcgaagatgatggcatacgaatattgatgatttactatcgaccctggatgaagaaacatatgaagagatatataaatcaacgaaacggaatattccaatgctctttgtccggggagatggcgttgtcctggttgcccctccactgagagttggctgaaacaaagaatttgtcctgtatggaaaacgggagactttgtacagtggcctctctaaaagtacaaaacattcataagagaaacctgcatacattttgatattaagaaataattccggggattcttccactcctgaaatgagttgatttgcagataactcacaacttcttaagctaaatggtattttcatttttctcaagctctccaataaatatgaccaccaagatgcagaactctttcaggacttcttttgctccattattctcacagatacttactgatttttcttttctttaaattggtgtttccttgtagatttttttaagtgcggtcttctgtcttgtgaattatttaaagtaagcatgtcttaccttcacttagcacacatttgcagtgcacctactgtgtttgaggcaccaggtttgagtgctgggaaccagagttttatcaaaatgctttctgggccagacatggtggctcatgcctgtaatcccagcactttgggaggccaaggtgggtggatcacctgaggtcaggcgtttgagaccagcctggccaacatggtgaaaccctttctctactgaaaatataaaaattagccaggcgtggtggcgcatacttgtaatcccagctactcaggaggctgaggcagtagacgcttgaacccaggaggcagaggttgcagtgagccaagatcacaccattgcacttcaacctggtcaacagagcgagactccgtgtcaa

SEQ ID NO: 292132 - DNA, 673 bp, Homo sapiens
ggcgtagaaccgtccctgtggttggcacagcatggccggacgatcgatatgaccagtggatcaatactatgctaatcaccttgtaagaagtacgtgccccgtgaatctatatgacgtggctcatgtctctagccatgataacgacaattgtactgcgtgacggaatgaacgaagatgatccggagagactattgcacggacatgaatgtatcactgacgtgtattgattacacatgcaattcataattatgcagtgcttgtgcgaagatgatggcatacgaatattgatgatttactatcgaccctggatgaagaaacatatgaagagatatataaatcaacgaaacggaatattccaatgctctttgtccggggagatggcgttgtcctggttgcccctccactgagagttggctgaaacaaagaatttgtcctgtatggaaaacgggagactttgtacagtggcctctctaaaagtacaaaacattcataagagaaacctgcatacattttgatattaagaaataattccggggattcttccactcctgaaatgagttgatttgcagataactcacaacttcttaagctaaatggtattttcatttttctcaagctctccaataaatatgaccattcagttcaaattcaagggggatcctcatagagtcag

SEQ ID NO: 292133 - DNA, 1304 bp, Homo sapiens
ggcgtagaaccgtccctgtggttggcacagcatggccggacgatcgatatgaccagtggatcaatactatgctaatcaccttgtaagaagtacgtgccccgtgaatctatatgacgtggctcatgtctctagccatgataacgacaattgtactgcgtgacggaatgaacgaagatgatccggagagactattgcacggacatgaatgtatcactgacgtgtattgattacacatgcaattcataattatgcagtgcttgtgcgaagatgatggcatacgaatattgatgatttactatcgaccctggatgaagaaacatatgaagagatatataaatcaacgaaacggaatattccaatgctctttgtccggggagatggcgttgtcctggttgcccctccactgagagttggctgaaacaaagaatttgtcctgtatggaaaacgggagactttgtacagtggcctctctaaaagtacaaaacattcataagagaaacctgcatacattggcctctctaaaagtacaaaacattcataagagaaagcctgcatacattttgagaggccactgtacaaagtctcccgttcttcagagagagagagagagagagagagagagagagagagagagagagacagagaggacgtgaaaagcacgacattgagcgacatggaccgagcaggcaggaccaaacaccgctgagctcgtcgctgaggcaggagcctgacccaaggaagaagctgaccacgaagacgtgctctaaccagcagaccgcacaagtgcgaggcaatgaggcccatcccgtctctgatcagcagccaggtctccaggatagctgcattatgcctacagcgcacattacatcagatccggtggacgcaacaagaggagctggttgtacagccgggatcccctgacgagaggacgtcctggaaaagactctcctcctctctacatcacaatcttaaccaaacaccttggacccagctcaatgcgcttatacagcacctacctgctactagtcaccagaagaaccactgtgatgaccgcggcagaaccaggaacgctacgaacccataaccaaagacaagacgaacagaaagcacacaaaccaggaaagccaagcgacgactgagctgagaaaaagggacacacaagaaccacaaagacacgaaacccagagactacccaacaaaatcaagacgacagcccccacaacaagtcaaacaacaaccaccacaaccgacacagacaaaaagcaaaatgggcaaaagacctacataaaacaaaacaaacacaa

SEQ ID NO: 292134 - DNA, 477 bp, Homo sapiens
tcattccagtcatcctagccgtcgtagagcagagaattgcccttctgactccttgacagtggcccaaaaaatggttgttgttttatgctactaagttttgaggtggtttgttatgtagcgttcaataactagaactaggagttagaatgcttctcttgaggagctgaatggcttcagggtggtggttctcaacagggtgattttgtcccccaggggacatttggcaatgtttacagacattttggttatcacaactctgggaggggggttactactggcatttagtaggcagaagtcactggtgctgctaaacattctacaatgcatgagacagcctctgacaacaaggaattctttggcccaacatgtcactagtaccaaggttaagaaacctagctctagagaaaaggtgctcattggaggcttgttaactaaaagactgtcttgcttcctgtagtgaaaccccagttgataaat

SEQ ID NO: 292135 - DNA, 1786 bp, Homo sapiens
cctgatacgccccggattaacgggatgggcctggcggatgggattattaaagcttcgccggagccgcggctcgccctcccactccgccagcctccgggagaggagccgcacccggccggcccggccccagccccatggacctccgagcaggggactcgtgggggatgttagcgtgcctgtgcacggtgctctggcacctccctgcagtgccagctctcaatcgcacaggggacccagggcctggcccctccatccagaaaacctatgacctcacccgctacctggagcaccaactccgcagcttggctgggacctatctgaactacctgggcccccctttcaacgagccagacttcaaccctccccgcctgggggcagagactctgcccagggccactgttgacttggaggtgtggcgaagcctcaatgacaaactgcggctgacccagaactacgaggcctacagccaccttctgtgttacttgcgtggcctcaaccgtcaggctgccactgctgagctgcgccgcagcctggcccacttctgcaccagcctccagggcctgctgggcagcattgcgggcgtcatggcagctctgggctacccactgccccagccgctgcctgggactgaacccacttggactcctggccctgcccacagtgacttcctccagaagatggacgacttctggctgctgaaggagctgcagacctggctgtggcgctcggccaaggacttcaaccggctcaagaagaagatgcagcctccagcagctgcagtcaccctgcacctgggggctcatggcttctgacttctgaccttctcctcttcgctcccccttcaaaccctgctcccactttgtgagagccagccctgtatgccaacacctgttgagccaggagacagaagctgtgagcctctggccctttcctggaccggctgggcgtgtgatgcgatcagccctgtctcctccccacctcccaaaggtctaccgagctggggaggaggtacagtaggccctgtcctgtcctgtttctacaggaagtcatgctcgagggagtgtgaagtggttcaggttggtgcagaggcgctcatggcctcctgcttcttgcctaccacttggccagtgcccacccagcccctcaggtggcacatctggagggcaggggttgaggggccaccaccacacatgcctttctggggtgaagccctttggctgccccactctccttggatgggtgttgctcccttatccccaaatcactctatacatccaattcaggaaacaaacatggtggcaattctacacaaaaagagatgagattaacagtgcagggttggggtctgcattggaggtgccctataaaccagaagagaaaatactgaaagcacaggggcagggacagaccagaccagacccaggagtctccaaagcacagagtggcaaacaaaacccgagctgagcatcaggaccttgcctcgaattgtcttccagtattacggtgcctcttctctgccccctttcccagggtatctgtgggttgccaggctggggagggcaaccatagccacaccacaggatttcctgaaagtttacaatgcagtagcattttggggtgtagggtggcagctccccaaggccctgccccccagccccacccactcatgactctaagtgtgttgtattaatatttatttatttggagatgttatttattagatgatatttattgcagaatttctattcttgtattaacaaataaaatgcttgccccagaaaaaaaa

SEQ ID NO: 292136 - DNA, 1619 bp, Homo sapiens
cctgatacgccccggattaacgggatgggcctggcggatgggattattaaagcttcgccggagccgcggctcgccctcccactccgccagcctccgggagaggagccgcacccggccggcccggccccagccccatggacctccgagcagctgaactacctgggcccccctttcaacgagccagacttcaaccctccccgcctgggggcagagactctgcccagggccactgttgacttggaggtgtggcgaagcctcaatgacaaactgcggctgacccagaactacgaggcctacagccaccttctgtgttacttgcgtggcctcaaccgtcaggctgccactgctgagctgcgccgcagcctggcccacttctgcaccagcctccagggcctgctgggcagcattgcgggcgtcatggcagctctgggctacccactgccccagccgctgcctgggactgaacccacttggactcctggccctgcccacagtgacttcctccagaagatggacgacttctggctgctgaaggagctgcagacctggctgtggcgctcggccaaggacttcaaccggctcaagaagaagatgcagcctccagcagctgcagtcaccctgcacctgggggctcatggcttctgacttctgaccttctcctcttcgctcccccttcaaaccctgctcccactttgtgagagccagccctgtatgccaacacctgttgagccaggagacagaagctgtgagcctctggccctttcctggaccggctgggcgtgtgatgcgatcagccctgtctcctccccacctcccaaaggtctaccgagctggggaggaggtacagtaggccctgtcctgtcctgtttctacaggaagtcatgctcgagggagtgtgaagtggttcaggttggtgcagaggcgctcatggcctcctgcttcttgcctaccacttggccagtgcccacccagcccctcaggtggcacatctggagggcaggggttgaggggccaccaccacacatgcctttctggggtgaagccctttggctgccccactctccttggatgggtgttgctcccttatccccaaatcactctatacatccaattcaggaaacaaacatggtggcaattctacacaaaaagagatgagattaacagtgcagggttggggtctgcattggaggtgccctataaaccagaagagaaaatactgaaagcacaggggcagggacagaccagaccagacccaggagtctccaaagcacagagtggcaaacaaaacccgagctgagcatcaggaccttgcctcgaattgtcttccagtattacggtgcctcttctctgccccctttcccagggtatctgtgggttgccaggctggggagggcaaccatagccacaccacaggatttcctgaaagtttacaatgcagtagcattttggggtgtagggtggcagctccccaaggccctgccccccagccccacccactcatgactctaagtgtgttgtattaatatttatttatttggagatgttatttattagatgatatttattgcagaatttctattcttgtattaacaaataaaatgcttgccccagaaaaaaaa

SEQ ID NO: 292137 - DNA, 887 bp, Homo sapiens
gccccgtccaatcacgagaaagctccagggctttgtgacaagatgcagtcccaacatcctgtttcagtctaaccataacttgggtgttccgctccaaacacgacctctgtgtctgaacactcagcccactagcatttgtgattctgagtcctcagccgtggagaatcaggaggaaaacaggagttgtcactggtagagaaggaagcagcccaagggacaaaggtcacgatacggttacgcaaatggtgctggcccacaccctcctggagagaggcctggaagatgggggggtcattcagagaccccagttgttggggggacctgctttccaggagaagaaaggagcttcagaaccttcaatacctgctcctgtgccccaccaggctgtggcctctttcataaggaaagagcaataagtcttcaggagagaattaacatccaatggattcccagaaaacttttccctcgatgtaccagcaaacacctacaatgccctgaaaagccgcctctgcgaccccaatgcagatcacacgtcctgtcccagcccctgcagcctccacgcggcgggtgcactgccaggcacgggaaggcagcgctggcgagtagaactggcccatctcgcagataggaagctgagcctcagggacgtttcacgccttcgtcaaggtggtgagaggaggagcgggattgccgtgaaggtggtgagaggaggagcggggtttgctgcccgacttcagggatctgtcaccctcgtccagcagggttggttcttcccgaggctgggaggatgccaagcctggtggaggatgggggcggtggtgtggtgtggggagcttctgacttgcacatcctgagggaaccttctgcagctgatgtgtgaactggac

SEQ ID NO: 292138 - DNA, 541 bp, Homo sapiens
ttgctgctgtaatgtaagaaacgccttttgcctcctgccataattctgaggcctcacagccatgtggaacttcttcaggagagaattaacatccaatggattcccagaaaacttttccctcgatgtaccagcaaacacctacaatgccctgaaaagccgcctctgcgaccccaatgcagatcacacgtcctgtcccagcccctgcagcctccacgcggcgggtgcactgccaggcacgggaaggcagcgctggcgagtagaactggcccatctcgcagataggaagctgagcctcagggacgtttcacgccttcgtcaaggtggtgagaggaggagcgggattgccgtgaaggtggtgagaggaggagcggggtttgctgcccgacttcagggatctgtcaccctcgtccagcagggttggttcttcccgaggctgggaggatgccaagcctggtggaggatgggggcggtggtgtggtgtggggagcttctgacttgcacatcctgagggaaccttctgcagctgatgtgtgaactggac

SEQ ID NO: 292139 - DNA, 387 bp, Homo sapiens
aataaaaggccttcatgttctggcctttgcttctctactggcctcgtccctaaccctcccttctttgtcagtgtgcagttacactgaggaatttgtgggatgcgtcatgatctctgtaacttctagtctgttgatatcctgcttctcttcctggagtcctcctccttaagtctccctttcccattctttacctgctaatttttctggactcaacaaagccttcctggacctttttagtcaggtttgtgctactggaaccccttgtacatccttttttttttttttttcccgtgagacagagtctcattctgtcgccaggttggagtgcagtggtgcagtctcggctcactgcagcctccacctcccaggttcaagcaattcttctgc

SEQ ID NO: 292140 - DNA, 965 bp, Homo sapiens
aaggtcgcaccaccgcactccagcctgggtgacagaaagagacccagtatcaaataaaaaatcaaatttcacttaaaaaagaaaaagaaaaaattcttcctagggctgagctgacatctccctcccaatggcttcctacctctagctctcacagaaaagcaatactcaggccccagttgtgtctgacgtgttgcagtttgaagaatattccatccctaatggctggtaaatggtggggcctgcattcagctgcttgactctgggagagggtgcaggccttgcccgtttcacacatgacctgaccagctctgttttccttgttggagccacttcagaattgtaaaggcatctctcatttctctagagtcttctttctccaggacaaacactccgagtttttcagctgttccttgcaggacaggattctgggttctcaccatgtggaatctcttctctgtttgcttcttaccagctcaacaacgcccctctgaaagtaggactcttggaaatgaaccttgttgggagtaaagctgaaccttcacctctcctttccaggattctactccattcatacggcctcacactgaattaatgtttctagcagccacattactttgttacccaattgatctagtagtaaagtcttcccatctcttcatgtaccactggtttattgactcttaatgtaggattctacatttgtttgttgtttatcttgttagatccagcctgttgttacaatcttgtaggaagttaactggatcctgattctacatatagctgattgacattttggagggttttgcaataaccatttcccttcctgacagcatcctaacttcctttgggggacctgtgtctgttcccatgtgggcagtcttggccagaatgcagtcctagggccccctacagaagctgaggagtctggatccttcctctcacttccccttgtgaactcgctggga

SEQ ID NO: 292141 - DNA, 658 bp, Homo sapiens
aaggtcgcaccaccgcactccagcctgggtgacagaaagagacccagtatcaaataaaaaatcaaatttcacttaaaaaagaaaaagaaaaaattcttcctagggctgagctgacatctccctcccaatggcttcctacctctagctctcacagaaaagcaatactcaggccccagttgtgtctgacgtgttgcagtttgaagaatattccatccctaatggctggtaaatggtggggcctgcattcagctgcttgactctgggagagggtgcaggccttgcccgtttcacacatgacctgaccagctctgttttccttgttggagccacttcagaattgtaaaggcatctctcatttctctagagtcttctttctccaggacaaacactccgagtttttcagctgttccttgcaggacaggattctgggttctcaccatgtggaatctcttctctgtttgcttcttaccagctcaacaacgcccctctgaaagtaggactcttggaaatgaaccttgttgggagtaaagctgaaccttcacctctcctttccaggattctactccattcatacggcctcacactgaattaatgtttctagcagccacattactttgttacccaattgatctagtagtaaagtcttcccatctcttca

SEQ ID NO: 292142 - DNA, 829 bp, Homo sapiens
cgagcagagtcagggctgccagcgccgtaagcagcaaggggaagggcaggttgtagagcaccaggcccccgcgaacgcccagccgcgcctgcgagccgtaagggtcgtgtggttggcaagtcatttaacttttccaaacaaatctgcaaaatggagataacagcacctgcctcattgcgttgtgaagaagatgaaatgtttagcccggtgcccaacacccagttctcactctgtcatccaggctggtgtgcagtggtgcaatgtgggcttactgcagccttgacctccaggacaagtgatctcccacctcagcctccggaatagctgggactacagctcaacaacgcccctctgaaagtaggactcttggaaatgaaccttgttgggagtaaagctgaaccttcacctctcctttccaggattctactccattcatacggcctcacactgaattaatgtttctagcagccacattactttgttacccaattgatctagtagtaaagtcttcccatctcttcatgtaccactggtttattgactcttaatgtaggattctacatttgtttgttgtttatcttgttagatccagcctgttgttacaatcttgtaggaagttaactggatcctgattctacatatagctgattgacattttggagggttttgcaataaccatttcccttcctgacagcatcctaacttcctttgggggacctgtgtctgttcccatgtgggcagtcttggccagaatgcagtcctagggccccctacagaagctgaggagtctggatccttcctctcacttccccttgtgaactcgctggga

SEQ ID NO: 292143 - DNA, 296 bp, Homo sapiens
gacaagccctgcgtcaggaggttgagcacagaccatgtggacagcagtgtggttggcaagtcatttaacttttccaaacaaatctgcaaaatggagataacagcacctgcctcattgcgttgtgaagaagatgaaatgtttagcccggtgcccaacacccagttctcactctgtcatccaggctggtgtgcagtggtgcaatgtgggcttactgcagccttgacctccaggacaagtgatctcccacctcagcctccggaatagctgggactacaggtatgcaccaccacgcccaa

SEQ ID NO: 292144 - DNA, 462 bp, Homo sapiens
gacaagccctgcgtcaggaggttgagcacagaccatgtggacagcagtgtggttggcaagtcatttaacttttccaaacaaatctgcaaaatggagataacagcacctgcctcattgcgttgtgaagaagatgaaatgtttagcccggtgcccaacacccagttctcactctgtcatccaggctggtgtgcagtggtgcaatgtgggcttactgcagccttgacctccaggacaagtgatctcccacctcagcctccggaatagctgggactacagctcaacaacgcccctctgaaagtaggactcttggaaatgaaccttgttgggagtaaagctgaaccttcacctctcctttccaggattctactccattcatacggcctcacactgaattaatgtttctagcagccacattactttgttacccaattgatctagtagtaaagtcttcccatctcttca

SEQ ID NO: 292145 - DNA, 428 bp, Homo sapiens
gttgcagtgagctgagatcatgccactgtactccagcctaggtgacacagcgagactctggctcaaaaataaaaataaaaataatcaacaatattataacttgggatacctcaaaagttgtgttacatagctgttagtggccgggtggggcagctcagcctgtaatcccaacactttgggaggatgaggcagatggatcacttgaggccaggagttcaagaccagcctggccaacatggtgaaaccctgtctctactaaaaatacaaaaataaacccggtgtggtggcacacacccgtaatcccagctgctagaaagcctgaggaacgagaatcgcttgaatcccagaagtggagttgagtggagtcagtgagctgagatagtgccactgcactccagcctgggtgacaaagcaagcaagactcggtc

SEQ ID NO: 292146 - DNA, 1456 bp, Homo sapiens
  misc_feature (1)..(1): n is a, c, g, or t
  misc_feature (5)..(5): n is a, c, g, or t
  misc_feature (7)..(7): n is a, c, g, or t
  misc_feature (10)..(13): n is a, c, g, or t
  misc_feature (16)..(16): n is a, c, g, or t
  misc_feature (20)..(21): n is a, c, g, or t
  misc_feature (26)..(26): n is a, c, g, or t
  misc_feature (30)..(30): n is a, c, g, or t
  misc_feature (34)..(34): n is a, c, g, or t
  misc_feature (44)..(45): n is a, c, g, or t
  misc_feature (51)..(51): n is a, c, g, or t
  misc_feature (60)..(60): n is a, c, g, or t
  misc_feature (67)..(67): n is a, c, g, or t
  misc_feature (75)..(75): n is a, c, g, or t
  misc_feature (77)..(77): n is a, c, g, or t
  misc_feature (84)..(84): n is a, c, g, or t
  misc_feature (99)..(99): n is a, c, g, or t
  misc_feature (111)..(111): n is a, c, g, or t
  misc_feature (115)..(116): n is a, c, g, or t
  misc_feature (123)..(124): n is a, c, g, or t
  misc_feature (139)..(139): n is a, c, g, or t
  misc_feature (512)..(512): n is a, c, g, or t
  misc_feature (603)..(603): n is a, c, g, or t
  misc_feature (1455)..(1456): n is a, c, g, or t
ntttntnatnnnnttncttnnttttntttntttnttttgagacnnagtctngctctgtcncccaggntggagtgnantggcgtnatctcggctcactgnaacctccgcctnccannttcaagnnattctcctgcttcanctcaaaaaaagctaaaaaaaatttaaaaacaaacaaaacaagcatttctttttttcacacagtttctgagggttggcaatcagggaacagcttagatgggtagttctggctcaggatctctcatgaggttgcagtcaagatgtcagcaggacagatgtttaggactggaagcttgactaaagctgagacatctgcttccaagaaggctcgttcacatgctgttggctagagaggcctcagttccttgttggctgttggcaggaggcctcagtttcccacagcatgggcctccccatcgggccattcacaacatggcagctaactattctcagagtgagtaatccaaggttgggggtagtgaggggaaggaggnggagccacatttgtattataaataacctatcctaagaaatgatccatcacttctgttacattctattggttccacagataaacctcaatanagtgtgtatggggattacaccatggtgtaaatatcgggatgccgggatcattgggggccatcttggaagctggctacatataaaataaatccagttcccattataccagcataggggaaagtagaagtctttcttacacatttttaacctccttatgtttactatttttcttatcccctaactgtaggctatattctatggctacaagagacatgagcagattacagagctccacacccagtcttggaaagaaaagtaactactactaagtagcagcaacttttaagagaaaagaatagagttcctggtgcttgtggcaagaagcaggaggaccttgaagccaatctgggcttgagaaagtggttcattcccccaaatacttcactcaatgatctacctaaatgtctgccgtctgccctcctttcccaccaatttccagtcaggcagcaatagccaacagcaatattaatagtaaaattaatagcagtagtaccagcaccaatgctaagcattttgcctttgttatctcaattactcctcacaacaaacctctgagatagctgtcattattccttacactctagactttgtttcttggtagtcatactctggtcttacactatccagtgtaataaaaacttttttttttttttttaataacacctggctccctcttgccctacacggttctgctactccttcgacacggaaaaattctgtcttgtcctgcctgtcatctcttccacttcagttaggccttaaagcttcctcttagctaccatgttcccaatatctactatcaaacctcactaaaaagaatcaccagattattttgatccctgtaaattcccnn

SEQ ID NO: 292147 - DNA, 1291 bp, Homo sapiens
  misc_feature (1)..(1): n is a, c, g, or t
  misc_feature (5)..(5): n is a, c, g, or t
  misc_feature (7)..(7): n is a, c, g, or t
  misc_feature (10)..(13): n is a, c, g, or t
  misc_feature (16)..(16): n is a, c, g, or t
  misc_feature (20)..(21): n is a, c, g, or t
  misc_feature (26)..(26): n is a, c, g, or t
  misc_feature (30)..(30): n is a, c, g, or t
  misc_feature (34)..(34): n is a, c, g, or t
  misc_feature (44)..(45): n is a, c, g, or t
  misc_feature (51)..(51): n is a, c, g, or t
  misc_feature (60)..(60): n is a, c, g, or t
  misc_feature (67)..(67): n is a, c, g, or t
  misc_feature (75)..(75): n is a, c, g, or t
  misc_feature (77)..(77): n is a, c, g, or t
  misc_feature (84)..(84): n is a, c, g, or t
  misc_feature (99)..(99): n is a, c, g, or t
  misc_feature (111)..(111): n is a, c, g, or t
  misc_feature (115)..(116): n is a, c, g, or t
  misc_feature (123)..(124): n is a, c, g, or t
  misc_feature (139)..(139): n is a, c, g, or t
  misc_feature (512)..(512): n is a, c, g, or t
  misc_feature (603)..(603): n is a, c, g, or t
ntttntnatnnnnttncttnnttttntttntttnttttgagacnnagtctngctctgtcncccaggntggagtgnantggcgtnatctcggctcactgnaacctccgcctnccannttcaagnnattctcctgcttcanctcaaaaaaagctaaaaaaaatttaaaaacaaacaaaacaagcatttctttttttcacacagtttctgagggttggcaatcagggaacagcttagatgggtagttctggctcaggatctctcatgaggttgcagtcaagatgtcagcaggacagatgtttaggactggaagcttgactaaagctgagacatctgcttccaagaaggctcgttcacatgctgttggctagagaggcctcagttccttgttggctgttggcaggaggcctcagtttcccacagcatgggcctccccatcgggccattcacaacatggcagctaactattctcagagtgagtaatccaaggttgggggtagtgaggggaaggaggnggagccacatttgtattataaataacctatcctaagaaatgatccatcacttctgttacattctattggttccacagataaacctcaatanagtgtgtatggggattacaccatggtgtaaatatcgggatgccgggatcattgggggccatcttggaagctggctacatataaaataaatccagttcccattataccagcataggggaaagtagaagtctttcttacacatttttaacctccttatgtttactatttttcttatcccctaactgtaggctatattctatggctacaagagacatgagcagattacagagctccacacccagtcttggaaagaaaagtaactactactaagtagcagcaacttttaagagaaaagaatagagttcctggtgcttgtggcaagaagcaggaggaccttgaagccaatctgggcttgagaaagtggttcattcccccaaatacttcactcaatgatctacctaaatgtctgccgtctgccctcctttcccaccaatttccagtcaggcagcaatagccaacagcaatattaatagtaaaattaatagcagtagtaccagcaccaatgctaagcattttgcctttgttatctcaattactcctcacaacaaacctctgagatagctgtcattattccttacactctagactttgtttcttggtagtcatactctggtcttacactatccagtgtaataaaaacttttttttttttttttacttctttttaattttttttttttttttttttt

SEQ ID NO: 292148 - DNA, 584 bp, Homo sapiens
agcaacatacgagggttccagtttctccacatcgtcctcaaaaccagttactgcccgtcttttgattctggccatcctagtaggctatattctatggctacaagagacatgagcagattacagagctccacacccagtcttggaaagaaaagtaactactactaagtagcagcaacttttaagagaaaagaatagagttcctggtgcttgtggcaagaagcaggaggaccttgaagccaatctgggcttgagaaagtggttcattcccccaaatacttcactcaatgatctacctaaatgtctgccgtctgccctcctttcccaccaatttccagtcaggcagcaatagccaacagcaatattaatagtaaaattaatagcagtagtaccagcaccaatgctaagcattttgcctttgttatctcaattactcctcacaacaaacctctgagatagctgtcattattccttacactctagactttgtttcttggtagtcatactctggtcttacactatccagtgtaataaaaacttttttttttttttttacttctttttaattttttttttttttttttttt

SEQ ID NO: 292149 - DNA, 796 bp, Homo sapiens
gcaggaccagcaagaccctagcagtgcttcctacaccacagctcaccatattatctgctctcagtttaaagacagacacttgtcagctatcagctcagtggacccaagtatttcccatttacaaaattcagtgtattttctttttccctttaaggtgagggcaccagctggggaaggcattcccacacaagagaacactcaactgtcattactctcaaggtattccgtggtccatggaggctggtccacttgacaaagcttccaaggtcttgtggctttgagtttctttgaccagctgagtttctgtacgggagtttccccaccatccaaggcttccgtaaagctgctagcccagctgctctcctgagctggttcctctaccatcttacagcccctctaccatctcggtgtccagactgcacaacctggtgaaacacttcttggactcttacctccaaaaagaaaaaaaagagcttgtatgtactcttttatggaccatagcagagatcacgaaaacaagaactgtgggctcagaaaactcactaggcaagcaagggagggacagactgtccaggaccacctacgtgggctaaggactctggagaacagggagctctggaagtggcgctggagcagaggaatgcaacaaaatctggatctggagttagtatggtagctgagaacaggacttccagctcagtgggaggccacagagatcagtgaagagactgctgcaaaagtcctcagagcccaactaggattggtgactgaaggagagtggaaagatgctttaaga

SEQ ID NO: 292150 - DNA, 3118 bp, Homo sapiens
  misc_feature (2227)..(2227): n is a, c, g, or t
cgctgaatccaagagtacaaatgaagtcactgggttcctgggaaagacatgaggctggagagccaggctggtaaacagacagcagccaaagcaggcctgaggatgaagaagcaggtcacagagcaaagtcactccataggaaccagctagtgaggctgcctgctctccactgggaactggacctctgatgatgaactttctccttgtgccatctactctttcatcaagcaaagcttcctgaagcatctgctgtatcaggagctctgctaagagacacagaagagactgtgactaccatttctatcagccaagtaggatactaacaaggctccaaggattaaggtcccagaaaggcctgccacccacagaactttcgagtctacaggaacacctggaggatggatggaaaggagggaccattccaatagcctgccttcctgggaaggagagacttttgcccaggattgaggagacctaagtcctatttccaactttgatgaagacagtggactcctccatgaacaatttactcatccttggacttcccactccaggactgagattacatttgtcctgttgcttccactgaaagaagagccagaaatatgccttagaattttggaagagaactgcccatcttcaaggatggatattggtctccccggagtcgctgacagggttcctggggaagaataagagctcctagcatcgttgatgtagcttcttttagatgggtggaaactcagatcctgctgatggagtacgtacaggcatgccttcaacaggaatagagacttcaggaggcagtgagcagattctagctctggcattgctggggtgaggatatgtctgccctcccaaccctcttctacttttggacttctaaaaagtacctggacaattcagagggaggtagatgactgaagtgtgattttccaaaggcagaaggaggctcgtcacagcctactttatccaaatgggcccttaacctgcagtcctaccagcctctcaaacagcgaaactttgcagctggcagagatgtgtatgacacacctgtgctgccaatcactgaagaaaccatgtcttgaggaacctaaggagaaaaactcagtggcaattgcttgtcagtgaaaacagtcgcggcacacagggagagatccactgaccctgtggggctggtccctacatctggcgatctgacgtggggctctccctcgctgtgtgaagttgcaccctgagtgtgggatcagcagaggagttcaacgagatattcctgaggattgcggtcaataaacttggtgaccttgaggatgttgcaggaagaagagagagggcctcgtttgggagctgttcacctctgtcctaatacagggcaccaggtcctgttccaatggcagacagcatgggaagccattaatgtgcctgagttctgcagtcagacagctggtgttggatcctctaaccaactctgtgactggacaggagttatagcctctttccaagtgaattatgaagagcaagagcaagtgtggataatatggaagctcattccaggatgttcaagctcagtcgcccccgccagcctgttcaccgtgttatcctgctgctctgctgccccactcctccaccagtcacgatggaagaagagatcgccacgcttgccattgacaatggctccagcatgtgcaaagctggctttgctggggacgatgccccccaagctgtgtttccttccatcgtcgggcgccccagacaccagggcgtcatggtgggcatgggccagaaggactcctacgtgggcgacgaggcccagagcaagcgtggcatcctgaccctgaagtaccccattgagcatggcatcgtcaccaactgggacgacatggagaagatctggcaccacaccttctacaacgagctgcgcgtggccccggaggagcacccagtgctgctgaccgaggcccccctgaaccccaaggccaacagagagaagatgactcagattatgtttgagaccttcaacaccccggccatgtacgtggccatccaggccgtgctgtccctctacgcctctgggcgcaccactggcattgtcatggactctggagacggggtcacccacacggtgcccatctacgtgggctatgccctcccacatgccgtcctgcatctggacctggctggcagggacctgacaggctacctcatgaagatcctcaccgagcgtggntacagcttcaccacctcggcccagcgggagatcatgccccacatcagggagaagctgtgctacatcaccctggacttcgagaaggagatggccacggccgcatcttcctcctccctggagaagagctagagctgcccaatggccaggtcatcaccatcggcaataagccatcccggtgccactaatgtggcaaagccaaaattttaaccaaatctgatttcagtgctctgacccagaaagttcttatgctcacatcagctattcagatgttaacatttggtattttaaattacagaatgatacatatctgagatagacctcttcaagtcttccttataaattagaaactaaagatttttcaaacagaaatactttcaacttttcaagaagctttaattttgtctcataagatgtgaatcgactggatctgttatttagaatgattagcacactgggagtactggcagcaaagcctttgaaattgataaaaatatgtgctgtaatcggacagagatcatccatttgttacgccattccaaagttccctgttattgcctgtgacatttcccaaatcatctagagattcaagctgttagaacagtttcttttatcagtcatctccagaggctcatcaaactgagaattgtataattttgtatttttaaatccatgtggcacttgccacagacagaacctttggaagatgatattgttggtgtctagcctttggttaagatcaacacttgatgggtgatttttaatattaataaaaacagctagcttaatgttaagtctttgttcttttaaaagactgaagagaagagaaatagagtaactacacttgtgatatcacctagtatatattaatacattaaatatgaaaattcagtg

SEQ ID NO: 292151 - DNA, 452 bp, Homo sapiens
gaagaagatagaccaaaaaaggagacagagagacagagagagagagagtgatagagacagagagagagagagagagaccagggcgtcatggtgggcatgggccagaaggactcctacgtgggcgacgaggcccagagcaagcgtggcatcctgaccctgaagtaccccattgagcatggcatcgtcaccaactgggacgacatggagaagatctggcaccacaccttctacaacgagctgcgcgtggccccggaggagcacccagtgctgctgaccgaggcccccctgaaccccaaggccaacagagagaagatgactcaggtgaggctcggcagacgcccgtgctcctcccgtcctttccccagtcattttctgcccggcttgatttctgacatttaagtgtttcttcactgtgcctagctgagcgcctctccacagggatcctctaacga

SEQ ID NO: 292152 - DNA, 1511 bp, Homo sapiens
  misc_feature (2)..(2): n is a, c, g, or t
  misc_feature (620)..(620): n is a, c, g, or t
cntaggtggaagcgacgtccccgagccgtgtttcttccatcgtcgggcgccccagacaccaggtgagtggatggcgccgcggggctcctgggttctgcgttgcggggtgggttcggtgtcgccggcgaggctgacgggtcgtcccctgccagggcgtcatggtgggcatgggccagaaggactcctacgtgggcgacgaggcccagagcaagcgtggcatcctgaccctgaagtaccccattgagcatggcatcgtcaccaactgggacgacatggagaagatctggcaccacaccttctacaacgagctgcgcgtggccccggaggagcacccagtgctgctgaccgaggcccccctgaaccccaaggccaacagagagaagatgactcagattatgtttgagaccttcaacaccccggccatgtacgtggccatccaggccgtgctgtccctctacgcctctgggcgcaccactggcattgtcatggactctggagacggggtcacccacacggtgcccatctacgtgggctatgccctcccacatgccgtcctgcatctggacctggctggcagggacctgacaggctacctcatgaagatcctcaccgagcgtggntacagcttcaccacctcggcccagcgggagatcatgccccacatcagggagaagctgtgctacatcaccctggacttcgagaaggagatggccacggccgcatcttcctcctccctggagaagagctagagctgcccaatggccaggtcatcaccatcggcaataagccatcccggtgccactaatgtggcaaagccaaaattttaaccaaatctgatttcagtgctctgacccagaaagttcttatgctcacatcagctattcagatgttaacatttggtattttaaattacagaatgatacatatctgagatagacctcttcaagtcttccttataaattagaaactaaagatttttcaaacagaaatactttcaacttttcaagaagctttaattttgtctcataagatgtgaatcgactggatctgttatttagaatgattagcacactgggagtactggcagcaaagcctttgaaattgataaaaatatgtgctgtaatcggacagagatcatccatttgttacgccattccaaagttccctgttattgcctgtgacatttcccaaatcatctagagattcaagctgttagaacagtttcttttatcagtcatctccagaggctcatcaaactgagaattgtataattttgtatttttaaatccatgtggcacttgccacagacagaacctttggaagatgatattgttggtgtctagcctttggttaagatcaacacttgatgggtgatttttaatattaataaaaacagctagcttaatgttaagtctttgttcttttaaaagactgaagagaagagaaatagagtaactacacttgtgatatcacctagtatatattaatacattaaatatgaaaattcagtg

SEQ ID NO: 292153 - DNA, 1624 bp, Homo sapiens
  misc_feature (85)..(85): n is a, c, g, or t
  misc_feature (733)..(733): n is a, c, g, or t
tcatcttgggcctgtgttatcccattgagcatggcatcgtcaccaactgggacgacatggagaagatctggcaccacaccttctncaacgagctgcgcgtggccccggaggagcacccagtgctgctgaccgaggcccccctgaaccccaaggccaacagagagaagatgactcaggtgaggctcggcagacgcccgtgctcctcccgtcctttccccagtcattttctgcccatcttgatttctgacgggtcgtcccctgccagggcgtcatggtgggcatgggccagaaggactcctacgtgggcgacgaggcccagagcaagcgtggcatcctgaccctgaagtaccccattgagcatggcatcgtcaccaactgggacgacatggagaagatctggcaccacaccttctacaacgagctgcgcgtggccccggaggagcacccagtgctgctgaccgaggcccccctgaaccccaaggccaacagagagaagatgactcagattatgtttgagaccttcaacaccccggccatgtacgtggccatccaggccgtgctgtccctctacgcctctgggcgcaccactggcattgtcatggactctggagacggggtcacccacacggtgcccatctacgtgggctatgccctcccacatgccgtcctgcatctggacctggctggcagggacctgacaggctacctcatgaagatcctcaccgagcgtggntacagcttcaccacctcggcccagcgggagatcatgccccacatcagggagaagctgtgctacatcaccctggacttcgagaaggagatggccacggccgcatcttcctcctccctggagaagagctagagctgcccaatggccaggtcatcaccatcggcaataagccatcccggtgccactaatgtggcaaagccaaaattttaaccaaatctgatttcagtgctctgacccagaaagttcttatgctcacatcagctattcagatgttaacatttggtattttaaattacagaatgatacatatctgagatagacctcttcaagtcttccttataaattagaaactaaagatttttcaaacagaaatactttcaacttttcaagaagctttaattttgtctcataagatgtgaatcgactggatctgttatttagaatgattagcacactgggagtactggcagcaaagcctttgaaattgataaaaatatgtgctgtaatcggacagagatcatccatttgttacgccattccaaagttccctgttattgcctgtgacatttcccaaatcatctagagattcaagctgttagaacagtttcttttatcagtcatctccagaggctcatcaaactgagaattgtataattttgtatttttaaatccatgtggcacttgccacagacagaacctttggaagatgatattgttggtgtctagcctttggttaagatcaacacttgatgggtgatttttaatattaataaaaacagctagcttaatgttaagtctttgttcttttaaaagactgaagagaagagaaatagagtaactacacttgtgatatcacctagtatatattaatacattaaatatgaaaattcagtg

SEQ ID NO: 292154 - DNA, 1440 bp, Homo sapiens
  misc_feature (549)..(549): n is a, c, g, or t
gaagaagatagaccaaaaaaggagacagagagacagagagagagagagtgatagagacagagagagagagagagagaccagggcgtcatggtgggcatgggccagaaggactcctacgtgggcgacgaggcccagagcaagcgtggcatcctgaccctgaagtaccccattgagcatggcatcgtcaccaactgggacgacatggagaagatctggcaccacaccttctacaacgagctgcgcgtggccccggaggagcacccagtgctgctgaccgaggcccccctgaaccccaaggccaacagagagaagatgactcagattatgtttgagaccttcaacaccccggccatgtacgtggccatccaggccgtgctgtccctctacgcctctgggcgcaccactggcattgtcatggactctggagacggggtcacccacacggtgcccatctacgtgggctatgccctcccacatgccgtcctgcatctggacctggctggcagggacctgacaggctacctcatgaagatcctcaccgagcgtggntacagcttcaccacctcggcccagcgggagatcatgccccacatcagggagaagctgtgctacatcaccctggacttcgagaaggagatggccacggccgcatcttcctcctccctggagaagagctagagctgcccaatggccaggtcatcaccatcggcaataagccatcccggtgccactaatgtggcaaagccaaaattttaaccaaatctgatttcagtgctctgacccagaaagttcttatgctcacatcagctattcagatgttaacatttggtattttaaattacagaatgatacatatctgagatagacctcttcaagtcttccttataaattagaaactaaagatttttcaaacagaaatactttcaacttttcaagaagctttaattttgtctcataagatgtgaatcgactggatctgttatttagaatgattagcacactgggagtactggcagcaaagcctttgaaattgataaaaatatgtgctgtaatcggacagagatcatccatttgttacgccattccaaagttccctgttattgcctgtgacatttcccaaatcatctagagattcaagctgttagaacagtttcttttatcagtcatctccagaggctcatcaaactgagaattgtataattttgtatttttaaatccatgtggcacttgccacagacagaacctttggaagatgatattgttggtgtctagcctttggttaagatcaacacttgatgggtgatttttaatattaataaaaacagctagcttaatgttaagtctttgttcttttaaaagactgaagagaagagaaatagagtaactacacttgtgatatcacctagtatatattaatacattaaatatgaaaattcagtg

SEQ ID NO: 292155 - DNA, 1444 bp, Homo sapiens
  misc_feature (553)..(553): n is a, c, g, or t
aaagacatcagctaagaaaggaactgggtcctacggcttggactttccaaccctgacagacccgcaagacaaaacaactggttcttgccagcctctagagaaatcccagaaggactcctacgtgggcgacgaggcccagagcaagcgtggcatcctgaccctgaagtaccccattgagcatggcatcgtcaccaactgggacgacatggagaagatctggcaccacaccttctacaacgagctgcgcgtggccccggaggagcacccagtgctgctgaccgaggcccccctgaaccccaaggccaacagagagaagatgactcagattatgtttgagaccttcaacaccccggccatgtacgtggccatccaggccgtgctgtccctctacgcctctgggcgcaccactggcattgtcatggactctggagacggggtcacccacacggtgcccatctacgtgggctatgccctcccacatgccgtcctgcatctggacctggctggcagggacctgacaggctacctcatgaagatcctcaccgagcgtggntacagcttcaccacctcggcccagcgggagatcatgccccacatcagggagaagctgtgctacatcaccctggacttcgagaaggagatggccacggccgcatcttcctcctccctggagaagagctagagctgcccaatggccaggtcatcaccatcggcaataagccatcccggtgccactaatgtggcaaagccaaaattttaaccaaatctgatttcagtgctctgacccagaaagttcttatgctcacatcagctattcagatgttaacatttggtattttaaattacagaatgatacatatctgagatagacctcttcaagtcttccttataaattagaaactaaagatttttcaaacagaaatactttcaacttttcaagaagctttaattttgtctcataagatgtgaatcgactggatctgttatttagaatgattagcacactgggagtactggcagcaaagcctttgaaattgataaaaatatgtgctgtaatcggacagagatcatccatttgttacgccattccaaagttccctgttattgcctgtgacatttcccaaatcatctagagattcaagctgttagaacagtttcttttatcagtcatctccagaggctcatcaaactgagaattgtataattttgtatttttaaatccatgtggcacttgccacagacagaacctttggaagatgatattgttggtgtctagcctttggttaagatcaacacttgatgggtgatttttaatattaataaaaacagctagcttaatgttaagtctttgttcttttaaaagactgaagagaagagaaatagagtaactacacttgtgatatcacctagtatatattaatacattaaatatgaaaattcagtg

SEQ ID NO: 292156 - DNA, 1363 bp, Homo sapiens
  misc_feature (472)..(472): n is a, c, g, or t
gatcgtcaccaactgggtacttcagggtcaggatgccacgcttgctctgggcctcgtcgcccacgtaggagtccttctggcccatgcccccattgagcatggcatcgtcaccaactgggacgacatggagaagatctggcaccacaccttctacaacgagctgcgcgtggccccggaggagcacccagtgctgctgaccgaggcccccctgaaccccaaggccaacagagagaagatgactcagattatgtttgagaccttcaacaccccggccatgtacgtggccatccaggccgtgctgtccctctacgcctctgggcgcaccactggcattgtcatggactctggagacggggtcacccacacggtgcccatctacgtgggctatgccctcccacatgccgtcctgcatctggacctggctggcagggacctgacaggctacctcatgaagatcctcaccgagcgtggntacagcttcaccacctcggcccagcgggagatcatgccccacatcagggagaagctgtgctacatcaccctggacttcgagaaggagatggccacggccgcatcttcctcctccctggagaagagctagagctgcccaatggccaggtcatcaccatcggcaataagccatcccggtgccactaatgtggcaaagccaaaattttaaccaaatctgatttcagtgctctgacccagaaagttcttatgctcacatcagctattcagatgttaacatttggtattttaaattacagaatgatacatatctgagatagacctcttcaagtcttccttataaattagaaactaaagatttttcaaacagaaatactttcaacttttcaagaagctttaattttgtctcataagatgtgaatcgactggatctgttatttagaatgattagcacactgggagtactggcagcaaagcctttgaaattgataaaaatatgtgctgtaatcggacagagatcatccatttgttacgccattccaaagttccctgttattgcctgtgacatttcccaaatcatctagagattcaagctgttagaacagtttcttttatcagtcatctccagaggctcatcaaactgagaattgtataattttgtatttttaaatccatgtggcacttgccacagacagaacctttggaagatgatattgttggtgtctagcctttggttaagatcaacacttgatgggtgatttttaatattaataaaaacagctagcttaatgttaagtctttgttcttttaaaagactgaagagaagagaaatagagtaactacacttgtgatatcacctagtatatattaatacattaaatatgaaaattcagtg

SEQ ID NO: 292157 - DNA, 1082 bp, Homo sapiens
gcggggccgtgagtcccgggctccgccccggagcgtcgggcccctccccgggccccgcctccagctcgcctaggaccgcttggagccggcagctcgcctgccaaacccggctgggaacgcctggcagcttttaggagggggcgggcccgggggtggtggccccaggagcggttgccgcggggaccgggcagtgacgcggcccaagggcggaagtgagaaagttgtctgcgtctctcgaggcgagttggcggagctgtgcgcgcggcggggcgatggggggctcgggcagtcgcctgtccaaggagctgctggccgagtaccaggacttgacgttcctgacgaagcaggagatcctcctagcccacaggcggttttgtgagctgcttccccaggagcagcggagcgtggagtcgtcacttcgggcacaagtgcccttcgagcagattctcagccttccagagctcaaggccaaccccttcaaggagcgaatctgcagggtcttctccacatccccagccaaagacagccttagctttgaggacttcctggatctcctcagtgtgttcagtgacacagccacgccagacatcaagtcccattatgccttccgcatctttgactttgatgatgacggaaccttgaacagagaagacctgagccggctggtgaactgcctcacgggagagggcgaggacacacggcttagtgcgtctgagatgaagcagctcatcgacaacatcctggaggagtctgacattgacagggatggaaccatcaacctctctgagttccagcacgtcatctcccgttctccagactttgccagctcctttaagattgtcctgtgacagcagccccagcgtgtgtcctggcaccctgtccaagaacctttctactgctgagctgtggccaaggtcaagcctgtgttgccagtgcgggccaagctggcccagcctggagctggcgctgtgcagcctcaccccgggcaggggcggccctcgttgtcagggcctctcctcactgctgttgtcattgctccgtttgtgtttgtactaatcagtaataaaggtttagaagtttga

SEQ ID NO: 292158 - DNA, 1501 bp, Homo sapiens
cgtatctgctccatggcttcccacgtcagggtcctgggcggggcaccaggcgcctccatttgcctccgaattttctggaatcggattgcttgtttctgtcgtttcagggtgctgggggaagagaaccaatggcagaagccatgcgtggaagcagaatggatgtttgaagagcctcaggctaaatcatggagcgcccagccctcttctctttgatcgcaagggcaaccgggccatgttgccggcttagagctgctccgtacacccagaaagctaacacctagaacaataactgcctgtaagcatgccgaactctctaaactgatgatgaaatacgtcactaatgaagggaccagtggtcccaggggagctgaacacctgacgctgcgcccctaacaacgggtaagaagaaacaagggccgctgcgcaagcagcggcaggacacccggcgccaagggggcgcggcctggagcgccggggcacgaggccctgcttcaagctgagggcccggggagaagccggtacctctccacctcctgcagctcccgttcctccggctcccagtcggaatcggggtccggctcccggccaatagggcctgggcccgccaccccccgggtcgcgaacccacagcgagtgacggcggcgcaaacgcgcccgcccagcaagagactcagggtaaccgccatgtcgacgcaaaccagccttcagcagtcggctacgaaacagcagcggaagtagccgggacttgacgttcctgacgaagcaggagatcctcctagcccacaggcggttttgtgagctgcttccccaggagcagcggagcgtggagtcgtcacttcgggcacaagtgcccttcgagcagattctcagccttccagagctcaaggccaaccccttcaaggagcgaatctgcagggtcttctccacatccccagccaaagacagccttagctttgaggacttcctggatctcctcagtgtgttcagtgacacagccacgccagacatcaagtcccattatgccttccgcatctttgactttgatgatgacggaaccttgaacagagaagacctgagccggctggtgaactgcctcacgggagagggcgaggacacacggcttagtgcgtctgagatgaagcagctcatcgacaacatcctggaggagtctgacattgacagggatggaaccatcaacctctctgagttccagcacgtcatctcccgttctccagactttgccagctcctttaagattgtcctgtgacagcagccccagcgtgtgtcctggcaccctgtccaagaacctttctactgctgagctgtggccaaggtcaagcctgtgttgccagtgcgggccaagctggcccagcctggagctggcgctgtgcagcctcaccccgggcaggggcggccctcgttgtcagggcctctcctcactgctgttgtcattgctccgtttgtgtttgtactaatcagtaataaaggtttagaagtttga

SEQ ID NO: 292159 - DNA, 880 bp, Homo sapiens
ataccctctatacgttccggcacgaggcggcctcgaggcgagttggcggagctgtgcgcgcggcggggcgatggggggctcgggcagtcgcctgtccaaggagctgctggccgagtaccaggacttgacgttcctgacgaagcaggagatcctcctagcccacaggcggttttgtgagctgcttccccaggagcagcggagcgtggagtcgtcacttcgggcacaagtgcccttcgagcagattctcagccttccagagctcaaggccaaccccttcaaggagcgaatctgcagggtcttctccacatccccagccaaagacagccttagctttgaggacttcctggatctcctcagtgtgttcagtgacacagccacgccagacatcaagtcccattatgccttccgcatctttgactttgatgatgacggaaccttgaacagagaagacctgagccggctggtgaactgcctcacgggagagggcgaggacacacggcttagtgcgtctgagatgaagcagctcatcgacaacatcctggaggagtctgacattgacagggatggaaccatcaacctctctgagttccagcacgtcatctcccgttctccagactttgccagctcctttaagattgtcctgtgacagcagccccagcgtgtgtcctggcaccctgtccaagaacctttctactgctgagctgtggccaaggtcaagcctgtgttgccagtgcgggccaagctggcccagcctggagctggcgctgtgcagcctcaccccgggcaggggcggccctcgttgtcagggcctctcctcactgctgttgtcattgctccgtttgtgtttgtactaatcagtaataaaggtttagaagtttga

SEQ ID NO: 292160 - DNA, 888 bp, Homo sapiens
cccacgcgtccgcggacgcgtgggtcgacccacgcgtccctcgaggcgagttggcggagctgtgcgcgcggcggggcgatggggggctcgggcagtcgcctgtccaaggagctgctggccgagtaccaggacttgacgttcctgacgaagcaggagatcctcctagcccacaggcggttttgtgagctgcttccccaggagcagcggagcgtggagtcgtcacttcgggcacaagtgcccttcgagcagattctcagccttccagagctcaaggccaaccccttcaaggagcgaatctgcagggtcttctccacatccccagccaaagacagccttagctttgaggacttcctggatctcctcagtgtgttcagtgacacagccacgccagacatcaagtcccattatgccttccgcatctttgactttgatgatgacggaaccttgaacagagaagacctgagccggctggtgaactgcctcacgggagagggcgaggacacacggcttagtgcgtctgagatgaagcagctcatcgacaacatcctggaggagtctgacattgacagggatggaaccatcaacctctctgagttccagcacgtcatctcccgttctccagactttgccagctcctttaagattgtcctgtgacagcagccccagcgtgtgtcctggcaccctgtccaagaacctttctactgctgagctgtggccaaggtcaagcctgtgttgccagtgcgggccaagctggcccagcctggagctggcgctgtgcagcctcaccccgggcaggggcggccctcgttgtcagggcctctcctcactgctgttgtcattgctccgtttgtgtttgtactaatcagtaataaaggtttagaagtttga

SEQ ID NO: 292161 - DNA, 1118 bp, Homo sapiens
gcggggccgtgagtcccgggctccgccccggagcgtcgggcccctccccgggccccgcctccagctcgcctaggaccgcttggagccggcagctcgcctgccaaacccggctgggaacgcctggcagcttttaggagggggcgggcccgggggtggtggccccaggagcggttgccgcggggaccgggcagtgacgcggcccaagggcggaagtgagaaagttgtctgcgtctctcgaggcgagttggcggagctgtgcgcgcggcggggcgatggggggctcgggcagtcgcctgtccaaggagctgctggccgagtaccaggacttgacgttcctgacgaagcaggagatcctcctagcccacaggcggttttgtgagctgcttccccaggagcagcggagcgtggagtcgtcacttcgggcacaagtgcccttcgagcagattctcagccttccagagctcaaggccaaccccttcaaggagcgaatctgcagggtcttctccacatccccagccaaagacagccttagctttgaggacttcctggatctcctcagtgtgttcagtgacacagccacgccagacatcaagtcccattatgccttccgcatctttgactttgatgatgacggaaccttgaacagagaagacctgagccggctggtgaactgcctcacgggagagggcgaggacacacggcttagtgcgtctgagatgaagcagctcatcgacaacatcctggaggagtctgacattgacagggatggaaccatcaacctctctgagttccagcacgtcatctcccgttctccagactttgccagctcctttaagattgtcctgtgacagcagccccagcgtgtgtcctggcaccctgtccaagaacctttctactgctgagctgtggccaaggtcaagcctgtgttgccagtgcgggccaagctggcccagcctggagctggcgctgtgcagcctcaccccgggcaggggcggccctcgttgtcagggcctctcctcactgctgttgtcattgctccgtttgtgtttgtactaatcagtaataaaggtttagaagtttgagaaaaacaccaaaaaaaaccaggccataaatcggga

SEQ ID NO: 292162 - DNA, 1056 bp, Homo sapiens
gcggggccgtgagtcccgggctccgccccggagcgtcgggcccctccccgggccccgcctccagctcgcctaggaccgcttggagccggcagctcgcctgccaaacccggctgggaacgcctggcagcttttaggagggggcgggcccgggggtggtggccccaggagcggttgccgcggggaccgggcagtgacgcggcccaagggcggaagtgagaaagttgtctgcgtctctcgaggcgagttggcggagctgtgcgcgcggcggggcgatggggggctcgggcagtcgcctgtccaaggagctgctggccgagtaccaggacttgacgttcctgacgaagcaggagatcctcctgtaagtgctgccttgaaccctgcctccgaccccgggatcctctagagacagcttcgggggcgctgtcccgagggaggggcgggggctggcctgaggtctgcagaggagcgggagctggaggccgggagacctagcccgggctgcgccctcctcccggcacgccctccccgccctcgcctgaggccccagcgtggcaccgcggagccaccttacagcctccaggaaaagttaggcgctctttgaccctgggctccactagcttcagcactgccgaacttcctgccccagtccggcaggggccgaccttgcccagtggctaaaccacagaagccttggggagcccggctccttctcccaactttacctgaataatacagtaaccgttatcgctttctgagcactcaccatgtgccagggactgtgctaaatggttgcctgcgttacctaatttaatctttaggagagaggtactggacaatgaaacaggttcagaaaggtttggtaactgcttaagacaacactctgggtaagtagatttgaacttgggctggaagcccttttgccggatttatgcaggccaggttcctgtggcaaagataagctcatgggaaggaggtggaggccgaggaggacagttcagtgtggttgctaaaaaggaggctttgagggtaagagatccctggagtgaaggtgagaat

SEQ ID NO: 292163 - DNA, 656 bp, Homo sapiens
gagctgctggccgagtaccaggacttgacgtatcctggaggagtctgacattgacagggatggaaccatcaacctctctgagttccagcacgtcatctcccgttctccagactttgccagctcctttaagattgtcctgtgacagcagccccagcgtgtgtcctggcaccctgtccaagaacctttctactgctgagctgtggccaaggtcaagcctgtgttgccagtgcgggccaagctggcccagcctggagctggcgctgtgcagcctcaccccgggcaggggcggccctcgttgtcagggcctctcctcactgctgttgtcattgctccgtttgtgtttgtactaatcagtaataaaggtttagaagtttgagaccctatgtgtgacatgagatacactggtatgaggaaggactggacttctcttctaagagccttcaatcatcctaggaataagcagcatatcgagcagaggccagcgggaagtcaagccgcacccacgctggctgtccccgtgggagggtgtgaggatgaaggggcagcaggaggtgtgggactcgcctgtatcctgattggggtggtggttagatgagtctctgcatgcatcaaaatgtaaagaaccgtacatcagtaaagtctattttactgcatga

SEQ ID NO: 292164 - DNA, 966 bp, Homo sapiens
gcggggccgtgagtcccgggctccgccccggagcgtcgggcccctccccgggccccgcctccagctcgcctaggaccgcttggagccggcagctcgcctgccaaacccggctgggaacgcctggcagcttttaggagggggcgggcccgggggtggtggccccaggagcggttgccgcggggaccgggcagtgacgcggcccaagggcggaagtgagaaagttgtctgcgtctgacttgacgttcctgacgaagcaggagatcctcctgtaagtgctgccttgaaccctgcctccgaccccgggatcctctagagacagcttcgggggcgctgtcccgagggaggggcgggggctggcctgaggtctgcagaggagcgggagctggaggccgggagacctagcccgggctgcgccctcctcccggcacgccctccccgccctcgcctgaggccccagcgtggcaccgcggagccaccttacagcctccaggaaaagttaggcgctctttgaccctgggctccactagcttcagcactgccgaacttcctgccccagtccggcaggggccgaccttgcccagtggctaaaccacagaagccttggggagcccggctccttctcccaactttacctgaataatacagtaaccgttatcgctttctgagcactcaccatgtgccagggactgtgctaaatggttgcctgcgttacctaatttaatctttaggagagaggtactggacaatgaaacaggttcagaaaggtttggtaactgcttaagacaacactctgggtaagtagatttgaacttgggctggaagcccttttgccggatttatgcaggccaggttcctgtggcaaagataagctcatgggaaggaggtggaggccgaggaggacagttcagtgtggttgctaaaaaggaggctttgagggtaagagatccctggagtgaaggtgagaat

SEQ ID NO: 292165 - DNA, 416 bp, Homo sapiens
gctgattctagaggacccccgtcgaccgagtccaggacttgacgttcctgacgaagcaggagatcctcctagcccacaggcggttttgtgagctgcttccccaggagcagcggagcgtggagtcgtcacttcgggcacaagtgcccttcgagcagattctcagccttccagagctcaaggccaaccccttcaaggagcgaatctgcagggtcttctccacatccccagccaaagacagccttagctttgaggacttcctggatctcctcagtgtgttcagtgacacagccacgccagacatcaagtcccattatgccttccgcatctttgactttgatgatgacggaactcggtcagaggtgggaactcggtcagaggtgggaactcggtcagaggtgggaactcggtcagaggtg

SEQ ID NO: 292166 - DNA, 992 bp, Homo sapiens
gcggggccgtgagtcccgggctccgccccggagcgtcgggcccctccccgggccccgcctccagctcgcctaggaccgcttggagccggcagctcgcctgccaaacccggctgggaacgcctggcagcttttaggagggggcgggcccgggggtggtggccccaggagcggttgccgcggggaccgggcagtgacgcggcccaagggcggaagtgagaaagttgtctgcgtctgacttgacgttcctgacgaagcaggagatcctcctagcccacaggcggttttgtgagctgcttccccaggagcagcggagcgtggagtcgtcacttcgggcacaagtgcccttcgagcagattctcagccttccagagctcaaggccaaccccttcaaggagcgaatctgcagggtcttctccacatccccagccaaagacagccttagctttgaggacttcctggatctcctcagtgtgttcagtgacacagccacgccagacatcaagtcccattatgccttccgcatctttgactttgatgatgacggaaccttgaacagagaagacctgagccggctggtgaactgcctcacgggagagggcgaggacacacggcttagtgcgtctgagatgaagcagctcatcgacaacatcctggaggagtctgacattgacagggatggaaccatcaacctctctgagttccagcacgtcatctcccgttctccagactttgccagctcctttaagattgtcctgtgacagcagccccagcgtgtgtcctggcaccctgtccaagaacctttctactgctgagctgtggccaaggtcaagcctgtgttgccagtgcgggccaagctggcccagcctggagctggcgctgtgcagcctcaccccgggcaggggcggccctcgttgtcagggcctctcctcactgctgttgtcattgctccgtttgtgtttgtactaatcagtaataaaggtttagaagtttga

SEQ ID NO: 292167 - DNA, 1621 bp, Homo sapiens
cgtatctgctccatggcttcccacgtcagggtcctgggcggggcaccaggcgcctccatttgcctccgaattttctggaatcggattgcttgtttctgtcgtttcagggtgctgggggaagagaaccaatggcagaagccatgcgtggaagcagaatggatgtttgaagagcctcaggctaaatcatggagcgcccagccctcttctctttgatcgcaagggcaaccgggccatgttgccggcttagagctgctccgtacacccagaaagctaacacctagaacaataactgcctgtaagcatgccgaactctctaaactgatgatgaaatacgtcactaatgaagggaccagtggtcccaggggagctgaacacctgacgctgcgcccctaacaacgggtaagaagaaacaagggccgctgcgcaagcagcggcaggacacccggcgccaagggggcgcggcctggagcgccggggcacgaggccctgcttcaagctgagggcccggggagaagccggtacctctccacctcctgcagctcccgttcctccggctcccagtcggaatcggggtccggctcccggccaatagggcctgggcccgccaccccccgggtcgcgaacccacagcgagtgacggcggcgcaaacgcgcccgcccagcaagagactcagggtaaccgccatgtcgacgcaaaccagccttcagcagtcggctacgaaacagcagcggaagtagccgggacttgacgttcctgacgaagcaggagatcctcctttctgtgtacgtggttttagctcctcacctggttgacaatgagcagcaggcaaggagtgggaatgaacacacagggagaccgatcgctgagaacaccgacagttcccctctctctaccagagcccacaggcggttttgtgagctgcttccccaggagcagcggagcgtggagtcgtcacttcgggcacaagtgcccttcgagcagattctcagccttccagagctcaaggccaaccccttcaaggagcgaatctgcagggtcttctccacatccccagccaaagacagccttagctttgaggacttcctggatctcctcagtgtgttcagtgacacagccacgccagacatcaagtcccattatgccttccgcatctttgactttgatgatgacggaaccttgaacagagaagacctgagccggctggtgaactgcctcacgggagagggcgaggacacacggcttagtgcgtctgagatgaagcagctcatcgacaacatcctggaggagtctgacattgacagggatggaaccatcaacctctctgagttccagcacgtcatctcccgttctccagactttgccagctcctttaagattgtcctgtgacagcagccccagcgtgtgtcctggcaccctgtccaagaacctttctactgctgagctgtggccaaggtcaagcctgtgttgccagtgcgggccaagctggcccagcctggagctggcgctgtgcagcctcaccccgggcaggggcggccctcgttgtcagggcctctcctcactgctgttgtcattgctccgtttgtgtttgtactaatcagtaataaaggtttagaagtttga

SEQ ID NO: 292168 - DNA, 1915 bp, Homo sapiens
cgtatctgctccatggcttcccacgtcagggtcctgggcggggcaccaggcgcctccatttgcctccgaattttctggaatcggattgcttgtttctgtcgtttcagggtgctgggggaagagaaccaatggcagaagccatgcgtggaagcagaatggatgtttgaagagcctcaggctaaatcatggagcgcccagccctcttctctttgatcgcaagggcaaccgggccatgttgccggcttagagctgctccgtacacccagaaagctaacacctagaacaataactgcctgtaagcatgccgaactctctaaactgatgatgaaatacgtcactaatgaagggaccagtggtcccaggggagctgaacacctgacgctgcgcccctaacaacgggtaagaagaaacaagggccgctgcgcaagcagcggcaggacacccggcgccaagggggcgcggcctggagcgccggggcacgaggccctgcttcaagctgagggcccggggagaagccggtacctctccacctcctgcagctcccgttcctccggctcccagtcggaatcggggtccggctcccggccaatagggcctgggcccgccaccccccgggtcgcgaacccacagcgagtgacggcggcgcaaacgcgcccgcccagcaagagactcagggtaaccgccatgtcgacgcaaaccagccttcagcagtcggctacgaaacagcagcggaagtagccgggacttgacgttcctgacgaagcaggagatcctccttagagaaggggttcaccatgttgctcagactggtctcagacgcctgacctccaatgctccacccgccttggcctcccaaagtgctgggattacaggtgtgagccaccgtgcctggccaattctttagggccaacttctggctcctttcccaacttcttcatcccttggggatctctagaatcagtgccaagcacatagtaaatgctcagtaaatactcattgcaagaatagactcctaggctgtactgccttgtgacatgtccttttgcttactgttgcctgatgactcggaagttctgtgtacgtggttttagctcctcacctggttgacaatgagcagcaggcaaggagtgggaatgaacacacagggagaccgatcgctgagaacaccgacagttcccctctctctaccagagcccacaggcggttttgtgagctgcttccccaggagcagcggagcgtggagtcgtcacttcgggcacaagtgcccttcgagcagattctcagccttccagagctcaaggccaaccccttcaaggagcgaatctgcagggtcttctccacatccccagccaaagacagccttagctttgaggacttcctggatctcctcagtgtgttcagtgacacagccacgccagacatcaagtcccattatgccttccgcatctttgactttgatgatgacggaaccttgaacagagaagacctgagccggctggtgaactgcctcacgggagagggcgaggacacacggcttagtgcgtctgagatgaagcagctcatcgacaacatcctggaggagtctgacattgacagggatggaaccatcaacctctctgagttccagcacgtcatctcccgttctccagactttgccagctcctttaagattgtcctgtgacagcagccccagcgtgtgtcctggcaccctgtccaagaacctttctactgctgagctgtggccaaggtcaagcctgtgttgccagtgcgggccaagctggcccagcctggagctggcgctgtgcagcctcaccccgggcaggggcggccctcgttgtcagggcctctcctcactgctgttgtcattgctccgtttgtgtttgtactaatcagtaataaaggtttagaagtttga

SEQ ID NO: 292169 - DNA, 1202 bp, Homo sapiens
gagctgttctagagtatcccaagatagccaagcagccgcccccggctaatttttgtatttttagtagagaaggggttcaccatgttgctcagactggtctcagacgcctgacctccaatgctccacccgccttggcctcccaaagtgctgggattacaggtgtgagccaccgtgcctggccaattctttagggccaacttctggctcctttcccaacttcttcatcccttggggatctctagaatcagtgccaagcacatagtaaatgctcagtaaatactcattgcaagaatagactcctaggctgtactgccttgtgacatgtccttttgcttactgttgcctgatgactcggaagttctgtgtacgtggttttagctcctcacctggttgacaatgagcagcaggcaaggagtgggaatgaacacacagggagaccgatcgctgagaacaccgacagttcccctctctctaccagagcccacaggcggttttgtgagctgcttccccaggagcagcggagcgtggagtcgtcacttcgggcacaagtgcccttcgagcagattctcagccttccagagctcaaggccaaccccttcaaggagcgaatctgcagggtcttctccacatccccagccaaagacagccttagctttgaggacttcctggatctcctcagtgtgttcagtgacacagccacgccagacatcaagtcccattatgccttccgcatctttgactttgatgatgacggaaccttgaacagagaagacctgagccggctggtgaactgcctcacgggagagggcgaggacacacggcttagtgcgtctgagatgaagcagctcatcgacaacatcctggaggagtctgacattgacagggatggaaccatcaacctctctgagttccagcacgtcatctcccgttctccagactttgccagctcctttaagattgtcctgtgacagcagccccagcgtgtgtcctggcaccctgtccaagaacctttctactgctgagctgtggccaaggtcaagcctgtgttgccagtgcgggccaagctggcccagcctggagctggcgctgtgcagcctcaccccgggcaggggcggccctcgttgtcagggcctctcctcactgctgttgtcattgctccgtttgtgtttgtactaatcagtaataaaggtttagaagtttga

SEQ ID NO: 292170 - DNA, 1008 bp, Homo sapiens
cccacgcgtccgcggacgcgtgggtcgacccacgcgtccctcgaggcgagttggcggagctgtgcgcgcggcggggcgatggggggctcgggcagtcgcctgtccaaggagctgctggccgagtaccaggacttgacgttcctgacgaagcaggagatcctcctttctgtgtacgtggttttagctcctcacctggttgacaatgagcagcaggcaaggagtgggaatgaacacacagggagaccgatcgctgagaacaccgacagttcccctctctctaccagagcccacaggcggttttgtgagctgcttccccaggagcagcggagcgtggagtcgtcacttcgggcacaagtgcccttcgagcagattctcagccttccagagctcaaggccaaccccttcaaggagcgaatctgcagggtcttctccacatccccagccaaagacagccttagctttgaggacttcctggatctcctcagtgtgttcagtgacacagccacgccagacatcaagtcccattatgccttccgcatctttgactttgatgatgacggaaccttgaacagagaagacctgagccggctggtgaactgcctcacgggagagggcgaggacacacggcttagtgcgtctgagatgaagcagctcatcgacaacatcctggaggagtctgacattgacagggatggaaccatcaacctctctgagttccagcacgtcatctcccgttctccagactttgccagctcctttaagattgtcctgtgacagcagccccagcgtgtgtcctggcaccctgtccaagaacctttctactgctgagctgtggccaaggtcaagcctgtgttgccagtgcgggccaagctggcccagcctggagctggcgctgtgcagcctcaccccgggcaggggcggccctcgttgtcagggcctctcctcactgctgttgtcattgctccgtttgtgtttgtactaatcagtaataaaggtttagaagtttga

SEQ ID NO: 292171 - DNA, 1087 bp, Homo sapiens
gcggggccgtgagtcccgggctccgccccggagcgtcgggcccctccccgggccccgcctccagctcgcctaggaccgcttggagccggcagctcgcctgccaaacccggctgggaacgcctggcagcttttaggagggggcgggcccgggggtggtggccccaggagcggttgccgcggggaccgggcagtgacgcggcccaagggcggaagtgagaaagttgtctgcgtctgacttgacgttcctgacgaagcaggagatcctccttagagaaggggttcaccatgttgctcagactggtctcagacgcctgacctccaatgctccacccgccttggcctcccaaagtgctgggattacagagcccacaggcggttttgtgagctgcttccccaggagcagcggagcgtggagtcgtcacttcgggcacaagtgcccttcgagcagattctcagccttccagagctcaaggccaaccccttcaaggagcgaatctgcagggtcttctccacatccccagccaaagacagccttagctttgaggacttcctggatctcctcagtgtgttcagtgacacagccacgccagacatcaagtcccattatgccttccgcatctttgactttgatgatgacggaaccttgaacagagaagacctgagccggctggtgaactgcctcacgggagagggcgaggacacacggcttagtgcgtctgagatgaagcagctcatcgacaacatcctggaggagtctgacattgacagggatggaaccatcaacctctctgagttccagcacgtcatctcccgttctccagactttgccagctcctttaagattgtcctgtgacagcagccccagcgtgtgtcctggcaccctgtccaagaacctttctactgctgagctgtggccaaggtcaagcctgtgttgccagtgcgggccaagctggcccagcctggagctggcgctgtgcagcctcaccccgggcaggggcggccctcgttgtcagggcctctcctcactgctgttgtcattgctccgtttgtgtttgtactaatcagtaataaaggtttagaagtttga

SEQ ID NO: 292172 - DNA, 1497 bp, Homo sapiens
cgtatctgctccatggcttcccacgtcagggtcctgggcggggcaccaggcgcctccatttgcctccgaattttctggaatcggattgcttgtttctgtcgtttcagggtgctgggggaagagaaccaatggcagaagccatgcgtggaagcagaatggatgtttgaagagcctcaggctaaatcatggagcgcccagccctcttctctttgatcgcaagggcaaccgggccatgttgccggcttagagctgctccgtacacccagaaagctaacacctagaacaataactgcctgtaagcatgccgaactctctaaactgatgatgaaatacgtcactaatgaagggaccagtggtcccaggggagctgaacacctgacgctgcgcccctaacaacgggtaagaagaaacaagggccgctgcgcaagcagcggcaggacacccggcgccaagggggcgcggcctggagcgccggggcacgaggccctgcttcaagctgagggcccggggagaagccggtacctctccacctcctgcagctcccgttcctccggctcccagtcggaatcggggtccggctcccggccaatagggcctgggcccgccaccccccgggtcgcgaacccacagcgagtgacggcggcgcaaacgcgcccgcccagcaagagactcagggtaaccgccatgtcgacgcaaaccagccttcagcagtcggctacgaaacagcagcggaagtagccgggacttgacgttcctgacgaagcaggagatcctcctgatgacttcttcttccctctctgcccacacttacgttgtatgtgacctgcctttgggttaaacacttgactcccaggaagccatctcagtcccttccccagctgggccaaccccttcaaggagcgaatctgcagggtcttctccacatccccagccaaagacagccttagctttgaggacttcctggatctcctcagtgtgttcagtgacacagccacgccagacatcaagtcccattatgccttccgcatctttgactttgatgatgacggaaccttgaacagagaagacctgagccggctggtgaactgcctcacgggagagggcgaggacacacggcttagtgcgtctgagatgaagcagctcatcgacaacatcctggaggagtctgacattgacagggatggaaccatcaacctctctgagttccagcacgtcatctcccgttctccagactttgccagctcctttaagattgtcctgtgacagcagccccagcgtgtgtcctggcaccctgtccaagaacctttctactgctgagctgtggccaaggtcaagcctgtgttgccagtgcgggccaagctggcccagcctggagctggcgctgtgcagcctcaccccgggcaggggcggccctcgttgtcagggcctctcctcactgctgttgtcattgctccgtttgtgtttgtactaatcagtaataaaggtttagaagtttga

SEQ ID NO: 292173 - DNA, 1392 bp, Homo sapiens
cgtatctgctccatggcttcccacgtcagggtcctgggcggggcaccaggcgcctccatttgcctccgaattttctggaatcggattgcttgtttctgtcgtttcagggtgctgggggaagagaaccaatggcagaagccatgcgtggaagcagaatggatgtttgaagagcctcaggctaaatcatggagcgcccagccctcttctctttgatcgcaagggcaaccgggccatgttgccggcttagagctgctccgtacacccagaaagctaacacctagaacaataactgcctgtaagcatgccgaactctctaaactgatgatgaaatacgtcactaatgaagggaccagtggtcccaggggagctgaacacctgacgctgcgcccctaacaacgggtaagaagaaacaagggccgctgcgcaagcagcggcaggacacccggcgccaagggggcgcggcctggagcgccggggcacgaggccctgcttcaagctgagggcccggggagaagccggtacctctccacctcctgcagctcccgttcctccggctcccagtcggaatcggggtccggctcccggccaatagggcctgggcccgccaccccccgggtcgcgaacccacagcgagtgacggcggcgcaaacgcgcccgcccagcaagagactcagggtaaccgccatgtcgacgcaaaccagccttcagcagtcggctacgaaacagcagcggaagtagccgggacttgacgttcctgacgaagcaggagatcctcctgccaaccccttcaaggagcgaatctgcagggtcttctccacatccccagccaaagacagccttagctttgaggacttcctggatctcctcagtgtgttcagtgacacagccacgccagacatcaagtcccattatgccttccgcatctttgactttgatgatgacggaaccttgaacagagaagacctgagccggctggtgaactgcctcacgggagagggcgaggacacacggcttagtgcgtctgagatgaagcagctcatcgacaacatcctggaggagtctgacattgacagggatggaaccatcaacctctctgagttccagcacgtcatctcccgttctccagactttgccagctcctttaagattgtcctgtgacagcagccccagcgtgtgtcctggcaccctgtccaagaacctttctactgctgagctgtggccaaggtcaagcctgtgttgccagtgcgggccaagctggcccagcctggagctggcgctgtgcagcctcaccccgggcaggggcggccctcgttgtcagggcctctcctcactgctgttgtcattgctccgtttgtgtttgtactaatcagtaataaaggtttagaagtttga

SEQ ID NO: 292174 - DNA, 1112 bp, Homo sapiens
gcggggccgtgagtcccgggctccgccccggagcgtcgggcccctccccgggccccgcctccagctcgcctaggaccgcttggagccggcagctcgcctgccaaacccggctgggaacgcctggcagcttttaggagggggcgggcccgggggtggtggccccaggagcggttgccgcggggaccgggcagtgacgcggcccaagggcggaagtgagaaagttgtctgcgtctctcgaggcgagttggcggagctgtgcgcgcggcggggcgatggggggctcgggcagtcgcctgtccaaggagctgctggccgagtaccaggacttgacgttcctgacgaagcaggagatcctcctagcccacaggcggttttgtgagctgcttccccaggagcagcggagcgtggagtcgtcacttcgggcacaagtgcccttcgagcagattctcagccttccagagctcaaggccaaccccttcaaggagcgaatctgcagggtcttctccacatccccagccaaagacagccttagctttgaggacttcctggatctcctcagtgtgttcagtgacacagccacgccagacatcaagtcccattatgccttccgcatctttgactttgatgatgacggaaccttgaacagagaagacctgagccggctggtgaactgcctcacgggagagggcgaggacacacggcttagtgcgtctgagatgaagcagctcatcgacaacatcctggaggagtctgacattgacagggatggaaccatcaacctctctgagttccagcacgtcatctcccgttctccagactttgccagctcctttaagattgtcctgtgacagcagccccagcgtgtgtcctggcaccctgtccaagaacctttctactgctgagctgtggccaaggtcaagcctgtgttgccagtgcgggccaagctggcccagcctggagctggcgctgtgcagcctcaccccgggcaggggcggccctcgttgtcagggcctctcctcactgctgttgtcattgctccgtttgtgtttgtactaatcagtaataaaggtttagaagtttgaaacaaaaaacaacaaccaacactaaaaagg

SEQ ID NO: 292175 - DNA, 1124 bp, Homo sapiens
gcggggccgtgagtcccgggctccgccccggagcgtcgggcccctccccgggccccgcctccagctcgcctaggaccgcttggagccggcagctcgcctgccaaacccggctgggaacgcctggcagcttttaggagggggcgggcccgggggtggtggccccaggagcggttgccgcggggaccgggcagtgacgcggcccaagggcggaagtgagaaagttgtctgcgtctctcgaggcgagttggcggagctgtgcgcgcggcggggcgatggggggctcgggcagtcgcctgtccaaggagctgctggccgagtaccaggacttgacgttcctgacgaagcaggagatcctcctagcccacaggcggttttgtgagctgcttccccaggagcagcggagcgtggagtcgtcacttcgggcacaagtgcccttcgagcagattctcagccttccagagctcaaggccaaccccttcaaggagcgaatctgcagggtcttctccacatccccagccaaagacagccttagctttgaggacttcctggatctcctcagtgtgttcagtgacacagccacgccagacatcaagtcccattatgccttccgcatctttgactttgatgatgacggaaccttgaacagagaagacctgagccggctggtgaactgcctcacgggagagggcgaggacacacggcttagtgcgtctgagatgaagcagctcatcgacaacatcctggaggagtctgacattgacagggatggaaccatcaacctctctgagttccagcacgtcatctcccgttctccagactttgccagctcctttaagattgtcctgtgacagcagccccagcgtgtgtcctggcaccctgtccaagaacctttctactgctgagctgtggccaaggtcaagcctgtgttgccagtgcgggccaagctggcccagcctggagctggcgctgtgcagcctcaccccgggcaggggcggccctcgttgtcagggcctctcctcactgctgttgtcattgctccgtttgtgtttgtactaatcagtaataaaggtttagaagtttgaaacacaccacacaaaaaaaatcgggggactaaaacggggcga

SEQ ID NO: 292176 - DNA, 1362 bp, Homo sapiens
gcggggccgtgagtcccgggctccgccccggagcgtcgggcccctccccgggccccgcctccagctcgcctaggaccgcttggagccggcagctcgcctgccaaacccggctgggaacgcctggcagcttttaggagggggcgggcccgggggtggtggccccaggagcggttgccgcggggaccgggcagtgacgcggcccaagggcggaagtgagaaagttgtctgcgtctctcgaggcgagttggcggagctgtgcgcgcggcggggcgatggggggctcgggcagtcgcctgtccaaggagctgctggccgagtaccaggacttgacgttcctgacgaagcaggagatcctcctagcccacaggcggttttgtgagctgcttccccaggagcagcggagcgtggagtcgtcacttcgggcacaagtgcccttcgagcagattctcagccttccagagctcaaggccaaccccttcaaggagcgaatctgcagggtcttctccacatccccagccaaagacagccttagctttgaggacttcctggatctcctcagtgtgttcagtgacacagccacgccagacatcaagtcccattatgccttccgcatctttgactttgatgatgacggaaccttgaacagagaagacctgagccggctggtgaactgcctcacgggagagggcgaggacacacggcttagtgcgtctgagatgaagcagctcatcgacaacatcctggaggagtctgacattgacagggatggaaccatcaacctctctgagttccagcacgtcatctcccgttctccagactttgccagctcctttaagattgtcctgtgacagcagccccagcgtgtgtcctggcaccctgtccaagaacctttctactgctgagctgtggccaaggtcaagcctgtgttgccagtgcgggccaagctggcccagcctggagctggcgctgtgcagcctcaccccgggcaggggcggccctcgttgtcagggcctctcctcactgctgttgtcattgctccgtttgtgtttgtactaatcagtaataaaggtttagaagtttgagaccctatgtgtgacatgagatacactggtatgaggaaggactggacttctcttctaagagccttcaatcatcctaggaataagcagcatatcgagcagaggccagcgggaagtcaagccgcacccacgctggctgtccccgtgggagggtgtgaggatgaaggggcagcaggaggtgtgggactcgcctgtatcctgattggggtggtggttagatgagtctctgcatgcatcaaaatgtaaagaaccgtacatcagtaaagtctattttactgcatga

SEQ ID NO: 292177 - DNA, 1154 bp, Homo sapiens
gcggggccgtgagtcccgggctccgccccggagcgtcgggcccctccccgggccccgcctccagctcgcctaggaccgcttggagccggcagctcgcctgccaaacccggctgggaacgcctggcagcttttaggagggggcgggcccgggggtggtggccccaggagcggttgccgcggggaccgggcagtgacgcggcccaagggcggaagtgagaaagttgtctgcgtctctcgaggcgagttggcggagctgtgcgcgcggcggggcgatggggggctcgggcagtcgcctgtccaaggagctgctggccgagtaccaggacttgacgttcctgacgaagcaggagatcctcctagcccacaggcggttttgtgagctgcttccccaggagcagcggagcgtggagtcgtcacttcgggcacaagtgcccttcgagcagattctcagccttccagagctcaaggccaaccccttcaaggagcgaatctgcagggtcttctccacatccccagccaaagacagccttagctttgaggacttcctggatctcctcagtgtgttcagtgacacagccacgccagacatcaagtcccattatgccttccgcatctttgactttgatgatgacggaaccttgaacagagaagacctgagccggctggtgaactgcctcacgggagagggcgaggacacacggcttagtgcgtctgagatgaagcagctcatcgacaacgtgagcagctgagcaggcctgggagcgggagggagcagttggggctctggcctgaaactctccctttcccagatcctggaggagtctgacattgacagggatggaaccatcaacctctctgagttccagcacgtcatctcccgttctccagactttgccagctcctttaagattgtcctgtgacagcagccccagcgtgtgtcctggcaccctgtccaagaacctttctactgctgagctgtggccaaggtcaagcctgtgttgccagtgcgggccaagctggcccagcctggagctggcgctgtgcagcctcaccccgggcaggggcggccctcgttgtcagggcctctcctcactgctgttgtcattgctccgtttgtgtttgtactaatcagtaataaaggtttagaagtttga

SEQ ID NO: 292178 - DNA, 1032 bp, Homo sapiens
gcggggccgtgagtcccgggctccgccccggagcgtcgggcccctccccgggccccgcctccagctcgcctaggaccgcttggagccggcagctcgcctgccaaacccggctgggaacgcctggcagcttttaggagggggcgggcccgggggtggtggccccaggagcggttgccgcggggaccgggcagtgacgcggcccaagggcggaagtgagaaagttgtctgcgtctctcgaggcgagttggcggagctgtgcgcgcggcggggcgatggggggctcgggcagtcgcctgtccaaggagctgctggccgagtaccaggacttgacgttcctgacgaagcaggagatcctcctagcccacaggcggttttgtgagctgcttccccaggagcagcggagcgtggagtcgtcacttcgggcacaagtgcccttcgagcagattctcagccttccagagctcaaggccaaccccttcaaggagcgaatctgcagggtcttctccacatccccagccaaagacagccttagctttgaggacttcctggatctcctcagtgtgttcagtgacacagccacgccagacatcaagtcccattatgccttccgcatctttgactttgatgatgacggaaccttgaacagagaagacctgagccggctggtgaactgcctcacgggagagggcgaggacacacggcttagtgcgtctgagatgaagcagctcatcgacaacatcctggaggagtctgacattgacagggatggaaccatcaacctctctgagttccagcacgtcatctcccgttctccagactttgccagctcctttaagattgtcctgtgacagcagccccagcgtgtgtcctggcaccctgtccaagaacctttctatggcccagcctggagctggcgctgtgcagcctcaccccgggcaggggcggccctcgttgtcagggcctctcctcactgctgttgtcattgctccgtttgtgtttgtactaatcagtaataaaggtttagaagtttga

SEQ ID NO: 292179 - DNA, 1080 bp, Homo sapiens
cccacgcgtccgcggacgcgtgggtcgacccacgcgtccctcgaggcgagttggcggagctgtgcgcgcggcggggcgatggggggctcgggcagtcgcctgtccaaggagctgctggccgagtaccaggacttgacgttcctgacgaagcaggagatcctcctttctgtgtacgtggttttagctcctcacctggttgacaatgagcagcaggcaaggagtgggaatgaacacacagggagaccgatcgctgagaacaccgacagttcccctctctctaccagagcccacaggcggttttgtgagctgcttccccaggagcagcggagcgtggagtcgtcacttcgggcacaagtgcccttcgagcagattctcagccttccagagctcaaggccaaccccttcaaggagcgaatctgcagggtcttctccacatccccagccaaagacagccttagctttgaggacttcctggatctcctcagtgtgttcagtgacacagccacgccagacatcaagtcccattatgccttccgcatctttgactttgatgatgacggaaccttgaacagagaagacctgagccggctggtgaactgcctcacgggagagggcgaggacacacggcttagtgcgtctgagatgaagcagctcatcgacaacgtgagcagctgagcaggcctgggagcgggagggagcagttggggctctggcctgaaactctccctttcccagatcctggaggagtctgacattgacagggatggaaccatcaacctctctgagttccagcacgtcatctcccgttctccagactttgccagctcctttaagattgtcctgtgacagcagccccagcgtgtgtcctggcaccctgtccaagaacctttctactgctgagctgtggccaaggtcaagcctgtgttgccagtgcgggccaagctggcccagcctggagctggcgctgtgcagcctcaccccgggcaggggcggccctcgttgtcagggcctctcctcactgctgttgtcattgctccgtttgtgtttgtactaatcagtaataaaggtttagaagtttga

SEQ ID NO: 292180 - DNA, 771 bp, Homo sapiens
gcggggccgtgagtcccgggctccgccccggagcgtcgggcccctccccgggccccgcctccagctcgcctaggaccgcttggagccggcagctcgcctgccaaacccggctgggaacgcctggcagcttttaggagggggcgggcccgggggtggtggccccaggagcggttgccgcggggaccgggcagtgacgcggcccaagggcggaagtgagaaagttgtctgcgtctctcgaggcgagttggcggagctgtgcgcgcggcggggcgatggggggctcgggcagtcgcctgtccaaggagctgctggccgagtaccaggacttgacgttcctgacgaagcaggagatcctcctagcccacaggcggttttgtgagctgcttccccaggagcagcggagcgtggagtcgtcacttcgggcacaagtgcccttcgagcagattctcagccttccagagctcaaggccaaccccttcaaggagcgaatctgcagggtcttctccacatccccagccaaagacagccttagctttgaggacttcctggatctcctcagtgtgttcagtgacacagccacgccagacatcaagtcccattatgccttccgcatctttgactttgatgatgacggaaccttgaacagagaagacctgagccggctggtgaactgcctcacgggagagggcgaggacacacggcttagtgcgtctgagatgaagcagctcatcgacaactcgatttccagatttatggggatactcatagagc

SEQ ID NO: 292181 - DNA, 960 bp, Homo sapiens
gagctgttctagagtatcccaagatagccaagcagccgcccccggctaatttttgtatttttagtagagaaggggttcaccatgttgctcagactggtctcagacgcctgacctccaatgctccacccgccttggcctcccaaagtgctgggattacaggtgtgagccaccgtgcctggccaattctttagggccaacttctggctcctttcccaacttcttcatcccttggggatctctagaatcagtgccaagcacatagtaaatgctcagtaaatactcattgcaagaatagactcctaggctgtactgccttgtgacatgtccttttgcttactgttgcctgatgactcggaagttctgtgtacgtggttttagctcctcacctggttgacaatgagcagcaggcaaggagtgggaatgaacacacagggagaccgatcgctgagaacaccgacagttcccctctctctaccagagcccacaggcggttttgtgagctgcttccccaggagcagcggagcgtggagtcgtcacttcgggcacaagtgcccttcgagcagattctcagccttccagagctcaaggtgcaagcgcttcaccctcctttgacacatcctggaggagtctgacattgacagggatggaaccatcaacctctctgagttccagcacgtcatctcccgttctccagactttgccagctcctttaagattgtcctgtgacagcagccccagcgtgtgtcctggcaccctgtccaagaacctttctactgctgagctgtggccaaggtcaagcctgtgttgccagtgcgggccaagctggcccagcctggagctggcgctgtgcagcctcaccccgggcaggggcggccctcgttgtcagggcctctcctcactgctgttgtcattgctccgtttgtgtttgtactaatcagtaataaaggtttagaagtttga

SEQ ID NO: 292182 - DNA, 956 bp, Homo sapiens
cccacgcgtccgcggacgcgtgggtcgacccacgcgtccctcgaggcgagttggcggagctgtgcgcgcggcggggcgatggggggctcgggcagtcgcctgtccaaggagctgctggccgagtaccaggacttgacgttcctgacgaagcaggagatcctcctttctgtgtacgtggttttagctcctcacctggttgacaatgagcagcaggcaaggagtgggaatgaacacacagggagaccgatcgctgagaacaccgacagttcccctctctctaccagagcccacaggcggttttgtgagctgcttccccaggagcagcggagcgtggagtcgtcacttcgggcacaagtgcccttcgagcagattctcagccttccagagctcaaggccaaccccttcaaggagcgaatctgcagggtcttctccacatccccagccaaagacagccttagctttgaggacttcctggatctcctcagtgtgttcagtgacacagccacgccagacatcaagtcccattatgccttccgcatctttgactttgatgatgacggaaccttgaacagagaagacctgagccggctggtgaactgcctcacgggagagggcgaggacacacggcttagtgcgtctgagatgaagcagctcatcgacaacatcctggaggagtctgacattgacagggatggaaccatcaacctctctgagttccagcacgtcatctcccgttctccagactttgccagtccttaaagattggcgtgaagcagccaggtgtgtctggacctgttcaagaccttttagtgaggtgggcaggcagctgtggccaggggggcatggcactgagtggggggaggccacccgggggggcccgtgaagccccaccgggggagcgggggcaccacgaagggggggcaaaacacacaaggaaaaaaacagaaaaaacacag

SEQ ID NO: 292183 - DNA, 1437 bp, Homo sapiens
cgtatctgctccatggcttcccacgtcagggtcctgggcggggcaccaggcgcctccatttgcctccgaattttctggaatcggattgcttgtttctgtcgtttcagggtgctgggggaagagaaccaatggcagaagccatgcgtggaagcagaatggatgtttgaagagcctcaggctaaatcatggagcgcccagccctcttctctttgatcgcaagggcaaccgggccatgttgccggcttagagctgctccgtacacccagaaagctaacacctagaacaataactgcctgtaagcatgccgaactctctaaactgatgatgaaatacgtcactaatgaagggaccagtggtcccaggggagctgaacacctgacgctgcgcccctaacaacgggtaagaagaaacaagggccgctgcgcaagcagcggcaggacacccggcgccaagggggcgcggcctggagcgccggggcacgaggccctgcttcaagctgagggcccggggagaagccggtacctctccacctcctgcagctcccgttcctccggctcccagtcggaatcggggtccggctcccggccaatagggcctgggcccgccaccccccgggtcgcgaacccacagcgagtgacggcggcgcaaacgcgcccgcccagcaagagactcagggtaaccgccatgtcgacgcaaaccagccttcagcagtcggctacgaaacagcagcggaagtagccgggacttgacgttcctgacgaagcaggagatcctcctttctgtgtacgtggttttagctcctcacctggttgacaatgagcagcaggcaaggagtgggaatgaacacacagggagaccgatcgctgagaacaccgacagttcccctctctctaccagagcccacaggcggttttgtgagctgcttccccaggagcagcggagcgtggagtcgtcacttcgggcacaagtgcccttcgagcagattctcagccttccagagctcaaggtgcaagcgcttcaccctcctttgacacctctcccaccactccctccctgctagaccccctaactccatctgccactagctttgggatcatggggtcactggtccccactctggtcatttttctgcttagttctgattttctaggggcaaggactttaccaaaatcacctggcagaattatctagaatggtgcttttcaaatggggattctagaacataatcttggaagttcacaagaagttttgtcccttaagaggagttgaggtacctcattagagtttgaggaaccgtgttctagaggctgattgccactccgtaaggctgctgccaaatttctgtgcaaagggcctggcccggtgcctgtaacacaatagctgttcaagtaaatatttgtgttttaaaataaccagcccatctcgttccctttgttt

SEQ ID NO: 292184 - DNA, 1018 bp, Homo sapiens
gagctgttctagagtatcccaagatagccaagcagccgcccccggctaatttttgtatttttagtagagaaggggttcaccatgttgctcagactggtctcagacgcctgacctccaatgctccacccgccttggcctcccaaagtgctgggattacaggtgtgagccaccgtgcctggccaattctttagggccaacttctggctcctttcccaacttcttcatcccttggggatctctagaatcagtgccaagcacatagtaaatgctcagtaaatactcattgcaagaatagactcctaggctgtactgccttgtgacatgtccttttgcttactgttgcctgatgactcggaagttctgtgtacgtggttttagctcctcacctggttgacaatgagcagcaggcaaggagtgggaatgaacacacagggagaccgatcgctgagaacaccgacagttcccctctctctaccagagcccacaggcggttttgtgagctgcttccccaggagcagcggagcgtggagtcgtcacttcgggcacaagtgcccttcgagcagattctcagccttccagagctcaaggtgcaagcgcttcaccctcctttgacacctctcccaccactccctccctgctagaccccctaactccatctgccactagctttgggatcatggggtcactggtccccactctggtcatttttctgcttagttctgattttctaggggcaaggactttaccaaaatcacctggcagaattatctagaatggtgcttttcaaatggggattctagaacataatcttggaagttcacaagaagttttgtcccttaagaggagttgaggtacctcattagagtttgaggaaccgtgttctagaggctgattgccactccgtaaggctgctgccaaatttctgtgcaaagggcctggcccggtgcctgtaacacaatagctgttcaagtaaatatttgtgttttaaaataaccagcccatctcgttccctttgttt

SEQ ID NO: 292185 - DNA, 927 bp, Homo sapiens
gagctgttctagagtatcccaagatagccaagcagccgcccccggctaatttttgtatttttagtagagaaggggttcaccatgttgctcagactggtctcagacgcctgacctccaatgctccacccgccttggcctcccaaagtgctgggattacaggtgtgagccaccgtgcctggccaattctttagggccaacttctggctcctttcccaacttcttcatcccttggggatctctagaatcagtgccaagcacatagtaaatgctcagtaaatactcattgcaagaatagactcctaggctgtactgccttgtgacatgtccttttgcttactgttgcctgatgactcggaagttctgtgtacgtggttttagctcctcacctggttgacaatgagcagcaggcaaggagtgggaatgaacacacagggagaccgatcgctgagaacaccgacagttcccctctctctaccagagcccacaggcggttttgtgagctgcttccccaggagcagcggagcgtggagtcgtcacttcgggcacaagtgcccttcgagcagattctcagccttccagagctcaaggtgcaagcgcttcaccctcctttgacacatcctggaggagtctgacattgacagggatggaaccatcaacctctctgagttccagcacgtcatctcccgttctccagactttgccagctcctttaagattgtcctgtgacagcagccccagcgtgtgtcctggcaccctgtccaagaacctttctactgctgagctgtggccaaggtcaagcctgtgttgccagtgcgggccaagctggcccagcctggagctggcgctgtgcagcctcaccccgggcaggggcggccccctgagaagggcccacaaagggagggaaggcacgtgggttgctatctcgtc

SEQ ID NO: 292186 - DNA, 368 bp, Homo sapiens
cccctccccgggccccgcctccagctcgcctaggaccgcttggagccggcagctcgcctgccaaacccggctgggaacgcctggcagcttttaggagggggcgggcccgggggtggtggccccaggagcggttgccgcggggaccgggcagtgacgcggcccaagggcggaagtgagaaagttgtctgcgtctctcgaggcgagttggcggagctgtgcgcgcggcggggcgatggggggctcgggcagtcgcctgtccaaggagctgctggccgagtaccaggtgcgcgggacgcctggccctggggagctcgcgtgcgggcctcttctcgggagcagggtccgggagctggctgcggggcggccgc

SEQ ID NO: 292187 - DNA, 3542 bp, Homo sapiens
cctggctttgtgcattgggttctggtgcctgactggacacatttttccagttacaggccgaatggtctcaatgtagctgaagaactgtgcccactgatcagtattacgtattgcaaatgcaggaggtggctgtatctgacagacccaggccttccagctccgacagatccagttctgggatgggcatcctccagaaaagaaaggaactgtactggctactcacagggtccctcatagcttcctagaaagaaaccacttgtcagtcttcatgctacagcaacttctttgtggcccatggcctttccttgcttagatactccacataccgttctccccgacagggtgcggcggccttgaggggctgcagaggcaccctcccacgtcccgcgcagtgcagtgcctccgcaagtccagaggggagcagtgcgcccggcatccgagccggacaggagttacgtaatcgcgtcagccgacgcattacgacactcagacggccccacctctgccggctcgtactcggctcccccacctcgccgcagagctagcccgggaagcccacactggcggccacggagcagagtccctcacccccaccagctgtagctgaacgtctggatggtggagaagagcagggttccgagtctgaggaagacataaccttgtgcctgcctgcccacctctctctctggtcctgttcatctctcaggctctgagacactgaccttcactgctcagttaaaggttccagggattccactttgtctggacccatccagctgagtgaacccagggtggtggtgtatctggggagagtgaggagtgggttgtccaaacaccagggaaagagccctttggggcctcagacagaggagtgaagctggaaccatcagggaacatgagtgaattttggcacaaactgggctgctgtgtggtagagaaaccccagccgaagaagaagagaagacggattgaccggaccatgattggggaaccaatgaattttgttcacctgactcacattggctcaggggagatgggggccggagatggacttgccatgacaggtgcagttcaggagcagatgagatccaagggaaaccgagataggccatggagcaattctaggggcttatagctccaataatggaatggttctgccatcttgaaacccccattctgtttccagcccagaagaaatgctgcccctaccagatccctccttgaaccagtgatctaaggacccctcttttccctatctgcctaacagtgcctcacaaggcttgggggctggactccctctactccctctggccatagcccctcctggagatggggtcaaggcagcaggactgatcaagtgactactggttagccagaggagctcagctgaagccctggaaaccctcaggtctgagataggagttctctaggaacctggaatgagttcctgtctcctgaatgatggtctgggtgccacctgtttttaaactcttaaacctggaactccttaaatggggtaggtgggtgagattatcaaagctgaagctggctttgctgagaagctccctacctccctgcccttctcctccttcctgctggaatgaactaaagcagatgtcaagcaggggctggtgggggtgcctactcccttttccactctatctttagatttcaaaccttaggcttacagcccctcaatatctctctgctaacaccagtgtctctttctagttaggcctctaatcttctgtttctgtttaccagcttcccagcaactttccttttttaaaatattaaaaatttaattcaggttctcttaattatcctcatcctgctgttgcctccgcccttaactctatccctattaggaaccttgtttcccaccgaataagagttaaggtaagaggtagctcttcacctgatgacattccatttaagttttggggcatctttcctgccctctgccaacctccctgctggcccaggtgagaggaggaagaggggtctggaaagaaacccagaatgcggcagaactaggagtaagtccatctcaaggtggacttctgatcattgaggatggtgagataaataggttgaaaacaatcatctgtgagtttaggagtcttaagatcctcacagcacgggagcagggagaggctctagaacaaggtttcacaaccgagatgcctttgacattttgggctgaagtgttctttgtaaggaaaacctgtttcctattttgtgcattacaggatatttagcagcacccctggcccactctagttatgacaaccaaaaatgtctctatacattgccagatttctcctagggggcaaaatcgcctccatttgagactacaactctgagttccgtagggggcaaaatcgcctccatttgagaaccacaactctaaagtcaagatatttttctctgaagtgatttctgcttggcacgctaccctcatcatcttactcatcttaagcccgagccatggatcaactaggagcccatataaatgaggctcagtagggctgcacataatctccaaacaattctttattcagtgttttgcttgtgtttgcatgttgctatgatggacaggtccccctcctccattcttgccctctggagaagtggttcctgcagtgtagagatatgaacagggtatggtaggattggggaaaggggagagagaagcagtagatacactccttatcctccccaaattttaagctctatttctgtgccctagtcctagacacacattagactcagggagttttgtctgaagaccaggtcccactgccccctggctgaagagtctgctttaaatgggaaaacaacgtaggagcaggggtttttaggcactttcagtattctcaggtgttcttcgttctggcccttccagggtaattaggaaggcagaacaagacagatgagctcctgcctgctctgagacaagaagggtggggtctcattagctttgcaacaggaaacatcctgttttatggtagtggggtcaggaatgtaggaactggtatccattctgccaattccaccacccattcagtttgcttatccctacagaacagtgactgaggttcctttttttttttttttttttttttttttcaaatttccatgtattttctgccatttttcagggtctaagattggtcatacattcccaatttactctcagttccagtcaagctggttgctctgaaagtaacccagcttgttgctctaaaatacctcagtagcctgagtgttatactagagatctaaagggttaacaggatagggtggaaaggttagagactcctagaaatctctggtcaccgtgatcttcggcctcattctaatacctgttctttggacagtctttttcctttggtgctctcttgcctttagctaccttctctaatatgtatgctaccatcactaataaagtgatgggaatgggtttgagagtcgtaatttatattaaaaagttgttggacttttaaatacattttttcaaataaaaaattaagcaaaat

SEQ ID NO: 292188 - DNA, 1820 bp, Homo sapiens
cctggctttgtgcattgggttctggtgcctgactggacacatttttccagttacaggccgaatggtctcaatgtagctgaagaactgtgcccactgatcagtattacgtattgcaaatgcaggaggtggctgtatctgacagacccaggccttccagctccgacagatccagttctgggatgggcatcctccagaaaagaaaggaactgtactggctactcacagggtccctcatagcttcctagaaagaaaccacttgtcagtcttcatgctacagcaacttctttgtggcccatggcctttccttgcttagatactccacataccgttctccccgacagggtgcggcggccttgaggggctgcagaggcaccctcccacgtcccgcgcagtgcagtgcctccgcaagtccagaggggagcagtgcgcccggcatccgagccggacaggagttacgtaatcgcgtcagccgacgcattacgacactcagacggccccacctctgccggctcgtactcggctcccccacctcgccgcagagctagcccgggaagcccacactggcggccacggagcagagtccctcacccccaccagctgtagctgaacgtctggatggtggagaagagcagggttccgagtctgaggaagacataaccttgtgcctgcctgcccacctctctctctggtcctgttcatctctcaggctctgagacactgaccttcactgctcagttaaaggttccagggattccactttgtctggacccatccagctgagtgaacccagggtggtggtgtatctggggagagtgaggagtgggttgtccaaacaccagggaaagagccctttggggcctcagacagaggagtgaagctggaaccatcagggaacatgagtgaattttggcacaaactgggctgctgtgtggtagagaaaccccagccgaagaagaagagaagacggattgaccggaccatgattggggaaccaatgaattttgttcacctgactcacattggctcaggggagatgggggccggagatggacttgccatgacaggtgcagttcaggagcagatgagatccaagggaaaccgagataggccatggagcaattctaggggcttatagctccaataatggaatggttctgccatcttgaaacccccattctgtttccagcccagaagaaatgctgcccctaccagatccctccttgaaccagtgatctaaggacccctcttttccctatctgcctaacagtgcctcacaaggcttgggggctggactccctctactccctctggccatagcccctcctggagatggggtcaaggcagcaggactgatcaagtgactactggttagccagaggagctcagctgaagccctggaaaccctcaggtctgagataggagttctctaggaacctggaatgagttcctgtctcctgaatgatggtctgggtgccacctgtttttaaactcttaaacctggaactccttaaatggggtaggtgggtgagattatcaaagctgaagctggctttgctgagaagctccctacctccctgcccttctcctccttcctgctggaatgaactaaagcagatgtcaagcaggggctggtgggggtgcctactcccttttccactctatctttagatttcaaaccttaggcttacagcccctcaatatctctctgctaacaccagtgtctctttctagttaggcctctaatcttctgtttctgtttaccagcttcccagcaactttccttttttaaaatattaaaaatttaattcaggttctcttaa

SEQ ID NO: 292189 - DNA, 3761 bp, Homo sapiens
cctggctttgtgcattgggttctggtgcctgactggacacatttttccagttacaggccgaatggtctcaatgtagctgaagaactgtgcccactgatcagtattacgtattgcaaatgcaggaggtggctgtatctgacagacccaggccttccagctccgacagatccagttctgggatgggcatcctccagaaaagaaaggaactgtactggctactcacagggtccctcatagcttcctagaaagaaaccacttgtcagtcttcatgctacagcaacttctttgtggcccatggcctttccttgcttagatactccacataccgttctccccgacagggtgcggcggccttgaggggctgcagaggcaccctcccacgtcccgcgcagtgcagtgcctccgcaagtccagaggggagcagtgcgcccggcatccgagccggacaggagttacgtaatcgcgtcagccgacgcattacgacactcagacggccccacctctgccggctcgtactcggctcccccacctcgccgcagagctagcccgggaagcccacactggcggccacggagcagagtccctcacccccaccagctgtagctgaacgtctggatggtggagaagagcagggttccgagtctgaggaagacataaccttgtgcctgcctgcccacctctctctctggtcctgttcatctctcaggctctgagacactgaccttcactgctcagttaaaggttccagggattccactttgtctggacccatccagctgagtgaacccagggtggtggtgtatctggggagagtgaggagtgggttgtccaaacaccagggaaagagccctttggggcctcagacagaggagtgaagctggaaccatcagggaacatgagtgaattttggcacaaactgggctgctgtgtggtagagaaaccccagccggtgagtctccccaccccccatcctaacccaaagagcagtcagttactgtgtgctgtgaggtagccacaccatctaggatctgccatctaaaaaagcacacttcttgcctccctctgtgtcaggagcttctatggtcaggcagctgtatatgtggaacaaaggggactgggtgatggaagaagtgaatagtcctagctattacctcctgttcctgtccattctgagctgggtggggtttgtaggtggagctgcatacctgtcagttttccccattatttcatcatcagtcagaggtgactttgacatgtcctttctttgtccagtgttcactctgcaggccactgccctcactactctggttcatgtcttctgtgtgcttttgttgttccagctttgcctttcatgccctagtgatttccctgttaaaatgccacatcccctcttcccaccaggcccttagcttttcagtggttttgaagactcttttcccttcctccgtgctgactgggaggaggccttaagacatgactccttatcttctccaagcagaagaagaagagaagacggattgaccggaccatgattggggaaccaatgaattttgttcacctgactcacattggctcaggggagatgggggccggagatggacttgccatgacaggtgcagttcaggagcagatgagatccaagggaaaccgagataggccatggagcaattctaggggcttatagctccaataatggaatggttctgccatcttgaaacccccattctgtttccagcccagaagaaatgctgcccctaccagatccctccttgaaccagtgatctaaggacccctcttttccctatctgcctaacagtgcctcacaaggcttgggggctggactccctctactccctctggccatagcccctcctggagatggggtcaaggcagcaggactgatcaagtgactactggttagccagaggagctcagctgaagccctggaaaccctcaggtctgagataggagttctctaggaacctggaatgagttcctgtctcctgaatgatggtctgggtgccacctgtttttaaactcttaaacctggaactccttaaatggggtaggtgggtgagattatcaaagctgaagctggctttgctgagaagctccctacctccctgcccttctcctccttcctgctggaatgaactaaagcagatgtcaagcaggggctggtgggggtgcctactcccttttccactctatctttagatttcaaaccttaggcttacagcccctcaatatctctctgctaacaccagtgtctctttctagttaggcctctaatcttctgtttctgtttaccagcttcccagcaactttccttttttaaaatattaaaaatttaattcaggttctcttaattatcctcatcctgctgttgcctccgcccttaactctatccctattaggaaccttgtttcccaccgaataagagttaaggtaagaggtagctcttcacctgatgacattccatttaagttttggggcatctttcctgccctctgccaacctccctgctggcccaggtgagaggaggaagaggggtctggaaagaaacccagaatgcggcagaactaggagtaagtccatctcaaggtggacttctgatcattgaggatggtgagataaataggttgaaaacaatcatctgtgagtttaggagtcttaagatcctcacagcacgggagcagggagaggctctagaacaaggtttcacaaccgagatgcctttgacattttgggctgaagtgttctttgtaaggaaaacctgtttcctattttgtgcattacaggatatttagcagcacccctggcccactctagttatgacaaccaaaaatgtctctatacattgccagatttctcctagggggcaaaatcgcctccatttgagaaccacaactctaaagtcaagatatttttctctgaagtgatttctgcttggcacgctaccctcatcatcttactcatcttaagcccgagccatggatcaactaggagcccatataaatgaggctcagtagggctgcacataatctccaaacaattctttattcagtgttttgcttgtgtttgcatgttgctatgatggacaggtccccctcctccattcttgccctctggagaagtggttcctgcagtgtagagatatgaacagggtatggtaggattggggaaaggggagagagaagcagtagatacactccttatcctccccaaattttaagctctatttctgtgccctagtcctagacacacattagactcagggagttttgtctgaagaccaggtcccactgccccctggctgaagagtctgctttaaatgggaaaacaacgtaggagcaggggtttttaggcactttcagtattctcaggtgttcttcgttctggcccttccagggtaattaggaaggcagaacaagacagatgagctcctgcctgctctgagacaagaagggtggggtctcattagctttgcaacaggaaacatcctgttttatggtagtggggtcaggaatgtaggaactggtatccattctgccaattccaccacccattcagtttgcttatccctatcctgttaaccctttagatctctagtataacactcaggctactgaggtattttagagcaacaagctgggttactttcagagcaaccagcttgactggaactgagagtaaattgggaatgtatgaccaatcttagaccctgaaaaatggcagaaaatacatggaaatttgaaaaa

SEQ ID NO: 292190 - DNA, 1951 bp, Homo sapiens
cctggctttgtgcattgggttctggtgcctgactggacacatttttccagttacaggccgaatggtctcaatgtagctgaagaactgtgcccactgatcagtattacgtattgcaaatgcaggaggtggctgtatctgacagacccaggccttccagctccgacagatccagttctgggatgggcatcctccagaaaagaaaggaactgtactggctactcacagggtccctcatagcttcctagaaagaaaccacttgtcagtcttcatgctacagcaacttctttgtggcccatggcctttccttgcttagatactccacataccgttctccccgacagggtgcggcggccttgaggggctgcagaggcaccctcccacgtcccgcgcagtgcagtgcctccgcaagtccagaggggagcagtgcgcccggcatccgagccggacaggagttacgtaatcgcgtcagccgacgcattacgacactcagacggccccacctctgccggctcgtactcggctcccccacctcgccgcagagctagcccgggaagcccacactggcggccacggagcagagtccctcacccccaccagctgtagctgaacgtctggatggtggagaagagcagatgatctgtactggacacacgtggagatatggccatgccacgcatgtgcaaacagaggtgtacacacaggagtgcagtgatacaggacacagataaacagaatgtacacagccttcaggaaggatctcaagggttccgagtctgaggaagacataaccttgtgcctgcctgcccacctctctctctggtcctgttcatctctcaggctctgagacactgaccttcactgctcagttaaaggttccagggattccactttgtctggacccatccagctgagtgaacccagggtggtggtgtatctggggagagtgaggagtgggttgtccaaacaccagggaaagagccctttggggcctcagacagaggagtgaagctggaaccatcagggaacatgagtgaattttggcacaaactgggctgctgtgtggtagagaaaccccagccgaagaagaagagaagacggattgaccggaccatgattggggaaccaatgaattttgttcacctgactcacattggctcaggggagatgggggccggagatggacttgccatgacaggtgcagttcaggagcagatgagatccaagggaaaccgagataggccatggagcaattctaggggcttatagctccaataatggaatggttctgccatcttgaaacccccattctgtttccagcccagaagaaatgctgcccctaccagatccctccttgaaccagtgatctaaggacccctcttttccctatctgcctaacagtgcctcacaaggcttgggggctggactccctctactccctctggccatagcccctcctggagatggggtcaaggcagcaggactgatcaagtgactactggttagccagaggagctcagctgaagccctggaaaccctcaggtctgagataggagttctctaggaacctggaatgagttcctgtctcctgaatgatggtctgggtgccacctgtttttaaactcttaaacctggaactccttaaatggggtaggtgggtgagattatcaaagctgaagctggctttgctgagaagctccctacctccctgcccttctcctccttcctgctggaatgaactaaagcagatgtcaagcaggggctggtgggggtgcctactcccttttccactctatctttagatttcaaaccttaggcttacagcccctcaatatctctctgctaacaccagtgtctctttctagttaggcctctaatcttctgtttctgtttaccagcttcccagcaactttccttttttaaaatattaaaaatttaattcaggttctcttaa

SEQ ID NO: 292191 - DNA, 1490 bp, Homo sapiens
tgctaatttctgccactatccttggtcctcgcccatcctcttaactctaagtgcttctagcccccttcctctcccttggtaccaccagccactgctccttaaccccttggtgtccttttggttctgttccttttttttagagtcaaactgaggttcatagtgtttgggaatgagtgttggtgtacaggtctagggcctctcagggaggactgggaagatataggctcatcaggaggtttctcaaggattgggggagggggagatttctcactgatctttctttttactttcttctaatccagggttccgagtctgaggaagacataaccttgtgcctgcctgcccacctctctctctggtcctgttcatctctcaggctctgagacactgaccttcactgctcagttaaaggttccagggattccactttgtctggacccatccagctgagtgaacccagggtggtggtgtatctggggagagtgaggagtgggttgtccaaacaccagggaaagagccctttggggcctcagacagaggagtgaagctggaaccatcagggaacatgagtgaattttggcacaaactgggctgctgtgtggtagagaaaccccagccgaagaagaagagaagacggattgaccggaccatgattggggaaccaatgaattttgttcacctgactcacattggctcaggggagatgggggccggagatggacttgccatgacaggtgcagttcaggagcagatgagatccaagggaaaccgagataggccatggagcaattctaggggcttatagctccaataatggaatggttctgccatcttgaaacccccattctgtttccagcccagaagaaatgctgcccctaccagatccctccttgaaccagtgatctaaggacccctcttttccctatctgcctaacagtgcctcacaaggcttgggggctggactccctctactccctctggccatagcccctcctggagatggggtcaaggcagcaggactgatcaagtgactactggttagccagaggagctcagctgaagccctggaaaccctcaggtctgagataggagttctctaggaacctggaatgagttcctgtctcctgaatgatggtctgggtgccacctgtttttaaactcttaaacctggaactccttaaatggggtaggtgggtgagattatcaaagctgaagctggctttgctgagaagctccctacctccctgcccttctcctccttcctgctggaatgaactaaagcagatgtcaagcaggggctggtgggggtgcctactcccttttccactctatctttagatttcaaaccttaggcttacagcccctcaatatctctctgctaacaccagtgtctctttctagttaggcctctaatcttctgtttctgtttaccagcttcccagcaactttccttttttaaaatattaaaaatttaattcaggttctcttaa

SEQ ID NO: 292192 - DNA, 2039 bp, Homo sapiens
tgctaatttctgccactatccttggtcctcgcccatcctcttaactctaagtgcttctagcccccttcctctcccttggtaccaccagccactgctccttaaccccttggtgtccttttggttctgttccttttttttagagtcaaactgaggttcatagtgtttgggaatgagtgttggtgtacaggtctagggcctctcagggaggactgggaagatataggctcatcaggaggtttctcaaggattgggggagggggagatttctcactgatctttctttttactttcttctaatccagggttccgagtctgaggaagacataaccttgtgcctgcctgcccacctctctctctggtcctgttcatctctcaggctctgagacactgaccttcactgctcagttaaaggttccagggattccactttgtctggacccatccagctgagtgaacccagggtggtggtgtatctggggagagtgaggagtgggttgtccaaacaccagggaaagagccctttggggcctcagacagaggagtgaagctggaaccatcagggaacatgagtgaattttggcacaaactgggctgctgtgtggtagagaaaccccagccggtgagtctccccaccccccatcctaacccaaagagcagtcagttactgtgtgctgtgaggtagccacaccatctaggatctgccatctaaaaaagcacacttcttgcctccctctgtgtcaggagcttctatggtcaggcagctgtatatgtggaacaaaggggactgggtgatggaagaagtgaatagtcctagctattacctcctgttcctgtccattctgagctgggtggggtttgtaggtggagctgcatacctgtcagttttccccattatttcatcatcagtcagaggtgactttgacatgtcctttctttgtccagtgttcactctgcaggccactgccctcactactctggttcatgtcttctgtgtgcttttgttgttccagctttgcctttcatgccctagtgatttccctgttaaaatgccacatcccctcttcccaccaggcccttagcttttcagtggttttgaagactcttttcccttcctccgtgctgactgggaggaggccttaagacatgactccttatcttctccaagcagaagaagaagagaagacggattgaccggaccatgattggggaaccaatgaattttgttcacctgactcacattggctcaggggagatgggggccggagatggacttgccatgacaggtgcagttcaggagcagatgagatccaagggaaaccgagataggccatggagcaattctaggggcttatagctccaataatggaatggttctgccatcttgaaacccccattctgtttccagcccagaagaaatgctgcccctaccagatccctccttgaaccagtgatctaaggacccctcttttccctatctgcctaacagtgcctcacaaggcttgggggctggactccctctactccctctggccatagcccctcctggagatggggtcaaggcagcaggactgatcaagtgactactggttagccagaggagctcagctgaagccctggaaaccctcaggtctgagataggagttctctaggaacctggaatgagttcctgtctcctgaatgatggtctgggtgccacctgtttttaaactcttaaacctggaactccttaaatggggtaggtgggtgagattatcaaagctgaagctggctttgctgagaagctccctacctccctgcccttctcctccttcctgctggaatgaactaaagcagatgtcaagcaggggctggtgggggtgcctactcccttttccactctatctttagatttcaaaccttaggcttacagcccctcaatatctctctgctaacaccagtgtctctttctagttaggcctctaatcttctgtttctgtttaccagcttcccagcaactttccttttttaaaatattaaaaatttaattcaggttctcttaa

SEQ ID NO: 292193 - DNA, 1801 bp, Homo sapiens
acacttagaggatccccagagtacgatatgtacacagccttcaggagtggatctcaaggtctcgggttccgagtctgaggaagacataaccttgtgcctgcctgcccacctctctctctggtcctgttcatctctcaggctctgagacactgaccttcactgctcagttaaaggttccagggattccactttgtctggacccatccagctgagtgaacccagggtggtggtgtatctggggagagtgaggagtgggttgtccaaacaccagggaaagagccctttggggcctcagacagaggagtgaagctggaaccatcagggaacatgagtgaattttggcacaaactgggctgctgtgtggtagagaaaccccagccggtgagtctccccaccccccatcctaacccaaagagcagtcagttactgtgtgctgtgaggtagccacaccatctaggatctgccatctaaaaaagcacacttcttgcctccctctgtgtcaggagcttctatggtcaggcagctgtatatgtggaacaaaggggactgggtgatggaagaagtgaatagtcctagctattacctcctgttcctgtccattctgagctgggtggggtttgtaggtggagctgcatacctgtcagttttccccattatttcatcatcagtcagaggtgactttgacatgtcctttctttgtccagtgttcactctgcaggccactgccctcactactctggttcatgtcttctgtgtgcttttgttgttccagctttgcctttcatgccctagtgatttccctgttaaaatgccacatcccctcttcccaccaggcccttagcttttcagtggttttgaagactcttttcccttcctccgtgctgactgggaggaggccttaagacatgactccttatcttctccaagcagaagaagaagagaagacggattgaccggaccatgattggggaaccaatgaattttgttcacctgactcacattggctcaggggagatgggggccggagatggacttgccatgacaggtgcagttcaggagcagatgagatccaagggaaaccgagataggccatggagcaattctaggggcttatagctccaataatggaatggttctgccatcttgaaacccccattctgtttccagcccagaagaaatgctgcccctaccagatccctccttgaaccagtgatctaaggacccctcttttccctatctgcctaacagtgcctcacaaggcttgggggctggactccctctactccctctggccatagcccctcctggagatggggtcaaggcagcaggactgatcaagtgactactggttagccagaggagctcagctgaagccctggaaaccctcaggtctgagataggagttctctaggaacctggaatgagttcctgtctcctgaatgatggtctgggtgccacctgtttttaaactcttaaacctggaactccttaaatggggtaggtgggtgagattatcaaagctgaagctggctttgctgagaagctccctacctccctgcccttctcctccttcctgctggaatgaactaaagcagatgtcaagcaggggctggtgggggtgcctactcccttttccactctatctttagatttcaaaccttaggcttacagcccctcaatatctctctgctaacaccagtgtctctttctagttaggcctctaatcttctgtttctgtttaccagcttcccagcaactttccttttttaaaatattaaaaatttaattcaggttctcttaa

SEQ ID NO: 292194 - DNA, 1777 bp, Homo sapiens
cctggctttgtgcattgggttctggtgcctgactggacacatttttccagttacaggccgaatggtctcaatgtagctgaagaactgtgcccactgatcagtattacgtattgcaaatgcaggaggtggctgtatctgacagacccaggccttccagctccgacagatccagttctgggatgggcatcctccagaaaagaaaggaactgtactggctactcacagggtccctcatagcttcctagaaagaaaccacttgtcagtcttcatgctacagcaacttctttgtggcccatggcctttccttgcttagatactccacataccgttctccccgacagggtgcggcggccttgaggggctgcagaggcaccctcccacgtcccgcgcagtgcagtgcctccgcaagtccagaggggagcagtgcgcccggcatccgagccggacaggagttacgtaatcgcgtcagccgacgcattacgacactcagacggccccacctctgccggctcgtactcggctcccccacctcgccgcagagctagcccgggaagcccacactggcggccacggagcagagtccctcacccccaccagctgtagctgaacgtctggatggtggagaagagcagatgatctgtactggacacacgtggagatatggccatgccacgcatgtgcaaacagaggtgtacacacaggagtgcagtgatacaggacacagataaacagaatgtacacagccttcaggaaggatctcaagggttccgagtctgaggaagacataaccttgtgcctgcctgcccacctctctctctggtcctgttcatctctcaggctctgagacactgaccttcactgctcagttaaaggttccagggattccactttgtctggacccatccaaagaagaagagaagacggattgaccggaccatgattggggaaccaatgaattttgttcacctgactcacattggctcaggggagatgggggccggagatggacttgccatgacaggtgcagttcaggagcagatgagatccaagggaaaccgagataggccatggagcaattctaggggcttatagctccaataatggaatggttctgccatcttgaaacccccattctgtttccagcccagaagaaatgctgcccctaccagatccctccttgaaccagtgatctaaggacccctcttttccctatctgcctaacagtgcctcacaaggcttgggggctggactccctctactccctctggccatagcccctcctggagatggggtcaaggcagcaggactgatcaagtgactactggttagccagaggagctcagctgaagccctggaaaccctcaggtctgagataggagttctctaggaacctggaatgagttcctgtctcctgaatgatggtctgggtgccacctgtttttaaactcttaaacctggaactccttaaatggggtaggtgggtgagattatcaaagctgaagctggctttgctgagaagctccctacctccctgcccttctcctccttcctgctggaatgaactaaagcagatgtcaagcaggggctggtgggggtgcctactcccttttccactctatctttagatttcaaaccttaggcttacagcccctcaatatctctctgctaacaccagtgtctctttctagttaggcctctaatcttctgtttctgtttaccagcttcccagcaactttccttttttaaaatattaaaaatttaattcaggttctcttaa

SEQ ID NO: 292195 - DNA, 1997 bp, Homo sapiens
cctggctttgtgcattgggttctggtgcctgactggacacatttttccagttacaggccgaatggtctcaatgtagctgaagaactgtgcccactgatcagtattacgtattgcaaatgcaggaggtggctgtatctgacagacccaggccttccagctccgacagatccagttctgggatgggcatcctccagaaaagaaaggaactgtactggctactcacagggtccctcatagcttcctagaaagaaaccacttgtcagtcttcatgctacagcaacttctttgtggcccatggcctttccttgcttagatactccacataccgttctccccgacagggtgcggcggccttgaggggctgcagaggcaccctcccacgtcccgcgcagtgcagtgcctccgcaagtccagaggggagcagtgcgcccggcatccgagccggacaggagttacgtaatcgcgtcagccgacgcattacgacactcagacggccccacctctgccggctcgtactcggctcccccacctcgccgcagagctagcccgggaagcccacactggcggccacggagcagagtccctcacccccaccagctgtagctgaacgtctggatggtggagaagagcagggttccgagtctgaggaagacataaccttgtgcctgcctgcccacctctctctctggtcctgttcatctctcaggctctgagacactgaccttcactgctcagttaaaggttccagggattccactttgtctggacccatccagctgagtgaacccagggtggtggtgtatctggggagagtgaggagtgggttgtccaaacaccagggaaagagccctttggggcctcagacagaggagtgaagctggaaccatcagggaacatgagtgaattttggcacaaactgggctgctgtgtggtagagaaaccccagccgaagaagaagagaagacggattgaccggaccatgattggggaaccaatgaattttgttcacctgactcacattggctcaggggagatgggggccggagatggacttgccatgacaggtgcagttcaggagcagatgagatccaagggaaaccgagataggccatggagcaattctaggggcttatagctccaataatggaatggttctgccatcttgaaacccccattctgtttccagcccagaagaaatgctgcccctaccagatccctccttgaaccagtgatctaaggacccctcttttccctatctgcctaacagtgcctcacaaggcttgggggctggactccctctactccctctggccatagcccctcctggagatggggtcaaggcagcaggactgatcaagtgactactggttagccagaggagctcagctgaagccctggaaaccctcaggtctgagataggagttctctaggaacctggaatgagttcctgtctcctgaatgatggtctgggtgccacctgtttttaaactcttaaacctggaactccttaaatggggtaggtgggtgagattatcaaagctgaagctggctttgctgagaagctccctacctccctgcccttctcctccttcctgctggaatgaactaaagcagatgtcaagcaggggctggtgggggtgcctactcccttttccactctatctttagatttcaaaccttaggcttacagcccctcaatatctctctgctaacaccagtgtctctttctagttaggcctctaatcttctgtttctgtttaccagcttcccagcaactttccttttttaaaatattaaaaatttaattcaggttctcttaattatcctcatcctgctgttgcctccgcccttaactctatccctattaggaaccttgtttcccaccgaataagagttaaggtaagaggtagctcttcacctgatgacattccatttaagttttggggcatctttcctgccctcaatagcctcttggggaatcctctgaacagctagcg

SEQ ID NO: 292196 - DNA, 2429 bp, Homo sapiens
cctggctttgtgcattgggttctggtgcctgactggacacatttttccagttacaggccgaatggtctcaatgtagctgaagaactgtgcccactgatcagtattacgtattgcaaatgcaggaggtggctgtatctgacagacccaggccttccagctccgacagatccagttctgggatgggcatcctccagaaaagaaaggaactgtactggctactcacagggtccctcatagcttcctagaaagaaaccacttgtcagtcttcatgctacagcaacttctttgtggcccatggcctttccttgcttagatactccacataccgttctccccgacagggtgcggcggccttgaggggctgcagaggcaccctcccacgtcccgcgcagtgcagtgcctccgcaagtccagaggggagcagtgcgcccggcatccgagccggacaggagttacgtaatcgcgtcagccgacgcattacgacactcagacggccccacctctgccggctcgtactcggctcccccacctcgccgcagagctagcccgggaagcccacactggcggccacggagcagagtccctcacccccaccagctgtagctgaacgtctggatggtggagaagagcagggttccgagtctgaggaagacataaccttgtgcctgcctgcccacctctctctctggtcctgttcatctctcaggctctgagacactgaccttcactgctcagttaaaggttccagggattccactttgtctggacccatccagctgagtgaacccagggtggtggtgtatctggggagagtgaggagtgggttgtccaaacaccagggaaagagccctttggggcctcagacagaggagtgaagctggaaccatcagggaacatgagtgaattttggcacaaactgggctgctgtgtggtagagaaaccccagccgaagaagaagagaagacggattgaccggaccatgattggggaaccaatgaattttgttcacctgactcacattggctcaggggagatgggggccggagatggacttgccatgacaggtgcagttcaggagcagatgagatccaagggaaaccgagataggccatggagcaattctaggggcttatagctccaataatggaatggttctgccatcttgaaacccccattctgtttccagcccagaagaaatgctgcccctaccagatccctccttgaaccagtgatctaaggacccctcttttccctatctgcctaacagtgcctcacaaggcttgggggctggactccctctactccctctggccatagcccctcctggagatggggtcaaggcagcaggactgatcaagtgactactggttagccagaggagctcagctgaagccctggaaaccctcaggtctgagataggagttctctaggaacctggaatgagttcctgtctcctgaatgatggtctgggtgccacctgtttttaaactcttaaacctggaactccttaaatggggtaggtgggtgagattatcaaagctgaagctggctttgctgagaagctccctacctccctgcccttctcctccttcctgctggaatgaactaaagcagatgtcaagcaggggctggtgggggtgcctactcccttttccactctatctttagatttcaaaccttaggcttacagcccctcaatatctctctgctaacaccagtgtctctttctagttaggcctctaatcttctgtttctgtttaccagcttcccagcaactttccttttttaaaatattaaaaatttaattcaggttctcttaaaaaaaaaaaaaaaagaaaaaaagcaaaaaaaaaaaaaaaacaaaaaaaacaaaaaaaaaaaaaagacggggggcggcccgcccaataaataattctactcctcaaggagaggggcccaacttatcgacgccacaccgcagctgttttagaacaagaggggccccccaattagggcaggtcattaattacaccagcgacgggtagagcaggcgcgttaatcacaccagctcctttctagcgtggaaaaacacgtcgtgccaaccacctgcacaaacaccacttccacgacagaagacaaccccaccctacacctccgagcgggggacgggacaccaaccaactcgggcgaacaaaccacacgaccctgaccagagaaacggatatgtaaccgccccctccaggagcgagcagcaaaaaacaacacctatcacaaccccgggtaaaccagggggtcggcaaccacacacacgccagcaaaatacacgccctgcacggcgctgcacaacaagaccttggtgcaacccacagcgaccctagtcaccaccccagcaagccaacatattactaccaccgagagcacctcgtgcaagatcaacagccgcgacacct

SEQ ID NO: 292197 - DNA, 1686 bp, Homo sapiens
cctggctttgtgcattgggttctggtgcctgactggacacatttttccagttacaggccgaatggtctcaatgtagctgaagaactgtgcccactgatcagtattacgtattgcaaatgcaggaggtggctgtatctgacagacccaggccttccagctccgacagatccagttctgggatgggcatcctccagaaaagaaaggaactgtactggctactcacagggtccctcatagcttcctagaaagaaaccacttgtcagtcttcatgctacagcaacttctttgtggcccatggcctttccttgcttagatactccacataccgttctccccgacagggtgcggcggccttgaggggctgcagaggcaccctcccacgtcccgcgcagtgcagtgcctccgcaagtccagaggggagcagtgcgcccggcatccgagccggacaggagttacgtaatcgcgtcagccgacgcattacgacactcagacggccccacctctgccggctcgtactcggctcccccacctcgccgcagagctagcccgggaagcccacactggcggccacggagcagagtccctcacccccaccagctgtagctgaacgtctggatggtggagaagagcagggttccgagtctgaggaagacataaccttgtgcctgcctgcccacctctctctctggtcctgttcatctctcaggctctgagacactgaccttcactgctcagttaaaggttccagggattccactttgtctggacccatccagctgagtgaacccagggtggtggtgtatctggggagagtgaggagtgggttgtccaaacaccagggaaagagccctttggggcctcagacagaggagtgaagctggaaccatcagggaacatgagtgaattttggcacaaactgggctgctgtgtggtagagaaaccccagccgaagaagaagagaagacggattgaccggaccatgattggggaaccaatgaattttgttcacctgactcacattggctcaggggagatgggggccggagatggacttgccatgacaggtgcagttcaggagcagatgagatccaagggaaaccgagataggccatggagcaattctaggggcttatagctccaataatggaatggttctgccatcttgaaacccccattctgtttccagcccagaagaaatgctgcccctaccagatccctccttgaaccagtgatctaaggacccctcttttccctatctgcctaacagtgcctcacaaggcttgggggctggactccctctactccctctggccatagcccctcctggagatggggtcaaggcagcaggactgatcaagtgactactggttagccagaggagctcagctgaagccctggaaaccctcaggtctgagataggagttctctaggaacctggaatgagttcctgtctcctgaatgatggtctgggtgccacctgtttttaaactcttaaacctggaactccttaaatggggtaggtgggtgagattatcaaagctgaagctggctttgctgagaagctccctacctccctgcccttctcctccttcctgctggaatgaactaaagcagatgtcaagcaggggctggtgggggtgcctactcccttttccacagtatcacattaaccggggccggctcgta

SEQ ID NO: 292198 - DNA, 2405 bp, Homo sapiens
cctggctttgtgcattgggttctggtgcctgactggacacatttttccagttacaggccgaatggtctcaatgtagctgaagaactgtgcccactgatcagtattacgtattgcaaatgcaggaggtggctgtatctgacagacccaggccttccagctccgacagatccagttctgggatgggcatcctccagaaaagaaaggaactgtactggctactcacagggtccctcatagcttcctagaaagaaaccacttgtcagtcttcatgctacagcaacttctttgtggcccatggcctttccttgcttagatactccacataccgttctccccgacagggtgcggcggccttgaggggctgcagaggcaccctcccacgtcccgcgcagtgcagtgcctccgcaagtccagaggggagcagtgcgcccggcatccgagccggacaggagttacgtaatcgcgtcagccgacgcattacgacactcagacggccccacctctgccggctcgtactcggctcccccacctcgccgcagagctagcccgggaagcccacactggcggccacggagcagagtccctcacccccaccagctgtagctgaacgtctggatggtggagaagagcagggttccgagtctgaggaagacataaccttgtgcctgcctgcccacctctctctctggtcctgttcatctctcaggctctgagacactgaccttcactgctcagttaaaggttccagggattccactttgtctggacccatccagctgagtgaacccagggtggtggtgtatctggggagagtgaggagtgggttgtccaaacaccagggaaagagccctttggggcctcagacagaggagtgaagctggaaccatcagggaacatgagtgaattttggcacaaactgggctgctgtgtggtagagaaaccccagccgaagaagaagagaagacggattgaccggaccatgattggggaaccaatgaattttgttcacctgactcacattggctcaggggagatgggggccggagatggacttgccatgacaggtgcagttcaggagcagatgagatccaagggaaaccgagataggccatggagcaattctaggggcttatagctccaataatggaatggttctgccatcttgaaacccccattctgtttccagcccagaagaaatgctgcccctaccagatccctccttgaaccagtgatctaaggacccctcttttccctatctgcctaacagtgcctcacaaggcttgggggctggactccctctactccctctggccatagcccctcctggagatggggtcaaggcagcaggactgatcaagtgactactggttagccagaggagctcagctgaagccctggaaaccctcaggtctgagataggagttctctaggaacctggaatgagttcctgtctcctgaatgatggtctgggtgccacctgtttttaaatcagtctagggtgccaaagcatcagggttcccggcctgcaagaaagggagattcctgttcatgttaaagtgtcatatttatgaaactgccctttttggaatctttgaggttgtctgtactataggactggggaaatgcaagtgagtctaagaagaaacccagatgtgtcctaccctggctggcagtagtgagaagggaggaagttcttccttggacactagtactattggaaagttccttatgtctggttcactgatgaagcttgaggatagaattggtgaggagggaggggagaacaggtcacagctggaggggagcctgggccctatagggtgtgaggcagagcagagtggcagataggacatgtggacggtggggaaaatattcctcatgggacagaagatacctggcacatgtacccacaacctgtacacagatgatctgtactggacacacgtggagatatggccatgccacgcatgtgcaaacagaggtgtacacacaggagtgcagtgatacaggacacagataaacagaatgtacacagccttcaggaaggatctcaaggtcagggttccgagtctgaggaagacataaccttgtgcctgcctgcccacctctctctctggtcctgttcatctctcaggctctgagacactgaccttcactgctcagttaaaggttccagggattccactttgtctggacccatccagctgagtgaacccagggtggtggtgtatctggggagagtgaggagtgggttgtccaaacaccaggaaaagagcccttgggggctcagacagaggagtgaagctggaaccatcaggcaccatgagtgactcctggcacaaactgggctgctgtgtgggcagagaaccccagccggtgacgtctccccacccccatctaaccca

SEQ ID NO: 292199 - DNA, 1379 bp, Homo sapiens
acagggtcttgtcctgtcacccaggctggagtgcaggggtgcaaacatggctcactgtagccgcaactcttgggctcaagtgatcctcctgcctcagcctccccagtagctgggatgacaggcacatgctaccacaccctgctatctcgtttttttgtgtgtgttttttttgaggcggagtttcgctcttgttgcccaggctggagtgcagtggcgatctcggctcactgcaatctccggttcaagcgattctcctgcctcagcctcccaagtagctgggattacaggcatccgccaccacgcccagctaatcttttgtatttttagcagagatggggtttcaccatgttggccaggctggtctggaactcctgacctcaggtgatccgcccaccttggcctcccaaagtgctgggattacaggcgtgagccaccacgcccggcctatctcttgtttttaaatcagtctagggtgccaaagcatcagggttcccggcctgcaagaaagggagattcctgttcatgttaaagtgtcatatttatgaaactgccctttttggaatctttgaggttgtctgtactataggactggggaaatgcaagtgagtctaagaagaaacccagatgtgtcctaccctggctggcagtagtgagaagggaggaagttcttccttggacactagtactattggaaagttccttatgtctggttcactgatgaagcttgaggatagaattggtgaggagggaggggagaacaggtcacagctggaggggagcctgggccctatagggtgtgaggcagagcagagtggcagataggacatgtggacggtggggaaaatattcctcatgggacagaagatacctggcacatgtacccacaacctgtacacagatgatctgtactggacacacgtggagatatggccatgccacgcatgtgcaaacagaggtgtacacacaggagtgcagtgatacaggacacagataaacagaatgtacacagccttcaggaaggatctcaaggtcagggttccgagtctgaggaagacataaccttgtgcctgcctgcccacctctctctctggtcctgttcatctctcaggctctgagacactgaccttcactgctcagttaaaggttccagggattccactttgtctggacccatccagctgagtgaacccagggtggtggtgtatctggggagagtgaggagtgggttgtccaaacaccaggaaaagagcccttgggggctcagacagaggagtgaagctggaaccatcaggcaccatgagtgactcctggcacaaactgggctgctgtgtgggcagagaaccccagccggtgacgtctccccacccccatctaaccca

SEQ ID NO: 292200 - DNA, 302 bp, Homo sapiens
cagcctcttccctggaaggcacaaagtagagttcttactgtaggatatgaagacttacgaaggtgtctcgcatctgtttttttacagacaggtgcagttcaggagcagatgagatccaagggaaaccgagataggccatggagcaattctaggggcttatagctccaataatggaatggtgagtgattagagaaacccatctaacacctcagcccccataacagcacaacctgataccctgactcagaaccctgatcttatgcaagaaagggaggtgtggccgggcatggtggcttatgcct

SEQ ID NO: 292201 - DNA, 813 bp, Homo sapiens
aacctaggctagtacgaggacgagtgttaatcggccgaggccgggccgaggcgatggcgccctgggcgctcctcagccctggggtcctggtgcggaccgggcacaccgtgctgacctggggaatcacgctggtgctcttcctgcacgataccgagctgcggcaatgggaggagcagggggagctgctcctgcccctcaccttcctgctcctggtgctgggctccctgctgctctacctcgctgtgtcactcatggaccctggctacgtgaatgtgcagccccagcctcaggaggagctcaaagaggagcagacagccatggttcctccagccatccctcttcggcgctgcagatactgcctggtgctgcagcccctgagggctcggcactgccgtgagtgccgccgttgcgtccgccgctacgaccaccactgcccctggatggagaactgtgtgggagagcgcaaccacccactctttgtggtctacctggcgctgcagctggtggtgcttctgtggggcctgtacctggcatggtcaggcctccggttcttccagccctggggtctgtggttgcggtccagcgggctcctgttcgccaccttcctgctgctgtccctcttctcgttggtggccagcctgctcctcgtctcgcacctctacctggtggccagcaacaccaccacctgggaattcatctcctcacaccgcatcgcctatctccgccagcgccccagcaaccccttcgaccgaggcctgacccgcaactggcccattctgtgtgcccagcctgggacccggtggggggaaggcc

SEQ ID NO: 292202 - DNA, 1154 bp, Homo sapiens
ggcgcttcttccgggtggggccccgggccgaggcgatggcgccctgggcgctcctcagccctggggtcctggtgcggaccgggcacaccgtgctgacctggggaatcacgctggtgctcttcctgcacgataccgagctgcggcaatgggaggagcagggggagctgctcctgcccctcaccttcctgctcctggtgctgggctccctgctgctctacctcgctgtgtcactcatggaccctggctacgtgaatgtgcagccccagcctcaggaggagctcaaagaggagcagacagccatggttcctccagccatccctcttcggcgctgcagatactgcctggtgctgcagcccctgagggctcggcactgccgtgagtgccgccgttgcgtccgccgctacgaccaccactgcccctggatggagaactgtgtgggagagcgcaaccacccactctttgtggtctacctggcgctgcagctggtggtgcttctgtggggcctgtacctggcatggtcaggcctccggttcttccagccctggggtctgtggttgcggtccagcgggctcctgttcgccaccttcctgctgctgtccctcttctcgttggtggccagcctgctcctcgtctcgcacctctacctggtggccagcaacaccaccacctgggaattcatctcctcacaccgcatcgcctatctccgccagcgccccagcaaccccttcgaccgaggcctgacccgcaacctggcccacttcttctgtggatggccctcagggtcctgggagaccctctgggctgaggaggaggaagagggcagcagcccagctgtttagggttgctggaggccgggctaccgtcttgtgcctgaaaaccacggggcctgtccccagctggggtgagcgctcagagggcctggggccctcactcctgcccacgcctcccagaccccagaacggagcttcaagtcagacagatccctgccttggtgggcagttctgccttccaaggaagaaggggaagaaaaggacctgtgggtggctcaggcccaagcagaccccgggctccaccccagccccgcccaggctgctgccagtgcacacttttacaaatttaatataaagcaagtccagtcttaaaaagaaaaaacc

SEQ ID NO: 292203 - DNA, 1172 bp, Homo sapiens
aacctaggctagtacgaggacgagtgttaatcggccgaggccgggccgaggcgatggcgccctgggcgctcctcagccctggggtcctggtgcggaccgggcacaccgtgctgacctggggaatcacgctggtgctcttcctgcacgataccgagctgcggcaatgggaggagcagggggagctgctcctgcccctcaccttcctgctcctggtgctgggctccctgctgctctacctcgctgtgtcactcatggaccctggctacgtgaatgtgcagccccagcctcaggaggagctcaaagaggagcagacagccatggttcctccagccatccctcttcggcgctgcagatactgcctggtgctgcagcccctgagggctcggcactgccgtgagtgccgccgttgcgtccgccgctacgaccaccactgcccctggatggagaactgtgtgggagagcgcaaccacccactctttgtggtctacctggcgctgcagctggtggtgcttctgtggggcctgtacctggcatggtcaggcctccggttcttccagccctggggtctgtggttgcggtccagcgggctcctgttcgccaccttcctgctgctgtccctcttctcgttggtggccagcctgctcctcgtctcgcacctctacctggtggccagcaacaccaccacctgggaattcatctcctcacaccgcatcgcctatctccgccagcgccccagcaaccccttcgaccgaggcctgacccgcaacctggcccacttcttctgtggatggccctcagggtcctgggagaccctctgggctgaggaggaggaagagggcagcagcccagctgtttagggttgctggaggccgggctaccgtcttgtgcctgaaaaccacggggcctgtccccagctggggtgagcgctcagagggcctggggccctcactcctgcccacgcctcccagaccccagaacggagcttcaagtcagacagatccctgccttggtgggcagttctgccttccaaggaagaaggggaagaaaaggacctgtgggtggctcaggcccaagcagaccccgggctccaccccagccccgcccaggctgctgccagtgcacacttttacaaatttaatataaagcaagtccagtcttaaaaagaaaaaacc

SEQ ID NO: 292204 - DNA, 1016 bp, Homo sapiens
aacctaggctagtacgaggacgagtgttaatcggccgaggccgggccgaggcgatggcgccctgggcgctcctcagccctggggtcctggtgcggaccgggcacaccgtgctgacctggggaatcacgctggtgctcttcctgcacgataccgagctgcggcaatgggaggagcagggggagctgctcctgcccctcaccttcctgctcctggtgctgggctccctgctgctctacctcgctgtgtcactcatggaccctggctacgtgaatgtgcagccccagcctcaggaggagctcaaagaggagcagacagccatggttcctccagccatccctcttcggcgctgcagatactgcctggtgctgcagcccctgagggctcggcactgccgtgagtgccgccgttgcgtccgccgctacgaccaccactgcccctggatggagaactgtgtgggagagcgcaaccacccactctttgtggtctacctggcgctgcagctggtggtgcttctgtggggcctgtacctggcatggtcaggcctccggttcttccagccctggggtctgtggttgcggtccagcgggctcctgttcgccaccttcctgctgctggcccacttcttctgtggatggccctcagggtcctgggagaccctctgggctgaggaggaggaagagggcagcagcccagctgtttagggttgctggaggccgggctaccgtcttgtgcctgaaaaccacggggcctgtccccagctggggtgagcgctcagagggcctggggccctcactcctgcccacgcctcccagaccccagaacggagcttcaagtcagacagatccctgccttggtgggcagttctgccttccaaggaagaaggggaagaaaaggacctgtgggtggctcaggcccaagcagaccccgggctccaccccagccccgcccaggctgctgccagtgcacacttttacaaatttaatataaagcaagtccagtcttaaaaagaaaaaacc

SEQ ID NO: 292205 - DNA, 1017 bp, Homo sapiens
ggcgcttcttccgggtggggccccgggccgaggcgatggcgccctgggcgctcctcagccctggggtcctggtgcggaccgggcacaccgtgctgacctggggaatcacgctggtgctcttcctgcacgataccgagctgcggcaatgggaggagcagggggagctgctcctgcccctcaccttcctgctcctggtgctgggctccctgctgctctacctcgctgtgtcactcatggaccctggctacgtgaatgtgcagccccagcctcaggaggagctcaaagaggagcagacagccatggttcctccagccatccctcttcggcgctgcagatactgcctggtgctgcagcccctgagggctcggcactgccgtgagtgccgccgttgcgtccgccgctacgaccaccactgcccctggatggagaactgtgtgggagagcgcaaccacccactctttgtggtctacctggcgctgcagctggtggtgcttctgtggggcctgtacctggcatggtcaggcctccggttcttccagccctggggtctgtggttgcggtccagcgggctcctgttcgccaccttcctgctgctgtccctcttctcgttggtggccagcctgctcctcgtctcgcacctctacctggtggccagcaacaccaccacctgggaattcatctcctcacaccgcatcgcctatctccgccagcgccccagcaaccccttcgaccgaggcctgacccgcaacctggcccacttcttctgtggatggccctcagggtcctgggagaccctctgggctgaggaggaggaagagggcagcagcccagctgtttagggttgctggaggccgggctaccgtcttgtgcctgaaaaccacggggcctgtccccagctggggtgagcgtcaggcccaagcagaccccgggctccaccccagccccgcccaggctgctgccagtgcacacttttacaaatttaatataaagcaagtccagtcttaaaaagaaaaaacc

SEQ ID NO: 292206 - DNA, 1150 bp, Homo sapiens
aacctaggctagtacgaggacgagtgttaatcggccgaggccgggccgaggcgatggcgccctgggcgctcctcagccctggggtcctggtgcggaccgggcacaccgtgctgacctggggaatcacgctggtgctcttcctgcacgataccgagctgcggcaatgggaggagcagggggagctgctcctgcccctcaccttcctgctcctggtgctgggctccctgctgctctacctcgctgtgtcactcatggaccctggctacgtgaatgtgcagccccagcctcaggaggagctcaaagaggagcagacagccatggttcctccagccatccctcttcggcgctgcagatactgcctggtgctgcagcccctgagggctcggcactgccgtgagtgccgccgttgcgtccgccgctacgaccaccactgcccctggatggagaactgtgtgggagagcgcaaccacccactctttgtggtctacctggcgctgcagctggtggtgcttctgtggggcctgtacctggcatgccctggggtctgtggttgcggtccagcgggctcctgttcgccaccttcctgctgctgtccctcttctcgttggtggccagcctgctcctcgtctcgcacctctacctggtggccagcaacaccaccacctgggaattcatctcctcacaccgcatcgcctatctccgccagcgccccagcaaccccttcgaccgaggcctgacccgcaacctggcccacttcttctgtggatggccctcagggtcctgggagaccctctgggctgaggaggaggaagagggcagcagcccagctgtttagggttgctggaggccgggctaccgtcttgtgcctgaaaaccacggggcctgtccccagctggggtgagcgctcagagggcctggggccctcactcctgcccacgcctcccagaccccagaacggagcttcaagtcagacagatccctgccttggtgggcagttctgccttccaaggaagaaggggaagaaaaggacctgtgggtggctcaggcccaagcagaccccgggctccaccccagccccgcccaggctgctgccagtgcacacttttacaaatttaatataaagcaagtccagtcttaaaaagaaaaaacc

SEQ ID NO: 292207 - DNA, 1013 bp, Homo sapiens
aacctaggctagtacgaggacgagtgttaatcggccgaggccgggccgaggcgatggcgccctgggcgctcctcagccctggggtcctggtgcggaccgggcacaccgtgctgacctggggaatcacgctggtgctcttcctgcacgataccgagctgcggcaatgggaggagcagggggagctgctcctgcccctcaccttcctgctcctggtgctgggctccctgctgctctacctcgctgtgtcactcatggaccctggctacgtgaatgtgcagccccagcctcaggaggagctcaaagaggagcagacagccatggttcctccagccatccctcttcggcgctgcagatactgcctggtgctgcagcccctgagggctcggcactgccgtgagtgccgccgttgcgtccgccgctacgaccaccactgcccctggatggagaactgtgtgggagagcgcaaccacccactctttgtggtctacctggcgctgcagctggtggtgcttctgtggggcctgtacctggcatgccctggggtctgtggttgcggtccagcgggctcctgttcgccaccttcctgctgctgtccctcttctcgttggtggccagcctgctcctcgtctcgcacctctacctggtggccagcaacaccaccacctgggaattcatctcctcacaccgcatcgcctatctccgccagcgccccagcaaccccttcgaccgaggcctgacccgcaacctggcccacttcttctgtggatggccctcagggtcctgggagaccctctgggctgaggaggaggaagagggcagcagcccagctgtttagggttgctggaggccgggctaccgtcttgtgcctgaaaaccacggggcctgtccccagctggggtgagcgtcaggcccaagcagaccccgggctccaccccagccccgcccaggctgctgccagtgcacacttttacaaatttaatataaagcaagtccagtcttaaaaagaaaaaacc

SEQ ID NO: 292208 - DNA, 1156 bp, Homo sapiens
cttcattacacaggagtgacgcctgaagctgaagcaattaacacaatgttacacgaccgaaagctgaggcaaggggccagtgtggagccatgataagaaactcagactcacagggcctaagtaactcatccgaggtcacagagcaaatgagagagatgggtctcccagcaaatctgcaggcctcagcccagagctgtgccacactacagcccatgcttttaatcactctgccagcactattccctgacatgcagggtgatggactgctacacagctgctgattaattagtgaatgctgctgctatttgccctccctcccccaagataaacaaaggctgaccatgagaaagataccagtacacccccaggaagccagccgattctctggtgatgagtgatgctgggaacagcagactggacatctatgggcatctgatggccactttaaagcactcaaggagaggtgaagaaaaaaaaaataggctcccctccaatgcaatttttaaaccactgattcaccatgcaatgcagtgttaaagtcaaaagaaccttagccactactgtatttgcaaaaattctgtactttgttttaaaaagcaccatttgttagcccaacattccccatggagccagttgggagatgacatcttgacaagttggactctttcgggacaaagaatacaagctgcatcagttctatttcttccccagccagaatacacaggactagccatcaaggggtagaagcaaaaatggctcctctcctcttaaacctagtgatatggtttggatatttgtcccctccaaatctcatattgatatttgatctcccacgttggaggtggggcctagtgggaggtgtttgggtcataggggcggatccctcacgaaaggcttgctgtcctccttcgaggtaatgagtgagttcacgtgagaactggttgtttaaaagagcatggcacctcctcgtctcttgcttcctctctcaccatgtgacacaccagctccccttccacttgcacaatgtttggaagctcctggaagccctcaccagaagcagatgctgacgccatgcttcttgtacagctggtggaatcataatccaaataaacttttttttctttataaactgcccagtttcaagtattcttttatg

SEQ ID NO: 292209 - DNA, 1879 bp, Homo sapiens
  misc_feature (697)..(697): n is a, c, g, or t
cctgagatagagtctggctctgtcgccaaggctggagtgcagtggtgtgatctcggctcactgcaatctctgcctcctgggttcaagcaattctcctgcctcagcctcccaaggagctgggactacaggcatgcaccgccctgcctggctaatttttttgtatttttttttagtagaaacggagtttcaccgtgttgcccaggctggtctggaactcctgagctcaggcaatccacccgccttggcctcccaaagtgctaagattacagttgtgagccactgcacctggccaaatactcggtattcttgaaagcattctattagtacaaggcatttttactttcttccaccctgctggctactccctcagagacggagagtccctcaaagtcctcccacttctccctatccttccctgtcctagaagcacgaaacctacctctccgggctgccctcgcccttgtgaacactgacttctctgaccaatgcctgtggtcctggtgacctgggctgtgccacattccacactgttctatcgtgcagttgcccacccaatatggtgaacaacagcccttggagagggattgattaggacaaacgccctcattttgcagatgaaggaatgaaggttcaaaggaattctttacatcattcctgtcttggggaggaaatcttgcacttacatttgactcttctntgcatttggtataaaaatagctatcatttactgagaattatctaggggtctaaccaatgccttttctgatgactttattcaattctaacaacgccaggaaatatactgcattttacagataagaaactcagactcacagggcctaagtaactcatccgaggtcacagagcaaatgagagagatgggtctcccagcaaatctgcaggcctcagcccagagctgtgccacactacagcccatgcttttaatcactctgccagcactattccctgacatgcagggtgatggactgctacacagctgctgattaattagtgaatgctgctgctatttgccctccctcccccaagataaacaaaggctgaccatgagaaagataccagtacacccccaggaagccagccgattctctggtgatgagtgatgctgggaacagcagactggacatctatgggcatctgatggccactttaaagcactcaaggagaggtgaagaaaaaaaaaataggctcccctccaatgcaatttttaaaccactgattcaccatgcaatgcagtgttaaagtcaaaagaaccttagccactactgtatttgcaaaaattctgtactttgttttaaaaagcaccatttgttagcccaacattccccatggagccagttgggagatgacatcttgacaagttggactctttcgggacaaagaatacaagctgcatcagttctatttcttccccagccagaatacacaggactagccatcaaggggtagaagcaaaaatggctcctctcctcttaaacctagtgatatggtttggatatttgtcccctccaaatctcatattgatatttgatctcccacgttggaggtggggcctagtgggaggtgtttgggtcataggggcggatccctcacgaaaggcttgctgtcctccttcgaggtaatgagtgagttcacgtgagaactggttgtttaaaagagcatggcacctcctcgtctcttgcttcctctctcaccatgtgacacaccagctccccttccacttgcacaatgtttggaagctcctggaagccctcaccagaagcagatgctgacgccatgcttcttgtacagctggtggaatcataatccaaataaacttttttttctttataaactgcccagtttcaagtattcttttatg

SEQ ID NO: 292210 - DNA, 1721 bp, Homo sapiens
ttccgcttccggcagcgcgagataaatcacgagaggaagcttaaatctgtcgtttgaatttaggaccacctcggttcacaatggtccgtagtggaaaaaatggtgaccttcatcttaaacagattgcatattacaaacgaactggtgaatatcattcaactacactgccaagtgagagaagtggcataagaagagcagcaaaaaaatttgtcttcaaagaaaaaaagctgttttatgttggaaaagacagaaaacaaaatcgtttggtaattgtttcagaagaggaaaaaaagaaagtcttaagagaatgccatgaaaatgacagtggagctcatcatggtatatccaggaccctcactctggtagaatccaattattattggacatctgtgaccaatgatgtcaaacagtgggtatatgcttgtcagcattgccaagtggcaaaaaatacagttattgtagcaccgaaacagcaccttctcaaggtggaaaatccatggagtttagttactgttgatctgatggggccttttcatacaagcaacagaagtcatgtatatgctataatcatgacagatttgttcaccaaatggattgtgattttgcctctatgtgatgtttcagcatcagaagtttctaaagctattatcaatatatttttcttatatggacctcctcagaaaataataatggaccaaagagatgaattcattcaacagatcaatattgaactgtacagattgtttggcataaagcaaattgtaatttctcacacctctggaactgttaacccaatggaaagtacacctaacacaatcaaagcatttctctccaaacactgtgctgaccacccaaacaattgggatgatcacctatcagctgtttcatttgccttcaatgtaactcacttggaacctactaaaaatacaccatattttcaaatgtttagtcgaaatccttatatgcctgagacttcagatagtcttcatgaagtggatggtgataatacaagtatgtttgccaaaattctagatgcaattaaagaagctgataaaataatggagaataagacaacttcactgggccagatggagaacaacaatttggatgaactaaataaaagcaagatcattgttaaaaagaaacccaaacaattaaatccatttcatttaaaagtgggtcatgaagttttaagacaaaggaaaaattggtggaaggatggtcgttttcagtctgaatgggttggtccttgtgtcatagactatattacagaaagtggatgtgctgtcctgagagacaacactggggttagactgaaaagacctatcaaaatgtcccaccttaagccctacataagagaatccagtgaacaagaaagtctttatctcttgcaaggttcagtagtggcagatcatgactacattggattgcctgaaattccgattggagcatatcaagcaaatattctggtggaagatgcaactattggtatagtcgataatgaattactgacatcaagcaaggatcgtgaactattagaatatagaaatacgaaaatctctccattgatagacgatcatagttctcttgaaaagcagactttcagtctgttggactcttcaaaccaggttcttgaatacttaagttagtaaataccaaaatttatttaaagtgcttgtttagaatataaattcttaatgatatcttattcattaaaaacg

SEQ ID NO: 292211 - DNA, 1644 bp, Homo sapiens
ttccgcttccggcagcgcgagataaatcacgagaggaagcttaaatctgtcgtttgaatttaggaccacctcggttcacaatggtccgtagtggaaaaaatggtgaccttcatcttaaacagattgcatattacaaacgaactggtgaatatcattcaactacactgccaagtgagagaagtggcataagaagagcagcaaaaaaatttgtcttcaaagaaaaaaagctgttttatgttggaaaagacagaaaacaaaatcgtttggtaattgtttcagaagaggaaaaaaagaaagtcttaagagaatgccatgaaaatgacagtggagctcatcatggtatatccaggaccctcactctggtagaatccaattattattggacatctgtgaccaatgatgtcaaacagtgggtatatgcttgtcagcattgccaagtggcaaaaaatacagttattgtagcaccgaaacagcaccttctcaaggtggaaaatccatggagtttagttactgttgatctgatggggccttttcatacaagcaacagaagtcatgtatatgctataatcatgacagatttgttcaccaaatggattgtgattttgcctctatgtgatgtttcagcatcagaagtttctaaagctattatcaatatatttttcttatatggacctcctcagaaaataataatggaccaaagagatgaattcattcaacagatcaatattgaactgtacagattgtttggcataaagcaaattgtaatttctcacacctctggaactgttaacccaatggaaagtacacctaacacaatcaaagcatttctctccaaacactgtgctgaccacccaaacaattgggatgatcacctatcagctgtttcatttgccttcaatgtaactcacttggaacctactaaaaatacaccatattttcaaatgtttagtcgaaatccttatatgcctgagacttcagatagtcttcatgaagtggatggtgataatacaaatggagaacaacaatttggatgaactaaataaaagcaagatcattgttaaaaagaaacccaaacaattaaatccatttcatttaaaagtgggtcatgaagttttaagacaaaggaaaaattggtggaaggatggtcgttttcagtctgaatgggttggtccttgtgtcatagactatattacagaaagtggatgtgctgtcctgagagacaacactggggttagactgaaaagacctatcaaaatgtcccaccttaagccctacataagagaatccagtgaacaagaaagtctttatctcttgcaaggttcagtagtggcagatcatgactacattggattgcctgaaattccgattggagcatatcaagcaaatattctggtggaagatgcaactattggtatagtcgataatgaattactgacatcaagcaaggatcgtgaactattagaatatagaaatacgaaaatctctccattgatagacgatcatagttctcttgaaaagcagactttcagtctgttggactcttcaaaccaggttcttgaatacttaagttagtaaataccaaaatttatttaaagtgcttgtttagaatataaattcttaatgatatcttattcattaaaaacg

SEQ ID NO: 292212 - DNA, 1066 bp, Homo sapiens
ttccgcttccggcagcgcgagataaatcacgagaggaagcttaaatctgtcgtttgaatttaggaccacctcggttcacaatggtccgtagtggaaaaaatggtgaccttcatcttaaacagattgcatattacaaacgaactggtgaatatcattcaactacactgccaagtgagagaagtggcataagaagagcagcaaaaaaatttgtcttcaaagaaaaaaagctgttttatgttggaaaagacagaaaacaaaatcgtttggtaattgtttcagaagaggaaaaaaagaaagtcttaagagaatgccatgaaaatgacagtggagctcatcatggtatatccaggaccctcactctggtagaatccaattattattggacatctgtgaccaatgatgtcaaacagtgggtatatgcttgtcagcattgccaagtggcaaaaaatacagttattgtagcaccgaaacagcaccttctcaaggtggaaaatccatggagtttagttactgttgatctgatggggccttttcatacaagcaacagaagtcatgtatatgctataatcatgacagatttgttcaccaaatggattgtgattttgcctctatgtgatgtttcagcatcagaagtttctaaagctattatcaatatatttttcttatatggacctcctcagaaaataataatggaccaaagagatgaattcattcaacagaaagtctttatctcttgcaaggttcagtagtggcagatcatgactacattggattgcctgaaattccgattggagcatatcaagcaaatattctggtggaagatgcaactattggtatagtcgataatgaattactgacatcaagcaaggatcgtgaactattagaatatagaaatacgaaaatctctccattgatagacgatcatagttctcttgaaaagcagactttcagtctgttggactcttcaaaccaggttcttgaatacttaagttagtaaataccaaaatttatttaaagtgcttgtttagaatataaattcttaatgatatcttattcattaaaaacg

SEQ ID NO: 292213 - DNA, 1527 bp, Homo sapiens
ttccgcttccggcagcgcgagataaatcacgagaggaagcttaaatctgtcgtttgaatttaggaccacctcggttcacaatggtccgtagtggaaaaaatggtgaccttcatcttaaacagattgcatattacaaacgaactggtgaatatcattcaactacactgccaagtgagagaagtggcataagaagagcagcaaaaaaatttgtcttcaaaggtatatgcttgtcagcattgccaagtggcaaaaaatacagttattgtagcaccgaaacagcaccttctcaaggtggaaaatccatggagtttagttactgttgatctgatggggccttttcatacaagcaacagaagtcatgtatatgctataatcatgacagatttgttcaccaaatggattgtgattttgcctctatgtgatgtttcagcatcagaagtttctaaagctattatcaatatatttttcttatatggacctcctcagaaaataataatggaccaaagagatgaattcattcaacagatcaatattgaactgtacagattgtttggcataaagcaaattgtaatttctcacacctctggaactgttaacccaatggaaagtacacctaacacaatcaaagcatttctctccaaacactgtgctgaccacccaaacaattgggatgatcacctatcagctgtttcatttgccttcaatgtaactcacttggaacctactaaaaatacaccatattttcaaatgtttagtcgaaatccttatatgcctgagacttcagatagtcttcatgaagtggatggtgataatacaagtatgtttgccaaaattctagatgcaattaaagaagctgataaaataatggagaataagacaacttcactgggccagatggagaacaacaatttggatgaactaaataaaagcaagatcattgttaaaaagaaacccaaacaattaaatccatttcatttaaaagtgggtcatgaagttttaagacaaaggaaaaattggtggaaggatggtcgttttcagtctgaatgggttggtccttgtgtcatagactatattacagaaagtggatgtgctgtcctgagagacaacactggggttagactgaaaagacctatcaaaatgtcccaccttaagccctacataagagaatccagtgaacaagaaagtctttatctcttgcaaggttcagtagtggcagatcatgactacattggattgcctgaaattccgattggagcatatcaagcaaatattctggtggaagatgcaactattggtatagtcgataatgaattactgacatcaagcaaggatcgtgaactattagaatatagaaatacgaaaatctctccattgatagacgatcatagttctcttgaaaagcagactttcagtctgttggactcttcaaaccaggttcttgaatacttaagttagtaaataccaaaatttatttaaagtgcttgtttagaatataaattcttaatgatatcttattcattaaaaacg

SEQ ID NO: 292214 - DNA, 1258 bp, Homo sapiens
ttccgcttccggcagcgcgagataaatcacgagaggaagcttaaatctgtcgtttgaatttaggaccacctcggttcacaatggtccgtagtggaaaaaatggtgaccttcatcttaaacagattgcatattacaaacgaactggtgaatatcattcaactacactgccaagtgagagaagtggcataagaagagcagcaaaaaaatttgtcttcaaagaaaaaaagctgttttatgttggaaaagacagaaaacaaaatcgtttggtaattgtttcagaagaggaaaaaaagaaagtcttaagagaatgccatgaaaatgacagtggagctcatcatggtatatccaggaccctcactctggtagaatccaattattattggacatctgtgaccaatgatgtcaaacagtgggtatatgcttgtcagcattgccaagtggcaaaaaatacagttattgtagcaccgaaacagcaccttctcaaggtggaaaatccatggagtttagttactgttgatctgatggggccttttcatacaagcaacagaagtcatgtatatgctataatcatgacagatttgttcaccaaatggattgtgattttgcctctatgtgatgtttcagcatcagaagtttctaaagctattatcaatatatttttcttatatggacctcctcagaaaataataatggaccaaagagatgaattcattcaacagatcaatattgaactgtacagattgtttggcataaagcaaattgtaatttctcacacctctggaactgttaacccaatggaaagtacacctaacacaatcaaagcatttctctccaaacactgtgctgaccacccaaacaattgggatgatcacctatcagctgtttcatttgccttcaatgtaactcacttgaaagtctttatctcttgcaaggttcagtagtggcagatcatgactacattggattgcctgaaattccgattggagcatatcaagcaaatattctggtggaagatgcaactattggtatagtcgataatgaattactgacatcaagcaaggatcgtgaactattagaatatagaaatacgaaaatctctccattgatagacgatcatagttctcttgaaaagcagactttcagtctgttggactcttcaaaccaggttcttgaatacttaagttagtaaataccaaaatttatttaaagtgcttgtttagaatataaattcttaatgatatcttattcattaaaaacg

SEQ ID NO: 292215 - DNA, 872 bp, Homo sapiens
ttccgcttccggcagcgcgagataaatcacgagaggaagcttaaatctgtcgtttgaatttaggaccacctcggttcacaatggtccgtagtggaaaaaatggtgaccttcatcttaaacagattgcatattacaaacgaactggtgaatatcattcaactacactgccaagtgagagaagtggcataagaagagcagcaaaaaaatttgtcttcaaaggtatatgcttgtcagcattgccaagtggcaaaaaatacagttattgtagcaccgaaacagcaccttctcaaggtggaaaatccatggagtttagttactgttgatctgatggggccttttcatacaagcaacagaagtcatgtatatgctataatcatgacagatttgttcaccaaatggattgtgattttgcctctatgtgatgtttcagcatcagaagtttctaaagctattatcaatatatttttcttatatggacctcctcagaaaataataatggaccaaagagatgaattcattcaacagaaagtctttatctcttgcaaggttcagtagtggcagatcatgactacattggattgcctgaaattccgattggagcatatcaagcaaatattctggtggaagatgcaactattggtatagtcgataatgaattactgacatcaagcaaggatcgtgaactattagaatatagaaatacgaaaatctctccattgatagacgatcatagttctcttgaaaagcagactttcagtctgttggactcttcaaaccaggttcttgaatacttaagttagtaaataccaaaatttatttaaagtgcttgtttagaatataaattcttaatgatatcttattcattaaaaacg

SEQ ID NO: 292216 - DNA, 615 bp, Homo sapiens
ttccgcttccggcagcgcgagataaatcacgagaggaagcttaaatctgtcgtttgaatttaggaccacctcggttcacaatggtccgtagtggaaaaaatggtgaccttcatcttaaacagattgcatattacaaacgaactggtgaatatcattcaactacactgccaagtgagagaagtggcataagaagagcagcaaaaaaatttgtcttcaaagacctcctcagaaaataataatggaccaaagagatgaattcattcaacagaaagtctttatctcttgcaaggttcagtagtggcagatcatgactacattggattgcctgaaattccgattggagcatatcaagcaaatattctggtggaagatgcaactattggtatagtcgataatgaattactgacatcaagcaaggatcgtgaactattagaatatagaaatacgaaaatctctccattgatagacgatcatagttctcttgaaaagcagactttcagtctgttggactcttcaaaccaggttcttgaatacttaagttagtaaataccaaaatttatttaaagtgcttgtttagaatataaattcttaatgatatcttattcattaaaaacg

SEQ ID NO: 292217 - DNA, 2347 bp, Homo sapiens
  misc_feature (2002)..(2002): n is a, c, g, or t
ggaggagaaaggggaaaggaagaaagaaggagagcaggagggcgaggagcggggggagcggggaggagggcgcggggaggaggcagcggggaggagcgtgcagggaggaggcagccgcgctgggaggagtctgcacactttcagtgccagggcattgtgggaagcagccatggtctaagccgggcgcctcacctgtcagccgcaccggctccagcgctcgcctctcgccctcgcttctccagcgctccttgctcgcaaggcgggggaggcggcggcccagccacgatgatacatttcatattgctcttcagtcgacaagggaaattacggctacagaaatggtacatcactctccctgataaagagaggaagaagatcacccgggaaattgttcagattattctctcccgtggtcacaggacaagcagttttgttgactggaaggagctaaaacttgtttataaaaggtctgtgagctggatattatctttaattttgaaaaggcttatttcatcctggacgagtttataataggtggggaaattcaggaaacatccaagaaaattgctgtcaaagccattgaagactctgatatgttacaggagacaatggaagaatacatgaacaagcctacattttaactggaaatctacttgaagactccagcactacatgttatgaagctgtaaataagcaacgcctcccatccggttttttgatggagcctcaggcaccatgccaaaaataatttaaagggattctttgttaactaacaaagttaaagttgtttaacatatttataattactatgtgtctgtattattaaaaaaaattatgtgtctgtgttatactgtataggtacttgtagctctaaatgtttaaagtaactaccacctaacccaacagacaatatttgtaatgtattaactccatgttatgtttttaagctggtttagatacattagctgcaattttttttgcatttgacacaatattgtaataatccatgattttgaatgtaaagtatatatgatgtcattaatactttttctaaatgtttagttttctaaattgtataataattcaaaattatgttaatagtgcagagtttatatgtaatgctagacatttttcatacacttaatagtactgtaactgcaattcacatacaaaatgtctgattttaatgtgctgaattcatttattttttttagaattgggattatgaaaataaccaaagagtatagaacttaataagtgtttttgatgccttagaagctgctatcttgactgaggttttaatttatcttttaattgaatataagggacattccaataaggttttctatgaactatatatttattaaggtttatagagacctagagatacagcatctatgacttcctttattattctaaaatagtatgataagaattaatagcaataataattattgctactattttttaaaattcacgttccaagcactcttagatgctggaaatttcatttcaaatatgttttaatgtatctctaatgcatttgaagacttattacatggcttacttagagcatttaagattatcacagcctatatggtagattcctttccttcttttttcttttcttaccctttcctccccaaagaaaagatttgctgctgaccattattactgtaagtatatcacatttgtgcttcctggaatgaaaattctgtataaccaggtcctaacagtgatcagacatattacagggaaatagcttgtaggccgggagtggtggcttacacctgtaatcccagcactttgggaggccgaggcaggtggatcacttgaggtcaggagttcgagagcagcctggccaatatgatgaaaccccatctctactaaaaatacaaaaattaggccgggtacagtggctcatgcctataattccagcactttgggaggcagaggtgggcggatcacaaggtcaagagatcaagaccatcctcgccaacanggtgaaaccccacctctattaaaaatacaaaaattagccgggagtggtggtgcgtgcctgtagtcccagctacttgggaggctgaggcaggagaatcgcttgaacctgggaggcagaagttgcagtgagctgagattgtgccactgcactccagcctgggcgacagagcgagacttcgtctcaaacaaacaaaaaaattagccgggcatggtggcaggtgcctgtaatcccagctactcagggggctgaggcaggggaatggcttgaacccaggaggcagaggttgcagtgagccaaggtcataccagtgcactccaggcgggtgacagagcaagactgcgtctc

SEQ ID NO: 292218 - DNA, 2456 bp, Homo sapiens
  misc_feature (2111)..(2111): n is a, c, g, or t
ggaggagaaaggggaaaggaagaaagaaggagagcaggagggcgaggagcggggggagcggggaggagggcgcggggaggaggcagcggggaggagcgtgcagggaggaggcagccgcgctgggaggagtctgcacactttcagtgccagggcattgtgggaagcagccatggtctaagccgggcgcctcacctgtcagccgcaccggctccagcgctcgcctctcgccctcgcttctccagcgctccttgctcgcaaggcgggggaggcggcggcccagccacgatgatacatttcatattgctcttcagtcgacaagggaaattacggctacagaaatggtacatcactctccctgataaagagaggaagaagatcacccgggaaattgttcagattattctctcccgtggtcacaggacaagcagttttgttgactggaaggagctaaaacttgtttataaaaggtatgctagtttatatttttgctgtgcaatagaaaatcaggacaatgagctcttgacgctagagattgtgcatcgttacgtggagctgctggacaaatattttggaaatgtctgtgagctggatattatctttaattttgaaaaggcttatttcatcctggacgagtttataataggtggggaaattcaggaaacatccaagaaaattgctgtcaaagccattgaagactctgatatgttacaggagacaatggaagaatacatgaacaagcctacattttaactggaaatctacttgaagactccagcactacatgttatgaagctgtaaataagcaacgcctcccatccggttttttgatggagcctcaggcaccatgccaaaaataatttaaagggattctttgttaactaacaaagttaaagttgtttaacatatttataattactatgtgtctgtattattaaaaaaaattatgtgtctgtgttatactgtataggtacttgtagctctaaatgtttaaagtaactaccacctaacccaacagacaatatttgtaatgtattaactccatgttatgtttttaagctggtttagatacattagctgcaattttttttgcatttgacacaatattgtaataatccatgattttgaatgtaaagtatatatgatgtcattaatactttttctaaatgtttagttttctaaattgtataataattcaaaattatgttaatagtgcagagtttatatgtaatgctagacatttttcatacacttaatagtactgtaactgcaattcacatacaaaatgtctgattttaatgtgctgaattcatttattttttttagaattgggattatgaaaataaccaaagagtatagaacttaataagtgtttttgatgccttagaagctgctatcttgactgaggttttaatttatcttttaattgaatataagggacattccaataaggttttctatgaactatatatttattaaggtttatagagacctagagatacagcatctatgacttcctttattattctaaaatagtatgataagaattaatagcaataataattattgctactattttttaaaattcacgttccaagcactcttagatgctggaaatttcatttcaaatatgttttaatgtatctctaatgcatttgaagacttattacatggcttacttagagcatttaagattatcacagcctatatggtagattcctttccttcttttttcttttcttaccctttcctccccaaagaaaagatttgctgctgaccattattactgtaagtatatcacatttgtgcttcctggaatgaaaattctgtataaccaggtcctaacagtgatcagacatattacagggaaatagcttgtaggccgggagtggtggcttacacctgtaatcccagcactttgggaggccgaggcaggtggatcacttgaggtcaggagttcgagagcagcctggccaatatgatgaaaccccatctctactaaaaatacaaaaattaggccgggtacagtggctcatgcctataattccagcactttgggaggcagaggtgggcggatcacaaggtcaagagatcaagaccatcctcgccaacanggtgaaaccccacctctattaaaaatacaaaaattagccgggagtggtggtgcgtgcctgtagtcccagctacttgggaggctgaggcaggagaatcgcttgaacctgggaggcagaagttgcagtgagctgagattgtgccactgcactccagcctgggcgacagagcgagacttcgtctcaaacaaacaaaaaaattagccgggcatggtggcaggtgcctgtaatcccagctactcagggggctgaggcaggggaatggcttgaacccaggaggcagaggttgcagtgagccaaggtcataccagtgcactccaggcgggtgacagagcaagactgcgtctc

SEQ ID NO: 292219 - DNA, 2495 bp, Homo sapiens
  misc_feature (2150)..(2150): n is a, c, g, or t
ggaggagaaaggggaaaggaagaaagaaggagagcaggagggcgaggagcggggggagcggggaggagggcgcggggaggaggcagcggggaggagcgtgcagggaggaggcagccgcgctgggaggagtctgcacactttcagtgccagggcattgtgggaagcagccatggtctaagccgggcgcctcacctgtcagccgcaccggctccagcgctcgcctctcgccctcgcttctccagcgctccttgctcgcaaggcgggggaggcggcggcccagccacgatgatacatttcatattgctcttcagtcgacaagggaaattacggctacagaaatggtacatcactctccctgataaagagaggaagaagatcacccgggaaattgttcagattattctctcccgtggtcacaggacaagcagttttgttgactggaaggagctaaaacttgtttataaaaggtatgctagtttatatttttgctgtgcaatagaaaatcaggacaatgagctcttgacgctagagattgtgcatcgttacgtggagctgctggacaaatattttggaaatacttggccttttgcaagagcctgaagaagtttccttgaggtctgtgagctggatattatctttaattttgaaaaggcttatttcatcctggacgagtttataataggtggggaaattcaggaaacatccaagaaaattgctgtcaaagccattgaagactctgatatgttacaggagacaatggaagaatacatgaacaagcctacattttaactggaaatctacttgaagactccagcactacatgttatgaagctgtaaataagcaacgcctcccatccggttttttgatggagcctcaggcaccatgccaaaaataatttaaagggattctttgttaactaacaaagttaaagttgtttaacatatttataattactatgtgtctgtattattaaaaaaaattatgtgtctgtgttatactgtataggtacttgtagctctaaatgtttaaagtaactaccacctaacccaacagacaatatttgtaatgtattaactccatgttatgtttttaagctggtttagatacattagctgcaattttttttgcatttgacacaatattgtaataatccatgattttgaatgtaaagtatatatgatgtcattaatactttttctaaatgtttagttttctaaattgtataataattcaaaattatgttaatagtgcagagtttatatgtaatgctagacatttttcatacacttaatagtactgtaactgcaattcacatacaaaatgtctgattttaatgtgctgaattcatttattttttttagaattgggattatgaaaataaccaaagagtatagaacttaataagtgtttttgatgccttagaagctgctatcttgactgaggttttaatttatcttttaattgaatataagggacattccaataaggttttctatgaactatatatttattaaggtttatagagacctagagatacagcatctatgacttcctttattattctaaaatagtatgataagaattaatagcaataataattattgctactattttttaaaattcacgttccaagcactcttagatgctggaaatttcatttcaaatatgttttaatgtatctctaatgcatttgaagacttattacatggcttacttagagcatttaagattatcacagcctatatggtagattcctttccttcttttttcttttcttaccctttcctccccaaagaaaagatttgctgctgaccattattactgtaagtatatcacatttgtgcttcctggaatgaaaattctgtataaccaggtcctaacagtgatcagacatattacagggaaatagcttgtaggccgggagtggtggcttacacctgtaatcccagcactttgggaggccgaggcaggtggatcacttgaggtcaggagttcgagagcagcctggccaatatgatgaaaccccatctctactaaaaatacaaaaattaggccgggtacagtggctcatgcctataattccagcactttgggaggcagaggtgggcggatcacaaggtcaagagatcaagaccatcctcgccaacanggtgaaaccccacctctattaaaaatacaaaaattagccgggagtggtggtgcgtgcctgtagtcccagctacttgggaggctgaggcaggagaatcgcttgaacctgggaggcagaagttgcagtgagctgagattgtgccactgcactccagcctgggcgacagagcgagacttcgtctcaaacaaacaaaaaaattagccgggcatggtggcaggtgcctgtaatcccagctactcagggggctgaggcaggggaatggcttgaacccaggaggcagaggttgcagtgagccaaggtcataccagtgcactccaggcgggtgacagagcaagactgcgtctc

SEQ ID NO: 292220 - DNA, 750 bp, Homo sapiens
ggaggagaaaggggaaaggaagaaagaaggagagcaggagggcgaggagcggggggagcggggaggagggcgcggggaggaggcagcggggaggagcgtgcagggaggaggcagccgcgctgggaggagtctgcacactttcagtgccagggcattgtgggaagcagccatggtctaagccgggcgcctcacctgtcagccgcaccggctccagcgctcgcctctcgccctcgcttctccagcgctccttgctcgcaaggcgggggaggcggcggcccagccacgatgatacatttcatattgctcttcagtcgacaagggaaattacggctacagaaatggtacatcactctccctgataaagagaggaagaagatcacccgggaaattgttcagattattctctcccgtggtcacaggacaagcagttttgttgactggaaggagctaaaacttgtttataaaaggtatgctagtttatatttttgctgtgcaatagaaaatcaggacaatgagctcttgacgctagagattgtgcatcgttacgtggagctgctggacaaatattttggaaatgtctgtgagctggatattatctttaattttgaaaaggcttatttcatcctggacgagtttataataggtggggaaattcaggaaacatccaagaaaattgctgtcaaagccattgaagactctgatatgttacaggaggtcagtacggtttcccaaaccatgggagaaagatga

SEQ ID NO: 292221 - DNA, 2039 bp, Homo sapiens
  misc_feature (1694)..(1694): n is a, c, g, or t
tgctggtattacaggcgtgagcaccacactggccaagcatttctcttatcagacattcactttatgatcaagcttaactttttctcagttgaaagttacttaattccagccccatatggatgtgtatacaaattatactcaaactttgattagaatgcaaagattttatatccatgtatccttttgacaacttgttttcaacaatggcaaataaataaaagaatgcagaagatttcacagtctgcggaaggctgtgacttaaagggaaaattgttctaatttattgttcgctttcagacaatggaagaatacatgaacaagcctacattttaactggaaatctacttgaagactccagcactacatgttatgaagctgtaaataagcaacgcctcccatccggttttttgatggagcctcaggcaccatgccaaaaataatttaaagggattctttgttaactaacaaagttaaagttgtttaacatatttataattactatgtgtctgtattattaaaaaaaattatgtgtctgtgttatactgtataggtacttgtagctctaaatgtttaaagtaactaccacctaacccaacagacaatatttgtaatgtattaactccatgttatgtttttaagctggtttagatacattagctgcaattttttttgcatttgacacaatattgtaataatccatgattttgaatgtaaagtatatatgatgtcattaatactttttctaaatgtttagttttctaaattgtataataattcaaaattatgttaatagtgcagagtttatatgtaatgctagacatttttcatacacttaatagtactgtaactgcaattcacatacaaaatgtctgattttaatgtgctgaattcatttattttttttagaattgggattatgaaaataaccaaagagtatagaacttaataagtgtttttgatgccttagaagctgctatcttgactgaggttttaatttatcttttaattgaatataagggacattccaataaggttttctatgaactatatatttattaaggtttatagagacctagagatacagcatctatgacttcctttattattctaaaatagtatgataagaattaatagcaataataattattgctactattttttaaaattcacgttccaagcactcttagatgctggaaatttcatttcaaatatgttttaatgtatctctaatgcatttgaagacttattacatggcttacttagagcatttaagattatcacagcctatatggtagattcctttccttcttttttcttttcttaccctttcctccccaaagaaaagatttgctgctgaccattattactgtaagtatatcacatttgtgcttcctggaatgaaaattctgtataaccaggtcctaacagtgatcagacatattacagggaaatagcttgtaggccgggagtggtggcttacacctgtaatcccagcactttgggaggccgaggcaggtggatcacttgaggtcaggagttcgagagcagcctggccaatatgatgaaaccccatctctactaaaaatacaaaaattaggccgggtacagtggctcatgcctataattccagcactttgggaggcagaggtgggcggatcacaaggtcaagagatcaagaccatcctcgccaacanggtgaaaccccacctctattaaaaatacaaaaattagccgggagtggtggtgcgtgcctgtagtcccagctacttgggaggctgaggcaggagaatcgcttgaacctgggaggcagaagttgcagtgagctgagattgtgccactgcactccagcctgggcgacagagcgagacttcgtctcaaacaaacaaaaaaattagccgggcatggtggcaggtgcctgtaatcccagctactcagggggctgaggcaggggaatggcttgaacccaggaggcagaggttgcagtgagccaaggtcataccagtgcactccaggcgggtgacagagcaagactgcgtctc

SEQ ID NO: 292222 - DNA, 609 bp, Homo sapiens
tagccacttacaaacaaatcaacatttttaaaaagaaaatgtaaagagatggggtcttgccaggtcttggccaggctggtcttgaactcccggactcaagcaactctcctgacttggcctcccaaagtgttggaattacaggcatgagccactgcagtagccctgattgttttaaatagaagaagatacatttcatattgctcttcagtcgacaagggaaattacggctacagaaatggtacatcactctccctgataaagagaggaagaagatcacccgggaaattgttcagattattctctcccgtggtcacaggacaagcagttttgttgactggaaggagctaaaacttgtttataaaaggtatgctagtttatatttttgctgtgcaatagaaaatcaggacaatgagctcttgacgctagagattgtgcatcgttacgtggagctgctggacaaatattttggaaatgtaagtgttgtccttgtcggttaggattagctacagtccccatctcagctcttacttcagttctgtctctggtcacatcccttctctctgtcacatctaaaatatgaattgaacttgaaccgaagatcaccttagt

SEQ ID NO: 292223 - DNA, 2353 bp, Homo sapiens
  misc_feature (2008)..(2008): n is a, c, g, or t
tagccacttacaaacaaatcaacatttttaaaaagaaaatgtaaagagatggggtcttgccaggtcttggccaggctggtcttgaactcccggactcaagcaactctcctgacttggcctcccaaagtgttggaattacaggcatgagccactgcagtagccctgattgttttaaatagaagaagatacatttcatattgctcttcagtcgacaagggaaattacggctacagaaatggtacatcactctccctgataaagagaggaagaagatcacccgggaaattgttcagattattctctcccgtggtcacaggacaagcagttttgttgactggaaggagctaaaacttgtttataaaaggtatgctagtttatatttttgctgtgcaatagaaaatcaggacaatgagctcttgacgctagagattgtgcatcgttacgtggagctgctggacaaatattttggaaatgtctgtgagctggatattatctttaattttgaaaaggcttatttcatcctggacgagtttataataggtggggaaattcaggaaacatccaagaaaattgctgtcaaagccattgaagactctgatatgttacaggagacaatggaagaatacatgaacaagcctacattttaactggaaatctacttgaagactccagcactacatgttatgaagctgtaaataagcaacgcctcccatccggttttttgatggagcctcaggcaccatgccaaaaataatttaaagggattctttgttaactaacaaagttaaagttgtttaacatatttataattactatgtgtctgtattattaaaaaaaattatgtgtctgtgttatactgtataggtacttgtagctctaaatgtttaaagtaactaccacctaacccaacagacaatatttgtaatgtattaactccatgttatgtttttaagctggtttagatacattagctgcaattttttttgcatttgacacaatattgtaataatccatgattttgaatgtaaagtatatatgatgtcattaatactttttctaaatgtttagttttctaaattgtataataattcaaaattatgttaatagtgcagagtttatatgtaatgctagacatttttcatacacttaatagtactgtaactgcaattcacatacaaaatgtctgattttaatgtgctgaattcatttattttttttagaattgggattatgaaaataaccaaagagtatagaacttaataagtgtttttgatgccttagaagctgctatcttgactgaggttttaatttatcttttaattgaatataagggacattccaataaggttttctatgaactatatatttattaaggtttatagagacctagagatacagcatctatgacttcctttattattctaaaatagtatgataagaattaatagcaataataattattgctactattttttaaaattcacgttccaagcactcttagatgctggaaatttcatttcaaatatgttttaatgtatctctaatgcatttgaagacttattacatggcttacttagagcatttaagattatcacagcctatatggtagattcctttccttcttttttcttttcttaccctttcctccccaaagaaaagatttgctgctgaccattattactgtaagtatatcacatttgtgcttcctggaatgaaaattctgtataaccaggtcctaacagtgatcagacatattacagggaaatagcttgtaggccgggagtggtggcttacacctgtaatcccagcactttgggaggccgaggcaggtggatcacttgaggtcaggagttcgagagcagcctggccaatatgatgaaaccccatctctactaaaaatacaaaaattaggccgggtacagtggctcatgcctataattccagcactttgggaggcagaggtgggcggatcacaaggtcaagagatcaagaccatcctcgccaacanggtgaaaccccacctctattaaaaatacaaaaattagccgggagtggtggtgcgtgcctgtagtcccagctacttgggaggctgaggcaggagaatcgcttgaacctgggaggcagaagttgcagtgagctgagattgtgccactgcactccagcctgggcgacagagcgagacttcgtctcaaacaaacaaaaaaattagccgggcatggtggcaggtgcctgtaatcccagctactcagggggctgaggcaggggaatggcttgaacccaggaggcagaggttgcagtgagccaaggtcataccagtgcactccaggcgggtgacagagcaagactgcgtctc

SEQ ID NO: 292224 - DNA, 412 bp, Homo sapiens
atcacccgggaaattgttcagattattctctcccgtggtcacaggacaagcagttttgttgactggaaggagctaaaacttgtttataaaaggtgtgagtaactttttgagagctcaatttctcagtcttactttggtttgttctaatcctgaacattttagattgctataccaattccatcatttactgaaatctttgaaggctggggcccagatatttgtaccaatagactaactagaaaagaactctcattttattgaaagaaattctaggtgccaggatggattctaggtaaataaactacaccttgatagtgcacgcatgcattcaagaaaagtggtatgaacacctgttacattcctggcattgttcttttttaatttgttggaggcggaatcttgctctgtcacc

SEQ ID NO: 292225 - DNA, 983 bp, Homo sapiens
gcttttccgtgctacctgcagaggggtccatacggcgttgttctggattcccgtcgtaacttaaagggaaattttcacaatgtccggagcccttgatgtcctgcaaatgaaggaggaggatgtccttaagttccttgcagcaggaacccacttaggtggcaccaatcttgacttccagatggaacagtacatctataaaaggaaaagtgatggcatctatatcataaatctcaagaggacctgggagaagcttctgctggcagctcgtgcaattgttgccattgaaaaccctgctgatgtcagtgttatatcctccaggaatactggccagagggctgtgctgaagtttgctgctgccactggagccactccaattgctggccgcttcactcctggaaccttcactaaccagatccaggcagccttccgggagccacggcttcttgtggttactgaccccagggctgaccaccagcctctcacggaggcatcttatgttaacctacctaccattgcgctgtgtaacacagattctcctctgcgctatgtggacattgccatcccatgcaacaacaagggagctcactcagtgggtttgatgtggtggatgctggctcgggaagttctgcgcatgcgtggcaccatttcccgtgaacacccatgggaggtcatgccttgatctgtacttctacagagatcctgaagagattgaaaaagaagagcaggctgctgctgaaaaggcagtgaccaaggaggaatttccaggttgaatggactgctcccgtcctgagttcactgctattcagcctgaggttgcagactggtctgaagtgtacggtgcccctgtgcctattcagcaattccctactgaagactggagctctcagcctgccatggaagactggtctgcagctcccactgctcaggccactgaatgggtaggagcaaccactgactggtcttaagctgttcttgcataggct

SEQ ID NO: 292226 - DNA, 1508 bp, Homo sapiens
caaaagcaacccttcttgctccaggcatgtgcaggaggttttttggtttcagcattttgttgcatgctgactatgtcctttaccttctcttaaattatgtatcaattcatgctggtttattcacttcctgatgtctatatgaagaggctgtctgccaacatctttcatcactctgcctgcaactatgaaaaatttagttctaaaaaatgcaaccttgctaaattgagtactaataggattggttcaattatgttctatgtctgttccatattgacattgtgtgcatctttgccatgcaggctttttaggaattatcgcatctctaacttcccacgagtgtttatgaaaatgtttagatttaaagaactttattgctttagacagaataaggcatgcagttctaacagaaagatccatgaattccagaaatatcactgaaaattattgacatttaagattattttctgtttgttactatggttcacaattcaagaataactctggccaggtgcagtagctcacaccctgtaatcccagcactttgggaggctgaggtaggcagatcacttgagctcaagagttcaagaccagcctgggaaacatggcaaactcccaccattacaaaaaaatacaaaaattagttggtcatggtggtgttcacctatagtcccagtgacttgggaggctgggatgggaggatctcttgagcccaggagatgcaggcttgcagtgagccatgatcatgccactgtactgcagactgagtgaaacagcaagatcttgtctgaaaagaaaaaaaaaagtaaaagaaaaagaaaagaaaataactcccattgctaaagacatatatgcttatcaggttaagataaagtgaattttgttcttcccaatgacatttcaggatatttgttcacaggaaagaacatgttgggaattggtactggctagaaatttctgttgagtatttattaccccatggtaataatggtaaaccacagtttagaaagattttttttttgacagccacagcatgttccgaagagatgattggaagatggaagtggagggttaaataatgaaatgcagctaacatttcggaaagtttctaaaagttgtacaacatgccctacagctactctttaaatctccaaatcaaatgagtttcaggtggagcctctgggaggtgatgaggtcatgagagtggagcctcatgaatgggatgagcactcctacaaaaaggattccagagagctcgcttgctccttccacagtgtgaggacacagagggaaggctctgtctatgaatgagaaagtgggtccccaccagacattgaatctgccgcatcttgatactggacttccagtctccagaactgtgggcaataaatgtctgttgtttattacctgtccagtatctttggtattttgctatagcaacccaaatggactaagaaaacaccagaggccatacctaataaaaatattgacatcacaaaagttgtatcagg

SEQ ID NO: 292227 - DNA, 664 bp, Homo sapiens
aaacagcaagatcttgtctgaaaagaaaaaaaaaagtaaaagaaaaagaaaagaaaataactcccattgctaaagacatatatgcttatcaggttaagataaagtgaattttgttcttcccaatgacatttcaggatatttgttcacaggaaagaacatgttgggaattggtactggctagaaatttctgttgagtatttattaccccatggtaataatggtaaaccacagtttagaaagattttttttttgacagccacagcatgttccgaagagatgattggaagatggaagtggagggttaaataatgaaatgcagctaacatttcggaaagtttctaaaagttgtacaacatgccctacagctactctttaaatctccaaatcaaatgaggtgagttcatgtgaagtgcattttacagatgaagacatcaagggtcatcagggttaagtgatattctaaagtcacagatgaaactttggagctaagtagaggacactgccacattcaattaaaaattataaattgcaatgtttattcaaaattagttgaaacttagacacatgaaaagtcccaagaaactctggtccaattacaattattttttctaatagaagatctggagaggcctcagaaaaggacccatcttcatcttgccttcag

SEQ ID NO: 292228 - DNA, 1047 bp, Homo sapiens
cacaggctgaaggctggtgggaggaggggcagtctccaagagcccctgaaatcctcacacctgggttcctacctgctgtttccagctaggggaaggcgcaggagtgaggaatggagggagtggagggctctggccgatcaatgccttctctctctctctgcctctcagattgacggcgtggaggacatgcttctcgagctgctgccagatgactgatgtatggtcttggcagcacctgtctcctttcaccccagggcctgagcctggccagcctacaatggggatgttgtgtttctgttcaccttcgtttactatgcctgtgtcttctccaccacgctggggtctgggaggaatggacagacagaggatgagctctacccagggcctgcaggacctgcctgtagcccactctgctcgccttagcactaccactcctgccaaggaggattccatttggcagagcttcttccaggtgcccagctatacctgtgcctcggcttttctcagctggatgatggtcttcagcctctttctgtcccttctgtccctcacagcactagtatttcatgttgcacacccactcagctccgtgaacttgtgagaacacagccgattcacctgagcaggacctctgaaaccctggaccagtggtctcacatggtgctacgcctgcatgtaaacacgcctgcaaacgctgcctgccggtaaacacgcctgcaaacgctgcctgcccgtaaacacgcctgcaaacgctgcctgcccacacaggttcacgtgcagctcaaggaaaggcctgaaaggagcccttatctgtgctcaggactcagaagcctctgggtcagtggtccacatcccgggacgcagcaggaggccaggccggcgagccctgtggatgagccctcagaacccttggcttgcccacgtggaaaagggatagaggttgggtttccccccttttatagatggtcacgcacctgggtgttacaaagttgtatgtggcatgaatactttttgtaatgattgattaaatgcaagatagtttatcta

SEQ ID NO: 292229 - DNA, 1004 bp, Homo sapiens
  misc_feature (1)..(1): n is a, c, g, or t
nggacacgtcaactataggctaggtacgaggctgggtgttgcttgagaggctctggctcttgcttcttaggcggcccgaggacgccatggccgagtgcccgacactcggggaggcagtcaccgaccacccggaccgcctgtgggcctgggagaagttcgtgtatttggacgagaagcagcacgcctggctgcccttaaccatcgagataaaggataggttacagttacgggtgctcttgcgtcgggaagacgtcgtcctggggaggcctatgacccccacccagataggcccaagcctgctgcctatcatgtggcagctctaccctgatggacgataccgatcctcagactccagtttctggcgcttagtgtaccacatcaagattgacggcgtggaggacatgcttctcgagctgctgccagatgactgatgtatggtcttggcagcacctgtctcctttcaccccagggcctgagcctggccagcctacaatggggatgttgtgtttctgttcaccttcgtttactatgcctgtgtcttctccaccacgctggggtctgggaggaatggacagacagaggatgagctctacccagggcctgcaggacctgcctgtagcccactctgctcgccttagcactaccactcctgccaaggaggattccatttggcagagcttcttccaggtgcccagctatacctgtgcctcggcttttctcagctggatgatggtcttcagcctctttctgtcccttctgtccctcacagcactagtatttcatgttgcacacccactcagctccgtgaacttgtgagaacacagccgattcacctgagcaggacctctgaaaccctggaccagtggtctcacaggtcgcctgtgtaacgctgagcgggcggggtgagaggctggagggctgccgaacctgacggcgcccgtctgtgtcgggggagggcgcttttcggcaaccgtgggccccgcggggggggggggcccctccgg

SEQ ID NO: 292230 - DNA, 322 bp, Homo sapiens
gcgtttgcaggcgtgtttacatgcaggcgtagcaccatgtgagaccactggtccagggtttcagaggcctgaaaggagcccttatctgtgctcaggactcagaagcctctgggtcagtggtccacatcccgggacgcagcaggaggccaggccggcgagccctgtggatgagccctcagaacccttggcttgcccacgtggaaaagggatagaggttgggtttccccccttttatagatggtcacgcacctgggtgttacaaagttgtatgtggcatgaatactttttgtaatgattgattaaatgcaagatagtttatcta

SEQ ID NO: 292231 - DNA, 1311 bp, Homo sapiens
agcgggtcctcccgccccgccgcttggtggcggccgcatgctgcccggatataaagggtcggccccacatcccagggaccagcgagcggccttgagaggctctggctcttgcttcttaggcggcccgaggacgccatggccgagtgcccgacactcggggaggcagtcaccgaccacccggaccgcctgtgggcctgggagaagttcgtgtatttggacgagaagcagcacgcctggctgcccttaaccatcgagataaaggataggttacagttacgggtgctcttgcgtcgggaagacgtcgtcctggggaggcctatgacccccacccagataggcccaagcctgctgcctatcatgtggcagctctaccctgatggacgataccgatcctcagactccagtttctggcgcttagtgtaccacatcaagattgacggcgtggaggacatgcttctcgagctgctgccagatgactgatgtatggtcttggcagcacctgtctcctttcaccccagggcctgagcctggccagcctacaatggggatgttgtgtttctgttcaccttcgtttactatgcctgtgtcttctccaccacgctggggtctgggaggaatggacagacagaggatgagctctacccagggcctgcaggacctgcctgtagcccactctgctcgccttagcactaccactcctgccaaggaggattccatttggcagagcttcttccaggtgcccagctatacctgtgcctcggcttttctcagctggatgatggtcttcagcctctttctgtcccttctgtccctcacagcactagtatttcatgttgcacacccactcagctccgtgaacttgtgagaacacagccgattcacctgagcaggacctctgaaaccctggaccagtggtctcacatggtgctacgcctgcatgtaaacacgcctgcaaacgctgcctgccggtaaacacgcctgcaaacgctgcctgcccgtaaacacgcctgcaaacgctgcctgcccacacaggttcacgtgcagctcaaggaaaggcctgaaaggagcccttatctgtgctcaggactcagaagcctctgggtcagtggtccacatcccgggacgcagcaggaggccaggccggcgagccctgtggatgagccctcagaacccttggcttgcccacgtggaaaagggatagaggttgggtttccccccttttatagatggtcacgcacctgggtgttacaaagttgtatgtggcatgaatactttttgtaatgattgattaaatgcaagatagtttatcta

SEQ ID NO: 292232 - DNA, 1400 bp, Homo sapiens
agcgggtcctcccgccccgccgcttggtggcggccgcatgctgcccggatataaagggtcggccccacatcccagggaccagcgagcggccttgagaggctctggctcttgcttcttaggcggcccgaggacgccatggccgagtgcccgacactcggggaggcagtcaccgaccacccggaccgcctgtgggcctgggagaagttcgtgtatttggacgagaagcagcacgcctggctgcccttaaccatcgagataaaggataggttacagttacgggtgctcttgcgtcgggaagacgtcgtcctggggaggcctatgacccccacccagataggcccaagcctgctgcctatcatgtggcagctctaccctgatggacgataccgatcctcagactccagtttctggcgcttagtgtaccacatcaagattgacggcgtggaggacatgcttctcgagctgctgccagatgactgatgtatggtcttggcagcacctgtctcctttcaccccagggcctgagcctggccagcctacaatggggatgttgtgtttctgttcaccttcgtttactatgcctgtgtcttctccaccacgctggggtctgggaggaatggacagacagaggatgagctctacccagggcctgcaggacctgcctgtagcccactctgctcgccttagcactaccactcctgccaaggaggattccatttggcagagcttcttccaggtgcccagctatacctgtgcctcggcttttctcagctggatgatggtcttcagcctctttctgtcccttctgtccctcacagcactagtatttcatgttgcacacccactcagctccgtgaacttgtgagaacacagccgattcacctgagcaggacctctgaaaccctggaccagtggtctcacatggtgctacgcctgcatgtaaacacgcctgcaaacgctgcctgccggtaaacacgcctgcaaacgctgcctgcccgtaaacacgcctgcaaacgctgcctgcccacacaggttcacgtgcagctcaaggaaaggcctgaaaggagcccttatctgtgctcaggactcagaagcctctgggtcagtggtccacatcccgggacgcagcaggaggccaggccggcgagccctgtggatgagccctcagaacccttggcttgcccacgtggaaaagggatagaggttgggtttccccccttttatagatggtcacgcacctgggtgttacaaagttgtatgtggcatgaatactttttgtaatgattgattaaatgcaagatagtttatctaacttcgtgcgcaatcagcttctatccttgacttagattctggtggagagaagtgagaataggcagcccccaaataaaaaatattcatgg

SEQ ID NO: 292233 - DNA, 1262 bp, Homo sapiens
  misc_feature (1)..(1): n is a, c, g, or t
nggacacgtcaactataggctaggtacgaggctgggtgttgcttgagaggctctggctcttgcttcttaggcggcccgaggacgccatggccgagtgcccgacactcggggaggcagtcaccgaccacccggaccgcctgtgggcctgggagaagttcgtgtatttggacgagaagcagcacgcctggctgcccttaaccatcgagataaaggataggttacagttacgggtgctcttgcgtcgggaagacgtcgtcctggggaggcctatgacccccacccagataggcccaagcctgctgcctatcatgtggcagctctaccctgatggacgataccgatcctcagactccagtttctggcgcttagtgtaccacatcaagattgacggcgtggaggacatgcttctcgagctgctgccagatgactgatgtatggtcttggcagcacctgtctcctttcaccccagggcctgagcctggccagcctacaatggggatgttgtgtttctgttcaccttcgtttactatgcctgtgtcttctccaccacgctggggtctgggaggaatggacagacagaggatgagctctacccagggcctgcaggacctgcctgtagcccactctgctcgccttagcactaccactcctgccaaggaggattccatttggcagagcttcttccaggtgcccagctatacctgtgcctcggcttttctcagctggatgatggtcttcagcctctttctgtcccttctgtccctcacagcactagtatttcatgttgcacacccactcagctccgtgaacttgtgagaacacagccgattcacctgagcaggacctctgaaaccctggaccagtggtctcacatggtgctacgcctgcatgtaaacacgcctgcaaacgctgcctgccggtaaacacgcctgcaaacgctgcctgcccgtaaacacgcctgcaaacgctgcctgcccacacaggttcacgtgcagctcaaggaaaggcctgaaaggagcccttatctgtgctcaggactcagaagcctctgggtcagtggtccacatcccgggacgcagcaggaggccaggccggcgagccctgtggatgagccctcagaacccttggcttgcccacgtggaaaagggatagaggttgggtttccccccttttatagatggtcacgcacctgggtgttacaaagttgtatgtggcatgaatactttttgtaatgattgattaaatgcaagatagtttatcta

SEQ ID NO: 292234 - DNA, 1053 bp, Homo sapiens
agcgggtcctcccgccccgccgcttggtggcggccgcatgctgcccggatataaagggtcggccccacatcccagggaccagcgagcggccttgagaggctctggctcttgcttcttaggcggcccgaggacgccatggccgagtgcccgacactcggggaggcagtcaccgaccacccggaccgcctgtgggcctgggagaagttcgtgtatttggacgagaagcagcacgcctggctgcccttaaccatcgagataaaggataggttacagttacgggtgctcttgcgtcgggaagacgtcgtcctggggaggcctatgacccccacccagataggcccaagcctgctgcctatcatgtggcagctctaccctgatggacgataccgatcctcagactccagtttctggcgcttagtgtaccacatcaagattgacggcgtggaggacatgcttctcgagctgctgccagatgactgatgtatggtcttggcagcacctgtctcctttcaccccagggcctgagcctggccagcctacaatggggatgttgtgtttctgttcaccttcgtttactatgcctgtgtcttctccaccacgctggggtctgggaggaatggacagacagaggatgagctctacccagggcctgcaggacctgcctgtagcccactctgctcgccttagcactaccactcctgccaaggaggattccatttggcagagcttcttccaggtgcccagctatacctgtgcctcggcttttctcagctggatgatggtcttcagcctctttctgtcccttctgtccctcacagcactagtatttcatgttgcacacccactcagctccgtgaacttgtgagaacacagccgattcacctgagcaggacctctgaaaccctggaccagtggtctcacaggtcgcctgtgtaacgctgagcgggcggggtgagaggctggagggctgccgaacctgacggcgcccgtctgtgtcgggggagggcgcttttcggcaaccgtgggccccgcggggggggggggcccctccgg

SEQ ID NO: 292235 - DNA, 1043 bp, Homo sapiens
agcgggtcctcccgccccgccgcttggtggcggccgcatgctgcccggatataaagggtcggccccacatcccagggaccagcgagcggccttgagaggctctggctcttgcttcttaggcggcccgaggacgccatggccgagtgcccgacactcggggaggcagtcaccgaccacccggaccgcctgtgggcctgggagaagttcgtgtatttggacgagaagcagcacgcctggctgcccttaaccatcgagataaaggataggttacagttacgggtgctcttgcgtcgggaagacgtcgtcctggggaggcctatgacccccacccagataggcccaagcctgctgcctatcatgtggcagctctaccctgatggacgataccgatcctcagactccagtttctggcgcttagtgtaccacatcaagattgacggcgtggaggacatgcttctcgagctgctgccagatgactgatgtatggtcttggcagcacctgtctcctttcaccccagggcctgagcctggccagcctacaatggggatgttgtgtttctgttcaccttcgtttactatgcctgtgtcttctccaccacgctggggtctgggaggaatggacagacagaggatgagctctacccagggcctgcaggacctgcctgtagcccactctgctcgccttagcactaccactcctgccaaggaggattccatttggcagagcttcttccaggtgcccagctatacctgtgcctcggcttttctcagctggatgatggtcttcagcctctttctgtcccttctgtccctcacagcactagtatttcatgttgcacacccactcagctccgtgaacttgtgagaacacagccgattcacctgagcaggacctctgaaaccctggaccagtggtctcacacctggggctcccctggtgtataagctggaaggggctggcggaaaagcctgggaagtgctgccgtaagccggacgcttgccccgggtcgggggtcggaaggcgagggcgcctttgtcgggca

SEQ ID NO: 292236 - DNA, 1282 bp, Homo sapiens
aacgcgcgaggggaaaacatcggctggtcgggctggttgtaatccttcgtagcttcgctcggtcttcttcttggtgtgtaggcggccgagaatcgccatggccatgtgcctagctgcgtcgtggcccatcctctgctcgtccggagcggttgattctgctggtctcccttgtgtattcgtatgagttgcgatacgccctggttgccctgacatcattgagatcggaataaaggataggttacagttacgggtgctcttgcgtcgggaagacgtcgtcctggggaggcctatgacccccacccagataggcccaagcctgctgcctatcatgtggcagctctaccctgatggacgataccgatcctcagactccagtttctggcgcttagtgtaccacatcaagattgacggcgtggaggacatgcttctcgagctgctgccagatgactgatgtatggtcttggcagcacctgtctcctttcaccccagggcctgagcctggccagcctacaatggggatgttgtgtttctgttcaccttcgtttactatgcctgtgtcttctccaccacgctggggtctgggaggaatggacagacagaggatgagctctacccagggcctgcaggacctgcctgtagcccactctgctcgccttagcactaccactcctgccaaggaggattccatttggcagagcttcttccaggtgcccagctatacctgtgcctcggcttttctcagctggatgatggtcttcagcctctttctgtcccttctgtccctcacagcactagtatttcatgttgcacacccactcagctccgtgaacttgtgagaacacagccgattcacctgagcaggacctctgaaaccctggaccagtggtctcacatggtgctacgcctgcatgtaaacacgcctgcaaacgctgcctgccggtaaacacgcctgcaaacgctgcctgcccgtaaacacgcctgcaaacgctgcctgcccacacaggttcacgtgcagctcaaggaaaggcctgaaaggagcccttatctgtgctcaggactcagaagcctctgggtcagtggtccacatcccgggacgcagcaggaggccaggccggcgagccctgtggatgagccctcagaacccttggcttgcccacgtggaaaagggatagaggttgggtttccccccttttatagatggtcacgcacctgggtgttacaaagttgtatgtggcatgaatactttttgtaatgattgattaaatgcaagatagtttatcta

SEQ ID NO: 292237 - DNA, 1690 bp, Homo sapiens
agcgggtcctcccgccccgccgcttggtggcggccgcatgctgcccggatataaagggtcggccccacatcccagggaccagcgagcggccttgagaggctctggctcttgcttcttaggcggcccgaggacgccatggccgagtgcccgacactcggggaggcagtcaccgaccacccggaccgcctgtgggcctgggagaagttcgtgtatttggacgagaagcagcacgcctggctgcccttaaccatcgagatacagggtctcgctctgtgacccaggctggtcttaaactcctggcctcaagcgatcctcctgcctctgccttccaaagcactggaattacaagtgtgagccgctgcaacccgccagaaaaaagtgtgcctttcatggccctgtctgggtggctagacacgtgtgtgtgctggtggtcctggcccagccagagtccctgagaggagcatgcatggcctaaggaagtgagcttcagggaacagtgatgaccatcatttcacactcggacccctgcccagatgggtggatggctggcaggagggattccggttttctgcgcctggagaagccctggcaagcggaacctgaaagtatgccctgtccttttcttctcctcagaataaaggataggttacagttacgggtgctcttgcgtcgggaagacgtcgtcctggggaggcctatgacccccacccagataggcccaagcctgctgcctatcatgtggcagctctaccctgatggacgataccgatcctcagactccagtttctggcgcttagtgtaccacatcaagattgacggcgtggaggacatgcttctcgagctgctgccagatgactgatgtatggtcttggcagcacctgtctcctttcaccccagggcctgagcctggccagcctacaatggggatgttgtgtttctgttcaccttcgtttactatgcctgtgtcttctccaccacgctggggtctgggaggaatggacagacagaggatgagctctacccagggcctgcaggacctgcctgtagcccactctgctcgccttagcactaccactcctgccaaggaggattccatttggcagagcttcttccaggtgcccagctatacctgtgcctcggcttttctcagctggatgatggtcttcagcctctttctgtcccttctgtccctcacagcactagtatttcatgttgcacacccactcagctccgtgaacttgtgagaacacagccgattcacctgagcaggacctctgaaaccctggaccagtggtctcacatggtgctacgcctgcatgtaaacacgcctgcaaacgctgcctgccggtaaacacgcctgcaaacgctgcctgcccgtaaacacgcctgcaaacgctgcctgcccacacaggttcacgtgcagctcaaggaaaggcctgaaaggagcccttatctgtgctcaggactcagaagcctctgggtcagtggtccacatcccgggacgcagcaggaggccaggccggcgagccctgtggatgagccctcagaacccttggcttgcccacgtggaaaagggatagaggttgggtttccccccttttatagatggtcacgcacctgggtgttacaaagttgtatgtggcatgaatactttttgtaatgattgattaaatgcaagatagtttatcta

SEQ ID NO: 292238 - DNA, 1243 bp, Homo sapiens
agcgggtcctcccgccccgccgcttggtggcggccgcatgctgcccggatataaagggtcggccccacatcccagggaccagcgagcggccttgagaggctctggctcttgcttcttaggcggcccgaggacgccatggccgagtgcccgacactcggggaggcagtcaccgaccacccggaccgcctgtgggcctgggagaagttcgtgtatttggacgagaagcagcacgcctggctgcccttaaccatcgagataaaggataggttacagttacgggtgctcttgcgtcgggaagacgtcgtcctggggaggcctatgacccccacccagataggcccaagcctgctgcctatcatgtggcagctctaccctgatggacgataccgatcctcagactccagtttctggcgcttagtgtaccacatcaagattgacggcgtggaggacatgcttctcgagctgctgccagatgactgatgtatggtcttggcagcacctgtctcctttcaccccagggcctgagcctggccagcctacaatggggaatggacagacagaggatgagctctacccagggcctgcaggacctgcctgtagcccactctgctcgccttagcactaccactcctgccaaggaggattccatttggcagagcttcttccaggtgcccagctatacctgtgcctcggcttttctcagctggatgatggtcttcagcctctttctgtcccttctgtccctcacagcactagtatttcatgttgcacacccactcagctccgtgaacttgtgagaacacagccgattcacctgagcaggacctctgaaaccctggaccagtggtctcacatggtgctacgcctgcatgtaaacacgcctgcaaacgctgcctgccggtaaacacgcctgcaaacgctgcctgcccgtaaacacgcctgcaaacgctgcctgcccacacaggttcacgtgcagctcaaggaaaggcctgaaaggagcccttatctgtgctcaggactcagaagcctctgggtcagtggtccacatcccgggacgcagcaggaggccaggccggcgagccctgtggatgagccctcagaacccttggcttgcccacgtggaaaagggatagaggttgggtttccccccttttatagatggtcacgcacctgggtgttacaaagttgtatgtggcatgaatactttttgtaatgattgattaaatgcaagatagtttatcta

SEQ ID NO: 292239 - DNA, 1636 bp, Homo sapiens
agcgggtcctcccgccccgccgcttggtggcggccgcatgctgcccggatataaagggtcggccccacatcccagggaccagcgagcggccttgagaggctctggctcttgcttcttaggcggcccgaggacgccatggccgagtgcccgacactcggggaggcagtcaccgaccacccggaccgcctgtgggcctgggagaagttcgtgtatttggacgagaagcagcacgcctggctgcccttaaccatcgagatacagggtctcgctctgtgacccaggctggtcttaaactcctggcctcaagcgatcctcctgcctctgccttccaaagcactggaattacaagtgtgagccgctgcaacccgccagaaaaaagtgtgcctttcatggccctgtctgggtggctagacacgtgtgtgtgctggtggtcctggcccagccagagtccctgagaggagcatgcatggcctaaggaagtgagcttcagggaacagtgatgaccatcatttcacactcggacccctgcccagatgggtggatggctggcaggagggattccggttttctgcgcctggagaagccctggcaagcggaacctgaaagtatgccctgtccttttcttctcctcagaataaaggataggttacagttacgggtgctcttgcgtcgggaagacgtcgtcctggggaggcctatgacccccacccagataggcccaagcctgctgcctatcatgtggcagctctaccctgatggacgataccgatcctcagactccagtttctggcgcttagtgtaccacatcaaggtcttggcagcacctgtctcctttcaccccagggcctgagcctggccagcctacaatggggatgttgtgtttctgttcaccttcgtttactatgcctgtgtcttctccaccacgctggggtctgggaggaatggacagacagaggatgagctctacccagggcctgcaggacctgcctgtagcccactctgctcgccttagcactaccactcctgccaaggaggattccatttggcagagcttcttccaggtgcccagctatacctgtgcctcggcttttctcagctggatgatggtcttcagcctctttctgtcccttctgtccctcacagcactagtatttcatgttgcacacccactcagctccgtgaacttgtgagaacacagccgattcacctgagcaggacctctgaaaccctggaccagtggtctcacatggtgctacgcctgcatgtaaacacgcctgcaaacgctgcctgccggtaaacacgcctgcaaacgctgcctgcccgtaaacacgcctgcaaacgctgcctgcccacacaggttcacgtgcagctcaaggaaaggcctgaaaggagcccttatctgtgctcaggactcagaagcctctgggtcagtggtccacatcccgggacgcagcaggaggccaggccggcgagccctgtggatgagccctcagaacccttggcttgcccacgtggaaaagggatagaggttgggtttccccccttttatagatggtcacgcacctgggtgttacaaagttgtatgtggcatgaatactttttgtaatgattgattaaatgcaagatagtttatcta

SEQ ID NO: 292240 - DNA, 424 bp, Homo sapiens
atttgccttggctcagaaggcctctgggggccatccctgaccactaggcttcccacttagacctgctccagcagcaccacccctcgccactgcctggtcctttccttcacccttgattctgtcttcttttgtccttctccaggtcttggcagcacctgtctcctttcaccccagggcctgagcctggccagcctacaatggggatgttgtgtttctgttcaccttcgtttactatgcctgtgtcttctccaccacgctggggtctgggaggaatggacagacagaggatgagctctacccagggcctgcaggacctgcctgtagcccactctgctcgccttagcactaccactcctgccaaggaggattccatttggcagagcttcttccaggtgcccagctatacctgtgcctcggcttttct

SEQ ID NO: 292241 - DNA, 337 bp, Homo sapiens
aacacgcctgcaaacgctgcctgcccgtaaacacgcctgcaaacgctgcctgcccacacaggttcacgtgcagctcaaggaaaggcctgaaaggagcccttatctgtgctcaggactcagaagcctctgggtcagtggtccacatcccgggacgcagcaggaggccaggccggcgagccctgtggatgagccctcagaacccttggcttgcccacgtggaaaagggatagaggttgggtttccccccttttatagatggtcacgcacctgggtgttacaaagttgtatgtggcatgaatactttttgtaatgattgattaaatgcaagatagtttat

SEQ ID NO: 292242 - DNA, 2406 bp, Homo sapiens
ggcccggactgggtcccatcgccccacctccggtcgctggacgtgctctcgcgtagctccgcctttcgtaagtccccccgcctcgcatgatggctgcggtgccgccgggcctggagccgtggaaccgtgtgagaatccctaaggcggggaaccgcagcgcagtgacagtgcagaaccccggcgcggcccttgacctttgcattgcagctgtaattaaagaatgccatctcgtcatactgtcgctgaagagccaaaccttagatgcagaaacagatgtgttatgtgcagtcctttacagcaatcacaacagaatgggccgccacaaaccccatttggccctcaaacaggttgagcaatgtttaaagcgtttgaaaaacatgaatttggagggctcaattcaagacctgtttgagttgttttcttccaatgaaaatcagcccttaactaccaaagtatgtgttgtccccagtcagccagtggtggagttggtgttgatgaaggttttgggagcctgcaagttgttgctccgcttgttggactgctgctgcaaaacttttcttttgactgtgaaacatctaggtttgcaagagttcattattttaaaccttgtgatggttgggctggtgagcaggttatgggttctctataaaggtgtcttaaaaaggttgattttgttatatgagcctttgtttggattgcttcaagaggtcgctaggattcaaccaatgccttacttcaaagattttacctttccttctgatatcactgaatttttaggacagccatattttgaagcctttaagaaaaaaatgcctatagcttttgcagctaaaggaataaataaattgctaaataaactgtttttaataaatgagcagtcaccaagagccagtgaagaaaccttgcttggaatttcaaaaaaagctaaacaaatgaagatcaatgtacagaataatgtggatcttggacagccagtaaagaataagagagtcttcaaagaagagtcatcagaatttgatgtgagggctttctgcaaccagctgaaacacaaagctactcaggagaccagttttgattttaaatgttctcaatccagactaaagacaaccaagtattcttctcagaaagtgataggaactcctcatgccaaaagtattgtgcaaagattccgagaggctgagtccttcacacaactttctgaagaaatccagatggcagttgtatggtgcaggagcaaaaaactcaaggctcaggccatttttctgggtaacaaacttcttaaaagcaaccggcttaaacatctggaagctcaaggtactagtttgccaaagaaactagagtgcataaaaacgtctatttgcaaccaccttcttcgtggctcaggtatcaaaacttcaaagcatcatctgagacagagaagatcacagaataaatttttacggagacaaaggaaaccacagagaaagttgcagtcgactcttttaagggaaattcagcagttctctcaagggactcggaagagtgctacagataccagtgctaagtggagactctcacactgtactgtgcatagaactgatctctaccctaacagtaagcagctcttgaatagtggagtttcaatgcctgtcatacaaactaaggagaaaatgattcatgaaaatcttagaggcatccatgaaaatgaaactgattcgtggacggtgatgcaaataaataaaaacagtacatcaggaaccattaaggagacagatgacattgatgatatttttgctttaatgggagtttagatgttcgttcatatgtgagacttttaagtgattaacaaggctagttcagtgttctaagtagaactgctaagatctggaagtaccacctggactcacagaggagctgctttagtgcagcattgcacaggagttcatttcagttcagtctacatttaaagtagcattgtgtcatttcatcaacaagtatttcttttttggcttcaactacatgtcaggtgttaatatgaaaaatctgccacagcctacccttgagaagcagatgtaattccttgagtgaggctagtaagtctctgaaaaactgaataattttatgacttactaggcaatttaataatcgtttgcaaaaaccattgtgtcttgaggtaaatgaggagcgggggtgggagatagcaaggaaacacctgaaaggtcaatttggtcttattggctccattatacataggtccgcctctgaatactaaagtttgtagctcctgacatttatgttttcttgtttatatgttggaattgatcaacaaggtttgccactgcttgtattaccagggactggttacaaccattatttctcttcatttgcttggcttatctcatattaaagtgagtttggagttctcca

SEQ ID NO: 292243 - DNA, 1112 bp, Homo sapiens
tctttatttctttttgtggatttgagctcccatcttagacacaggctcaagatggacacacaggccatttataagagcagtgtttgagacctcctgtgtgtcacttccaatcctcttggccttcatactaaagtcactgctgtggcaaccagtttcaagcagggctgaaccttgcctcttgctctggggatgtctcacttcctgcccctgggcttctcaccagctacaggaactgcctagcacttgggtatgtacaacctggaagaggtgtggggccaccccatcccctcctcaaagaaattcacaggcacagtatgaggctaaagtaacttccatcttggatgctaatctaccatgttgacttctgataaccagttcctggaatgccctctaagatttctacttttatctattaaaagaacacacacacacacacacacactgtaaatcctggccttaagcaagttataggctaagttgtaaacagcattcttgcctttccctgaggaggtgacttcagtgtctcacatgttccttcatgtacccccttttctctatggcatataagccctgggtcggggggtaactgtggggatcactgcctgagacatggcttctgtgcataagtccctattaaatgtttctttctgacaaactggatttgttggcctctttctttggcatctcagcactctcagcctttgggggtaggttgcatagacctggtcactatacaacacatatttcctaggacttgtcacaagttccctcaagatctagcactagtgcctatgttttggctaactcaatgaatatgttgttaataggcttgtctgtcttgtttcattttgccactgttccctgggatcacttcccaaatttacatatgtaagcttttggctcaggctctgcttataggagaaccaaggataaatcaaagcagtgaagtaacactggcagacaaaaagatgacttctaagataattcttttgttactatatattttatgaatgtctatattaaaaaatcttttttttggctgaaaacattcctgcttagattagaccaattctgtcaactataaaactgacaatatattcagattgttttct

SEQ ID NO: 292244 - DNA, 751 bp, Homo sapiens
ggcccggactgggtcccatcgccccacctccggtcgctggacgtgctctcgcgtagctccgcctttcgtaagtccccccgcctcgcatgatggctgcggtgccgccgggcctggagccgtggaaccgtgtgagaatccctaaggcggggaaccgcagcgcagtgacagtgcagaaccccggcgcggcccttgacctttgcattgcagctgtaattaaagaatgccatctcgtcatactgtcgctgaagagccaaaccttagatgcagaaacagatgtgttatgtgcagtcctttacagcaatcacaacagaatgggccgccacaaaccccatttggccctcaaacaggttgagcaatgtttaaagcgtttgaaaaacatgaatttggagggctcaattcaagacctgtttgagttgttttcttccaatgaaaatcagcccttaactaccaaagtatgtgttgtccccagtcagccagtggtggagttggtgttgatgaaggttttgggagcctgcaagttgttgctccgcttgttggactgctgctgcaaaacttttctgtatccttgaatatcttgaaatataccttcttttgatttggaattgtttggatatttttaacagtatttttgtttgaaagctaacactccataggagttacaacctacaggaattcttaaacttttgcttcttggcctccttttctcaggaattgcctgatgcagccattgccagagactgcctgtcactgt

SEQ ID NO: 292245 - DNA, 5341 bp, Homo sapiens
ggcccggactgggtcccatcgccccacctccggtcgctggacgtgctctcgcgtagctccgcctttcgtaagtccccccgcctcgcatgatggctgcggtgccgccgggcctggagccgtggaaccgtgtgagaatccctaaggcggggaaccgcagcgcagtgacagtgcagaaccccggcgcggcccttgacctttgcattgcagctgtaattaaagaatgccatctcgtcatactgtcgctgaagagccaaaccttagatgcagaaacagatgtgttatgtgcagtcctttacagcaatcacaacagaatgggccgccacaaaccccatttggccctcaaacaggttgagcaatgtttaaagcgtttgaaaaacatgaatttggagggctcaattcaagacctgtttgagttgttttcttccaatgaaaatcagcccttaactaccaaagtatgtgttgtccccagtcagccagtggtggagttggtgttgatgaaggttttgggagcctgcaagttgttgctccgcttgttggactgctgctgcaaaacttttcttttgactgtgaaacatctaggtttgcaagagttcattattttaaaccttgtgatggttgggctggtgagcaggttatgggttctctataaaggtgtcttaaaaaggttgattttgttatatgagcctttgtttggattgcttcaagaggtcgctaggattcaaccaatgccttacttcaaagattttacctttccttctgatatcactgaatttttaggacagccatattttgaagcctttaagaaaaaaatgcctatagcttttgcagctaaaggaataaataaattgctaaataaactgtttttaataaatgagcagtcaccaagagccagtgaagaaaccttgcttggaatttcaaaaaaagctaaacaaatgaagatcaatgtacagaataatgtggatcttggacagccagtaaagaataagagagtcttcaaagaagagtcatcagaatttgatgtgagggctttctgcaaccagctgaaacacaaagctactcaggagaccagttttgattttaaatgttctcaatccagactaaagacaaccaagtattcttctcagaaagtgataggaactcctcatgccaaaagtattgtgcaaagattccgagaggctgagtccttcacacaactttctgaagaaatccagatggcagttgtatggtgcaggagcaaaaaactcaaggctcaggccatttttctgggtaacaaacttcttaaaagcaaccggcttaaacatctggaagctcaaggtactagtttgccaaagaaactagagtgcataaaaacgtctatttgcaaccaccttcttcgtggctcaggtatcaaaacttcaaagcatcatctgagacagagaagatcacagaataaatttttacggagacaaaggaaaccacagagaaagttgcagtcgactcttttaagggaaattcagcagttctctcaagggactcggaagagtgctacagataccagtgctaagtggagactctcacactgtactgtgcatagaactgatctctaccctaacagtaagcagctcttgaatagtggagtttcaatgcctgtcatacaaactaaggagaaaatgattcatgaaaatcttagaggcatccatgaaaatgaaactgattcgtggacggtgatgcaaataaataaaaacagtacatcaggaaccattaaggagacagatgacattgatgatatttttgctttaatgggagtttagatgttcgttcatatgtgagacttttaagtgattaacaaggctagttcagtgttctaagtagaactgctaagatctggaagtaccacctggactcacagaggagctgctttagtgcagcattgcacaggagttcatttcagttcagtctacatttaaagtagcattgtgtcatttcatcaacaagtatttcttttttggcttcaactacatgtcaggtgttaatatgaaaaatctgccacagcctacccttgagaagcagatgtaattccttgagtgaggctagtaagtctctgaaaaactgaataattttatgacttactaggcaatttaataatcgtttgcaaaaaccattgtgtcttgaggtaaatgaggagcgggggtgggagatagcaaggaaacacctgaaaggtcaatttggtcttattggctccattatacataggtccgcctctgaatactaaagtttgtagctcctgacatttatgttttcttgtttatatgttggaattgatcaacaaggtttgccactgcttgtattaccagggactggttacaaccattatttctcttcatttgcttggcttatctcatattaaagtgagtttggagttctccaaaacgttttaattttatttatttgggtaccagtgattgattccaaataaacctttttacaaaaaggcaataaggtggtttatggttacatatgaaatataataggataacaggtagatgagaaagtaaaatgaaaaaatgaggttaggagatacaaagtagacccaggaatgaggctagaacatttataatttggtgttgatgctgtcatctgataggggatgttgctcgtactgttgctctgaggggagtacatcttgagtattttcaaataatgatgtgaagtttgaggtaggtatctttccaatgttctaactttactagaattaggttattaagcttctctagtgcccttaacttttgttacatagagatttaaagaaaaagaaagtagtaccttagtatgtaccgcatccttcttttcctcagccaccctatcataacagaagttatttcccttccattctttatttggctttgttctttccctgtctgccttctccattttctcagttatctctaccagtggttctcaaactttagactttttgagaatcacctggtgggttgctaaaagatgcagattagccctttcccagagactgataaacaggggccagaaacctgcatttttaacatggagcccaagtgattttgatccaggtggcccccaaatccagttatataaacactactttagcttctctcctgaagccttaagtaaactggtttaattcttaatctgtagtcagttttcatattccttttggctttctaccaagtggtagtatccatttagtgccttaaaatacagacaataccaaggagatttcattctagacaagtctagaaatggccattaacttctaagtgtccttgtgttcaatgaatatcctttacctattgggaaatagaaggtaaattagtaagagaactggtgtatagctttgtggaccatagggcttatttgctgagagttgtctatattcatgcacccagtcccctaagtagcctcttttaatacttcatttagctgattcagaaaaaaactccctgggaattaggagatttaaggttcagtcttgcttctcctacttgtggcttcactgagctagtcagtttcctcaggcttaggtttctggatttgaagtggaattttttcaagaatgaaacttttatagctgaaataaactttggagcttatctttcattggaaaaaccagggtggttcagtgagttaaggacaatatagcatggactgggctgccagtctagcatttgtttccaaattcattcatgttcttttggagtatcttcatctcctctcattttcccatcttctgccctttactattctgggaaaatggcaaaaaagcttcacatgtgtccacaaaatgacaatttgtatgtttataaggaattcagtattctgtatcagttactttttccaaataaatccaaatatttaacatttaaaaaaatgcaatctaaagtataccaaactgtaacttacctagtaaatgagattagaaactattgtcagggtcatcgtagtgaattattattattattattttttgagacagagtcttgtgctgttgcccaggctggagcacagtggtatgatctcagttcactgcaccctccacctcctgggctcaagctattctcccacctcagccgcctgagtagctgacactataggcaccaccatgccctggctaattttttaaaaactttgtgtagagatagggtttcaccatgttgcttaggctggtctcaaactcctggactcaagggatccacccactttggtctcccaaagtgctgggattacccacatcctagtaccaactttatcacttctgatggcattaggacacacaggccatttataagagcagtgtttgagacctcctgtgtgtcacttccaatcctcttggccttcatactaaagtcactgctgtggcaaccagtttcaagcagggctgaaccttgcctcttgctctggggatgtctcacttcctgcccctgggcttctcaccagctacaggaactgcctagcacttgggtatgtacaacctggaagaggtgtggggccaccccatcccctcctcaaagaaattcacaggcacagtatgaggctaaagtaacttccatcttggatgctaatctaccatgttgacttctgataaccagttcctggaatgccctctaagatttctacttttatctattaaaagaacacacacacacacacacacactgtaaatcctggccttaagcaagttataggctaagttgtaaacagcattcttgcctttccctgaggaggtgacttcagtgtctcacatgttccttcatgtacccccttttctctatggcatataagccctgggtcggggggtaactgtggggatcactgcctgagacatggcttctgtgcataagtccctattaaatgtttctttctgacaaactggatttgttggcctctttctttggcatctcagcactctcagcctttgggggtaggttgcatagacctggtcactatacaacacatatttcctaggacttgtcacaagttccctcaagatctagcactagtgcctatgttttggctaactcaatgaatatgttgttaataggcttgtctgtcttgtttcattttgccactgttccctgggatcacttcccaaatttacatatgtaagcttttggctcaggctctgcttataggagaaccaaggataaatcaaagcagtgaagtaacactggcagacaaaaagatgacttctaagataattcttttgttactatatattttatgaatgtctatattaaaaaatcttttttttggctgaaaacattcctgcttagattagaccaattctgtcaactataaaactgacaatatattcagattgttttct

SEQ ID NO: 292246 - DNA, 5591 bp, Homo sapiens
gaagactgtgaatttattcattctgtcttgctttcgggcatagcgacatggggagttagagagttattacacatgttgtgacatgtgccctaccttcaaggtgggggttaagtgtacacatgaggcgtaagtgtacaccaaatgactgacagcaaagtattcatatgaaagattattaaaccatgataaaatgcaatgcaaagatacagcttcttgttttacagatgttctcttaatgatttcctggactttatatcatctgttaccattttccaacttctcttatacttagaatccttacgttcttacagttgagactgattacattagtttttgattcctttaaaacaaataaggaaagatgctttttttagtgtgtttttaatataatatacttactgtagaaatacatactaaatcttattagatgtctctgcttcagacctttgcattgcagctgtaattaaagaatgccatctcgtcatactgtcgctgaagagccaaaccttagatgcagaaacagatgtgttatgtgcagtcctttacagcaatcacaacagaatgggccgccacaaaccccatttggccctcaaacaggttgagcaatgtttaaagcgtttgaaaaacatgaatttggagggctcaattcaagacctgtttgagttgttttcttccaatgaaaatcagcccttaactaccaaagtatgtgttgtccccagtcagccagtggtggagttggtgttgatgaaggttttgggagcctgcaagttgttgctccgcttgttggactgctgctgcaaaacttttcttttgactgtgaaacatctaggtttgcaagagttcattattttaaaccttgtgatggttgggctggtgagcaggttatgggttctctataaaggtgtcttaaaaaggttgattttgttatatgagcctttgtttggattgcttcaagaggtcgctaggattcaaccaatgccttacttcaaagattttacctttccttctgatatcactgaatttttaggacagccatattttgaagcctttaagaaaaaaatgcctatagcttttgcagctaaaggaataaataaattgctaaataaactgtttttaataaatgagcagtcaccaagagccagtgaagaaaccttgcttggaatttcaaaaaaagctaaacaaatgaagatcaatgtacagaataatgtggatcttggacagccagtaaagaataagagagtcttcaaagaagagtcatcagaatttgatgtgagggctttctgcaaccagctgaaacacaaagctactcaggagaccagttttgattttaaatgttctcaatccagactaaagacaaccaagtattcttctcagaaagtgataggaactcctcatgccaaaagtattgtgcaaagattccgagaggctgagtccttcacacaactttctgaagaaatccagatggcagttgtatggtgcaggagcaaaaaactcaaggctcaggccatttttctgggtaacaaacttcttaaaagcaaccggcttaaacatctggaagctcaaggtactagtttgccaaagaaactagagtgcataaaaacgtctatttgcaaccaccttcttcgtggctcaggtatcaaaacttcaaagcatcatctgagacagagaagatcacagaataaatttttacggagacaaaggaaaccacagagaaagttgcagtcgactcttttaagggaaattcagcagttctctcaagggactcggaagagtgctacagataccagtgctaagtggagactctcacactgtactgtgcatagaactgatctctaccctaacagtaagcagctcttgaatagtggagtttcaatgcctgtcatacaaactaaggagaaaatgattcatgaaaatcttagaggcatccatgaaaatgaaactgattcgtggacggtgatgcaaataaataaaaacagtacatcaggaaccattaaggagacagatgacattgatgatatttttgctttaatgggagtttagatgttcgttcatatgtgagacttttaagtgattaacaaggctagttcagtgttctaagtagaactgctaagatctggaagtaccacctggactcacagaggagctgctttagtgcagcattgcacaggagttcatttcagttcagtctacatttaaagtagcattgtgtcatttcatcaacaagtatttcttttttggcttcaactacatgtcaggtgttaatatgaaaaatctgccacagcctacccttgagaagcagatgtaattccttgagtgaggctagtaagtctctgaaaaactgaataattttatgacttactaggcaatttaataatcgtttgcaaaaaccattgtgtcttgaggtaaatgaggagcgggggtgggagatagcaaggaaacacctgaaaggtcaatttggtcttattggctccattatacataggtccgcctctgaatactaaagtttgtagctcctgacatttatgttttcttgtttatatgttggaattgatcaacaaggtttgccactgcttgtattaccagggactggttacaaccattatttctcttcatttgcttggcttatctcatattaaagtgagtttggagttctccaaaacgttttaattttatttatttgggtaccagtgattgattccaaataaacctttttacaaaaaggcaataaggtggtttatggttacatatgaaatataataggataacaggtagatgagaaagtaaaatgaaaaaatgaggttaggagatacaaagtagacccaggaatgaggctagaacatttataatttggtgttgatgctgtcatctgataggggatgttgctcgtactgttgctctgaggggagtacatcttgagtattttcaaataatgatgtgaagtttgaggtaggtatctttccaatgttctaactttactagaattaggttattaagcttctctagtgcccttaacttttgttacatagagatttaaagaaaaagaaagtagtaccttagtatgtaccgcatccttcttttcctcagccaccctatcataacagaagttatttcccttccattctttatttggctttgttctttccctgtctgccttctccattttctcagttatctctaccagtggttctcaaactttagactttttgagaatcacctggtgggttgctaaaagatgcagattagccctttcccagagactgataaacaggggccagaaacctgcatttttaacatggagcccaagtgattttgatccaggtggcccccaaatccagttatataaacactactttagcttctctcctgaagccttaagtaaactggtttaattcttaatctgtagtcagttttcatattccttttggctttctaccaagtggtagtatccatttagtgccttaaaatacagacaataccaaggagatttcattctagacaagtctagaaatggccattaacttctaagtgtccttgtgttcaatgaatatcctttacctattgggaaatagaaggtaaattagtaagagaactggtgtatagctttgtggaccatagggcttatttgctgagagttgtctatattcatgcacccagtcccctaagtagcctcttttaatacttcatttagctgattcagaaaaaaactccctgggaattaggagatttaaggttcagtcttgcttctcctacttgtggcttcactgagctagtcagtttcctcaggcttaggtttctggatttgaagtggaattttttcaagaatgaaacttttatagctgaaataaactttggagcttatctttcattggaaaaaccagggtggttcagtgagttaaggacaatatagcatggactgggctgccagtctagcatttgtttccaaattcattcatgttcttttggagtatcttcatctcctctcattttcccatcttctgccctttactattctgggaaaatggcaaaaaagcttcacatgtgtccacaaaatgacaatttgtatgtttataaggaattcagtattctgtatcagttactttttccaaataaatccaaatatttaacatttaaaaaaatgcaatctaaagtataccaaactgtaacttacctagtaaatgagattagaaactattgtcagggtcatcgtagtgaattattattattattattttttgagacagagtcttgtgctgttgcccaggctggagcacagtggtatgatctcagttcactgcaccctccacctcctgggctcaagctattctcccacctcagccgcctgagtagctgacactataggcaccaccatgccctggctaattttttaaaaactttgtgtagagatagggtttcaccatgttgcttaggctggtctcaaactcctggactcaagggatccacccactttggtctcccaaagtgctgggattacccacatcctagtaccaactttatcacttctgatggcattaggacacacaggccatttataagagcagtgtttgagacctcctgtgtgtcacttccaatcctcttggccttcatactaaagtcactgctgtggcaaccagtttcaagcagggctgaaccttgcctcttgctctggggatgtctcacttcctgcccctgggcttctcaccagctacaggaactgcctagcacttgggtatgtacaacctggaagaggtgtggggccaccccatcccctcctcaaagaaattcacaggcacagtatgaggctaaagtaacttccatcttggatgctaatctaccatgttgacttctgataaccagttcctggaatgccctctaagatttctacttttatctattaaaagaacacacacacacacacacacactgtaaatcctggccttaagcaagttataggctaagttgtaaacagcattcttgcctttccctgaggaggtgacttcagtgtctcacatgttccttcatgtacccccttttctctatggcatataagccctgggtcggggggtaactgtggggatcactgcctgagacatggcttctgtgcataagtccctattaaatgtttctttctgacaaactggatttgttggcctctttctttggcatctcagcactctcagcctttgggggtaggttgcatagacctggtcactatacaacacatatttcctaggacttgtcacaagttccctcaagatctagcactagtgcctatgttttggctaactcaatgaatatgttgttaataggcttgtctgtcttgtttcattttgccactgttccctgggatcacttcccaaatttacatatgtaagcttttggctcaggctctgcttataggagaaccaaggataaatcaaagcagtgaagtaacactggcagacaaaaagatgacttctaagataattcttttgttactatatattttatgaatgtctatattaaaaaatcttttttttggctgaaaacattcctgcttagattagaccaattctgtcaactataaaactgacaatatattcagattgttttct

SEQ ID NO: 292247 - DNA, 5186 bp, Homo sapiens
ggcccggactgggtcccatcgccccacctccggtcgctggacgtgctctcgcgtagctccgcctttcgtaagtccccccgcctcgcatgatggctgcggtgccgccgggcctggagccgtggaaccgtgtgagaatccctaaggcggggaaccgcagcgcagtgacagtgcagaaccccggcgcggcccttggttgagcaatgtttaaagcgtttgaaaaacatgaatttggagggctcaattcaagacctgtttgagttgttttcttccaatgaaaatcagcccttaactaccaaagtatgtgttgtccccagtcagccagtggtggagttggtgttgatgaaggttttgggagcctgcaagttgttgctccgcttgttggactgctgctgcaaaacttttcttttgactgtgaaacatctaggtttgcaagagttcattattttaaaccttgtgatggttgggctggtgagcaggttatgggttctctataaaggtgtcttaaaaaggttgattttgttatatgagcctttgtttggattgcttcaagaggtcgctaggattcaaccaatgccttacttcaaagattttacctttccttctgatatcactgaatttttaggacagccatattttgaagcctttaagaaaaaaatgcctatagcttttgcagctaaaggaataaataaattgctaaataaactgtttttaataaatgagcagtcaccaagagccagtgaagaaaccttgcttggaatttcaaaaaaagctaaacaaatgaagatcaatgtacagaataatgtggatcttggacagccagtaaagaataagagagtcttcaaagaagagtcatcagaatttgatgtgagggctttctgcaaccagctgaaacacaaagctactcaggagaccagttttgattttaaatgttctcaatccagactaaagacaaccaagtattcttctcagaaagtgataggaactcctcatgccaaaagtattgtgcaaagattccgagaggctgagtccttcacacaactttctgaagaaatccagatggcagttgtatggtgcaggagcaaaaaactcaaggctcaggccatttttctgggtaacaaacttcttaaaagcaaccggcttaaacatctggaagctcaaggtactagtttgccaaagaaactagagtgcataaaaacgtctatttgcaaccaccttcttcgtggctcaggtatcaaaacttcaaagcatcatctgagacagagaagatcacagaataaatttttacggagacaaaggaaaccacagagaaagttgcagtcgactcttttaagggaaattcagcagttctctcaagggactcggaagagtgctacagataccagtgctaagtggagactctcacactgtactgtgcatagaactgatctctaccctaacagtaagcagctcttgaatagtggagtttcaatgcctgtcatacaaactaaggagaaaatgattcatgaaaatcttagaggcatccatgaaaatgaaactgattcgtggacggtgatgcaaataaataaaaacagtacatcaggaaccattaaggagacagatgacattgatgatatttttgctttaatgggagtttagatgttcgttcatatgtgagacttttaagtgattaacaaggctagttcagtgttctaagtagaactgctaagatctggaagtaccacctggactcacagaggagctgctttagtgcagcattgcacaggagttcatttcagttcagtctacatttaaagtagcattgtgtcatttcatcaacaagtatttcttttttggcttcaactacatgtcaggtgttaatatgaaaaatctgccacagcctacccttgagaagcagatgtaattccttgagtgaggctagtaagtctctgaaaaactgaataattttatgacttactaggcaatttaataatcgtttgcaaaaaccattgtgtcttgaggtaaatgaggagcgggggtgggagatagcaaggaaacacctgaaaggtcaatttggtcttattggctccattatacataggtccgcctctgaatactaaagtttgtagctcctgacatttatgttttcttgtttatatgttggaattgatcaacaaggtttgccactgcttgtattaccagggactggttacaaccattatttctcttcatttgcttggcttatctcatattaaagtgagtttggagttctccaaaacgttttaattttatttatttgggtaccagtgattgattccaaataaacctttttacaaaaaggcaataaggtggtttatggttacatatgaaatataataggataacaggtagatgagaaagtaaaatgaaaaaatgaggttaggagatacaaagtagacccaggaatgaggctagaacatttataatttggtgttgatgctgtcatctgataggggatgttgctcgtactgttgctctgaggggagtacatcttgagtattttcaaataatgatgtgaagtttgaggtaggtatctttccaatgttctaactttactagaattaggttattaagcttctctagtgcccttaacttttgttacatagagatttaaagaaaaagaaagtagtaccttagtatgtaccgcatccttcttttcctcagccaccctatcataacagaagttatttcccttccattctttatttggctttgttctttccctgtctgccttctccattttctcagttatctctaccagtggttctcaaactttagactttttgagaatcacctggtgggttgctaaaagatgcagattagccctttcccagagactgataaacaggggccagaaacctgcatttttaacatggagcccaagtgattttgatccaggtggcccccaaatccagttatataaacactactttagcttctctcctgaagccttaagtaaactggtttaattcttaatctgtagtcagttttcatattccttttggctttctaccaagtggtagtatccatttagtgccttaaaatacagacaataccaaggagatttcattctagacaagtctagaaatggccattaacttctaagtgtccttgtgttcaatgaatatcctttacctattgggaaatagaaggtaaattagtaagagaactggtgtatagctttgtggaccatagggcttatttgctgagagttgtctatattcatgcacccagtcccctaagtagcctcttttaatacttcatttagctgattcagaaaaaaactccctgggaattaggagatttaaggttcagtcttgcttctcctacttgtggcttcactgagctagtcagtttcctcaggcttaggtttctggatttgaagtggaattttttcaagaatgaaacttttatagctgaaataaactttggagcttatctttcattggaaaaaccagggtggttcagtgagttaaggacaatatagcatggactgggctgccagtctagcatttgtttccaaattcattcatgttcttttggagtatcttcatctcctctcattttcccatcttctgccctttactattctgggaaaatggcaaaaaagcttcacatgtgtccacaaaatgacaatttgtatgtttataaggaattcagtattctgtatcagttactttttccaaataaatccaaatatttaacatttaaaaaaatgcaatctaaagtataccaaactgtaacttacctagtaaatgagattagaaactattgtcagggtcatcgtagtgaattattattattattattttttgagacagagtcttgtgctgttgcccaggctggagcacagtggtatgatctcagttcactgcaccctccacctcctgggctcaagctattctcccacctcagccgcctgagtagctgacactataggcaccaccatgccctggctaattttttaaaaactttgtgtagagatagggtttcaccatgttgcttaggctggtctcaaactcctggactcaagggatccacccactttggtctcccaaagtgctgggattacccacatcctagtaccaactttatcacttctgatggcattaggacacacaggccatttataagagcagtgtttgagacctcctgtgtgtcacttccaatcctcttggccttcatactaaagtcactgctgtggcaaccagtttcaagcagggctgaaccttgcctcttgctctggggatgtctcacttcctgcccctgggcttctcaccagctacaggaactgcctagcacttgggtatgtacaacctggaagaggtgtggggccaccccatcccctcctcaaagaaattcacaggcacagtatgaggctaaagtaacttccatcttggatgctaatctaccatgttgacttctgataaccagttcctggaatgccctctaagatttctacttttatctattaaaagaacacacacacacacacacacactgtaaatcctggccttaagcaagttataggctaagttgtaaacagcattcttgcctttccctgaggaggtgacttcagtgtctcacatgttccttcatgtacccccttttctctatggcatataagccctgggtcggggggtaactgtggggatcactgcctgagacatggcttctgtgcataagtccctattaaatgtttctttctgacaaactggatttgttggcctctttctttggcatctcagcactctcagcctttgggggtaggttgcatagacctggtcactatacaacacatatttcctaggacttgtcacaagttccctcaagatctagcactagtgcctatgttttggctaactcaatgaatatgttgttaataggcttgtctgtcttgtttcattttgccactgttccctgggatcacttcccaaatttacatatgtaagcttttggctcaggctctgcttataggagaaccaaggataaatcaaagcagtgaagtaacactggcagacaaaaagatgacttctaagataattcttttgttactatatattttatgaatgtctatattaaaaaatcttttttttggctgaaaacattcctgcttagattagaccaattctgtcaactataaaactgacaatatattcagattgttttct

SEQ ID NO: 292248 - DNA, 5381 bp, Homo sapiens
gaagactgtgaatttattcattctgtcttgctttcgggcatagcgacatggggagttagagagttattacacatgttgtgacatgtgccctaccttcaaggtgggggttaagtgtacacatgaggcgtaagtgtacaccaaatgactgacagcaaagtattcatatgaaagattattaaaccatgataaaatgcaatgcaaagatacagcttcttgttttacagatgttctcttaatgatttcctggactttatatcatctgttaccattttccaacttctcttatacttagaatccttacgttcttacagttgagactgattacattagtttttgattcctttaaaacaaataaggaaagatgctttttttagtgtgtttttaatataatatacttactgtagaaatacatactaaatcttattagatgtctctgcttcagacctttgcattgcagctgtaattaaagaatgccatctcgtcatactgtcgctgaagagccaaaccttagatgcagaaacagatgtgttatgtgcagtcctttacagcaatcacaacagaatgggccgccacaaaccccatttggccctcaaacaggttgagcaatgtttaaagcgtttgaaaaacatgaatttggagggctcaattcaagacctgtttgagttgttttcttccaaggttctctataaaggtgtcttaaaaaggttgattttgttatatgagcctttgtttggattgcttcaagaggtcgctaggattcaaccaatgccttacttcaaagattttacctttccttctgatatcactgaatttttaggacagccatattttgaagcctttaagaaaaaaatgcctatagcttttgcagctaaaggaataaataaattgctaaataaactgtttttaataaatgagcagtcaccaagagccagtgaagaaaccttgcttggaatttcaaaaaaagctaaacaaatgaagatcaatgtacagaataatgtggatcttggacagccagtaaagaataagagagtcttcaaagaagagtcatcagaatttgatgtgagggctttctgcaaccagctgaaacacaaagctactcaggagaccagttttgattttaaatgttctcaatccagactaaagacaaccaagtattcttctcagaaagtgataggaactcctcatgccaaaagtattgtgcaaagattccgagaggctgagtccttcacacaactttctgaagaaatccagatggcagttgtatggtgcaggagcaaaaaactcaaggctcaggccatttttctgggtaacaaacttcttaaaagcaaccggcttaaacatctggaagctcaaggtactagtttgccaaagaaactagagtgcataaaaacgtctatttgcaaccaccttcttcgtggctcaggtatcaaaacttcaaagcatcatctgagacagagaagatcacagaataaatttttacggagacaaaggaaaccacagagaaagttgcagtcgactcttttaagggaaattcagcagttctctcaagggactcggaagagtgctacagataccagtgctaagtggagactctcacactgtactgtgcatagaactgatctctaccctaacagtaagcagctcttgaatagtggagtttcaatgcctgtcatacaaactaaggagaaaatgattcatgaaaatcttagaggcatccatgaaaatgaaactgattcgtggacggtgatgcaaataaataaaaacagtacatcaggaaccattaaggagacagatgacattgatgatatttttgctttaatgggagtttagatgttcgttcatatgtgagacttttaagtgattaacaaggctagttcagtgttctaagtagaactgctaagatctggaagtaccacctggactcacagaggagctgctttagtgcagcattgcacaggagttcatttcagttcagtctacatttaaagtagcattgtgtcatttcatcaacaagtatttcttttttggcttcaactacatgtcaggtgttaatatgaaaaatctgccacagcctacccttgagaagcagatgtaattccttgagtgaggctagtaagtctctgaaaaactgaataattttatgacttactaggcaatttaataatcgtttgcaaaaaccattgtgtcttgaggtaaatgaggagcgggggtgggagatagcaaggaaacacctgaaaggtcaatttggtcttattggctccattatacataggtccgcctctgaatactaaagtttgtagctcctgacatttatgttttcttgtttatatgttggaattgatcaacaaggtttgccactgcttgtattaccagggactggttacaaccattatttctcttcatttgcttggcttatctcatattaaagtgagtttggagttctccaaaacgttttaattttatttatttgggtaccagtgattgattccaaataaacctttttacaaaaaggcaataaggtggtttatggttacatatgaaatataataggataacaggtagatgagaaagtaaaatgaaaaaatgaggttaggagatacaaagtagacccaggaatgaggctagaacatttataatttggtgttgatgctgtcatctgataggggatgttgctcgtactgttgctctgaggggagtacatcttgagtattttcaaataatgatgtgaagtttgaggtaggtatctttccaatgttctaactttactagaattaggttattaagcttctctagtgcccttaacttttgttacatagagatttaaagaaaaagaaagtagtaccttagtatgtaccgcatccttcttttcctcagccaccctatcataacagaagttatttcccttccattctttatttggctttgttctttccctgtctgccttctccattttctcagttatctctaccagtggttctcaaactttagactttttgagaatcacctggtgggttgctaaaagatgcagattagccctttcccagagactgataaacaggggccagaaacctgcatttttaacatggagcccaagtgattttgatccaggtggcccccaaatccagttatataaacactactttagcttctctcctgaagccttaagtaaactggtttaattcttaatctgtagtcagttttcatattccttttggctttctaccaagtggtagtatccatttagtgccttaaaatacagacaataccaaggagatttcattctagacaagtctagaaatggccattaacttctaagtgtccttgtgttcaatgaatatcctttacctattgggaaatagaaggtaaattagtaagagaactggtgtatagctttgtggaccatagggcttatttgctgagagttgtctatattcatgcacccagtcccctaagtagcctcttttaatacttcatttagctgattcagaaaaaaactccctgggaattaggagatttaaggttcagtcttgcttctcctacttgtggcttcactgagctagtcagtttcctcaggcttaggtttctggatttgaagtggaattttttcaagaatgaaacttttatagctgaaataaactttggagcttatctttcattggaaaaaccagggtggttcagtgagttaaggacaatatagcatggactgggctgccagtctagcatttgtttccaaattcattcatgttcttttggagtatcttcatctcctctcattttcccatcttctgccctttactattctgggaaaatggcaaaaaagcttcacatgtgtccacaaaatgacaatttgtatgtttataaggaattcagtattctgtatcagttactttttccaaataaatccaaatatttaacatttaaaaaaatgcaatctaaagtataccaaactgtaacttacctagtaaatgagattagaaactattgtcagggtcatcgtagtgaattattattattattattttttgagacagagtcttgtgctgttgcccaggctggagcacagtggtatgatctcagttcactgcaccctccacctcctgggctcaagctattctcccacctcagccgcctgagtagctgacactataggcaccaccatgccctggctaattttttaaaaactttgtgtagagatagggtttcaccatgttgcttaggctggtctcaaactcctggactcaagggatccacccactttggtctcccaaagtgctgggattacccacatcctagtaccaactttatcacttctgatggcattaggacacacaggccatttataagagcagtgtttgagacctcctgtgtgtcacttccaatcctcttggccttcatactaaagtcactgctgtggcaaccagtttcaagcagggctgaaccttgcctcttgctctggggatgtctcacttcctgcccctgggcttctcaccagctacaggaactgcctagcacttgggtatgtacaacctggaagaggtgtggggccaccccatcccctcctcaaagaaattcacaggcacagtatgaggctaaagtaacttccatcttggatgctaatctaccatgttgacttctgataaccagttcctggaatgccctctaagatttctacttttatctattaaaagaacacacacacacacacacacactgtaaatcctggccttaagcaagttataggctaagttgtaaacagcattcttgcctttccctgaggaggtgacttcagtgtctcacatgttccttcatgtacccccttttctctatggcatataagccctgggtcggggggtaactgtggggatcactgcctgagacatggcttctgtgcataagtccctattaaatgtttctttctgacaaactggatttgttggcctctttctttggcatctcagcactctcagcctttgggggtaggttgcatagacctggtcactatacaacacatatttcctaggacttgtcacaagttccctcaagatctagcactagtgcctatgttttggctaactcaatgaatatgttgttaataggcttgtctgtcttgtttcattttgccactgttccctgggatcacttcccaaatttacatatgtaagcttttggctcaggctctgcttataggagaaccaaggataaatcaaagcagtgaagtaacactggcagacaaaaagatgacttctaagataattcttttgttactatatattttatgaatgtctatattaaaaaatcttttttttggctgaaaacattcctgcttagattagaccaattctgtcaactataaaactgacaatatattcagattgttttct

SEQ ID NO: 292249 - DNA, 5131 bp, Homo sapiens
ggcccggactgggtcccatcgccccacctccggtcgctggacgtgctctcgcgtagctccgcctttcgtaagtccccccgcctcgcatgatggctgcggtgccgccgggcctggagccgtggaaccgtgtgagaatccctaaggcggggaaccgcagcgcagtgacagtgcagaaccccggcgcggcccttgacctttgcattgcagctgtaattaaagaatgccatctcgtcatactgtcgctgaagagccaaaccttagatgcagaaacagatgtgttatgtgcagtcctttacagcaatcacaacagaatgggccgccacaaaccccatttggccctcaaacaggttgagcaatgtttaaagcgtttgaaaaacatgaatttggagggctcaattcaagacctgtttgagttgttttcttccaaggttctctataaaggtgtcttaaaaaggttgattttgttatatgagcctttgtttggattgcttcaagaggtcgctaggattcaaccaatgccttacttcaaagattttacctttccttctgatatcactgaatttttaggacagccatattttgaagcctttaagaaaaaaatgcctatagcttttgcagctaaaggaataaataaattgctaaataaactgtttttaataaatgagcagtcaccaagagccagtgaagaaaccttgcttggaatttcaaaaaaagctaaacaaatgaagatcaatgtacagaataatgtggatcttggacagccagtaaagaataagagagtcttcaaagaagagtcatcagaatttgatgtgagggctttctgcaaccagctgaaacacaaagctactcaggagaccagttttgattttaaatgttctcaatccagactaaagacaaccaagtattcttctcagaaagtgataggaactcctcatgccaaaagtattgtgcaaagattccgagaggctgagtccttcacacaactttctgaagaaatccagatggcagttgtatggtgcaggagcaaaaaactcaaggctcaggccatttttctgggtaacaaacttcttaaaagcaaccggcttaaacatctggaagctcaaggtactagtttgccaaagaaactagagtgcataaaaacgtctatttgcaaccaccttcttcgtggctcaggtatcaaaacttcaaagcatcatctgagacagagaagatcacagaataaatttttacggagacaaaggaaaccacagagaaagttgcagtcgactcttttaagggaaattcagcagttctctcaagggactcggaagagtgctacagataccagtgctaagtggagactctcacactgtactgtgcatagaactgatctctaccctaacagtaagcagctcttgaatagtggagtttcaatgcctgtcatacaaactaaggagaaaatgattcatgaaaatcttagaggcatccatgaaaatgaaactgattcgtggacggtgatgcaaataaataaaaacagtacatcaggaaccattaaggagacagatgacattgatgatatttttgctttaatgggagtttagatgttcgttcatatgtgagacttttaagtgattaacaaggctagttcagtgttctaagtagaactgctaagatctggaagtaccacctggactcacagaggagctgctttagtgcagcattgcacaggagttcatttcagttcagtctacatttaaagtagcattgtgtcatttcatcaacaagtatttcttttttggcttcaactacatgtcaggtgttaatatgaaaaatctgccacagcctacccttgagaagcagatgtaattccttgagtgaggctagtaagtctctgaaaaactgaataattttatgacttactaggcaatttaataatcgtttgcaaaaaccattgtgtcttgaggtaaatgaggagcgggggtgggagatagcaaggaaacacctgaaaggtcaatttggtcttattggctccattatacataggtccgcctctgaatactaaagtttgtagctcctgacatttatgttttcttgtttatatgttggaattgatcaacaaggtttgccactgcttgtattaccagggactggttacaaccattatttctcttcatttgcttggcttatctcatattaaagtgagtttggagttctccaaaacgttttaattttatttatttgggtaccagtgattgattccaaataaacctttttacaaaaaggcaataaggtggtttatggttacatatgaaatataataggataacaggtagatgagaaagtaaaatgaaaaaatgaggttaggagatacaaagtagacccaggaatgaggctagaacatttataatttggtgttgatgctgtcatctgataggggatgttgctcgtactgttgctctgaggggagtacatcttgagtattttcaaataatgatgtgaagtttgaggtaggtatctttccaatgttctaactttactagaattaggttattaagcttctctagtgcccttaacttttgttacatagagatttaaagaaaaagaaagtagtaccttagtatgtaccgcatccttcttttcctcagccaccctatcataacagaagttatttcccttccattctttatttggctttgttctttccctgtctgccttctccattttctcagttatctctaccagtggttctcaaactttagactttttgagaatcacctggtgggttgctaaaagatgcagattagccctttcccagagactgataaacaggggccagaaacctgcatttttaacatggagcccaagtgattttgatccaggtggcccccaaatccagttatataaacactactttagcttctctcctgaagccttaagtaaactggtttaattcttaatctgtagtcagttttcatattccttttggctttctaccaagtggtagtatccatttagtgccttaaaatacagacaataccaaggagatttcattctagacaagtctagaaatggccattaacttctaagtgtccttgtgttcaatgaatatcctttacctattgggaaatagaaggtaaattagtaagagaactggtgtatagctttgtggaccatagggcttatttgctgagagttgtctatattcatgcacccagtcccctaagtagcctcttttaatacttcatttagctgattcagaaaaaaactccctgggaattaggagatttaaggttcagtcttgcttctcctacttgtggcttcactgagctagtcagtttcctcaggcttaggtttctggatttgaagtggaattttttcaagaatgaaacttttatagctgaaataaactttggagcttatctttcattggaaaaaccagggtggttcagtgagttaaggacaatatagcatggactgggctgccagtctagcatttgtttccaaattcattcatgttcttttggagtatcttcatctcctctcattttcccatcttctgccctttactattctgggaaaatggcaaaaaagcttcacatgtgtccacaaaatgacaatttgtatgtttataaggaattcagtattctgtatcagttactttttccaaataaatccaaatatttaacatttaaaaaaatgcaatctaaagtataccaaactgtaacttacctagtaaatgagattagaaactattgtcagggtcatcgtagtgaattattattattattattttttgagacagagtcttgtgctgttgcccaggctggagcacagtggtatgatctcagttcactgcaccctccacctcctgggctcaagctattctcccacctcagccgcctgagtagctgacactataggcaccaccatgccctggctaattttttaaaaactttgtgtagagatagggtttcaccatgttgcttaggctggtctcaaactcctggactcaagggatccacccactttggtctcccaaagtgctgggattacccacatcctagtaccaactttatcacttctgatggcattaggacacacaggccatttataagagcagtgtttgagacctcctgtgtgtcacttccaatcctcttggccttcatactaaagtcactgctgtggcaaccagtttcaagcagggctgaaccttgcctcttgctctggggatgtctcacttcctgcccctgggcttctcaccagctacaggaactgcctagcacttgggtatgtacaacctggaagaggtgtggggccaccccatcccctcctcaaagaaattcacaggcacagtatgaggctaaagtaacttccatcttggatgctaatctaccatgttgacttctgataaccagttcctggaatgccctctaagatttctacttttatctattaaaagaacacacacacacacacacacactgtaaatcctggccttaagcaagttataggctaagttgtaaacagcattcttgcctttccctgaggaggtgacttcagtgtctcacatgttccttcatgtacccccttttctctatggcatataagccctgggtcggggggtaactgtggggatcactgcctgagacatggcttctgtgcataagtccctattaaatgtttctttctgacaaactggatttgttggcctctttctttggcatctcagcactctcagcctttgggggtaggttgcatagacctggtcactatacaacacatatttcctaggacttgtcacaagttccctcaagatctagcactagtgcctatgttttggctaactcaatgaatatgttgttaataggcttgtctgtcttgtttcattttgccactgttccctgggatcacttcccaaatttacatatgtaagcttttggctcaggctctgcttataggagaaccaaggataaatcaaagcagtgaagtaacactggcagacaaaaagatgacttctaagataattcttttgttactatatattttatgaatgtctatattaaaaaatcttttttttggctgaaaacattcctgcttagattagaccaattctgtcaactataaaactgacaatatattcagattgttttct

SEQ ID NO: 292250 - DNA, 5287 bp, Homo sapiens
ggcccggactgggtcccatcgccccacctccggtcgctggacgtgctctcgcgtagctccgcctttcgtaagtccccccgcctcgcatgatggctgcggtgccgccgggcctggagccgtggaaccgtgtgagaatccctaaggcggggaaccgcagcgcagtgacagtgcagaaccccggcgcggcccttgacctttgcattgcagctgtaattaaagaatgccatctcgtcatactgtcgctgaagagccaaaccttagatgcagaaacagatgtgttatgtgcagtcctttacagcaatcacaacagaatgggccgccacaaaccccatttggccctcaaacaggttgagcaatgtttaaagcgtttgaaaaacatgaatttggagggctcaattcaagacctgtttgagttgttttcttccaatgaaaatcagcccttaactaccaaagtatgtgttgtccccagtcagccagtggtggagttggtgttgatgaaggttttgggagcctgcaagttgttgctccgcttgttggactgctgctgcaaaacttttcttttgactgtgaaacatctaggtttgcaagagttcattattttaaaccttgtgatggttgggctggtgagcaggttatgggttctctataaaggtgtcttaaaaaggttgattttgttatatgagcctttgtttggattgcttcaagaggtcgctaggattcaaccaatgccttacttcaaagattttacctttccttctgatatcactgaatttttaggacagccatattttgaagcctttaagaaaaaaatgcctatagcttttgcagctaaaggaataaataaattgctaaataaactgtttttaataaatgagcagtcaccaagagccagtgaagaaaccttgcttggaatttcaaaaaaagctaaacaaatgaagatcaatgtacagaataatgtggatcttggacagccagtaaagaataagagagtcttcaaagaagagtcatcagaatttgatgtgagggctttctgcaaccagctgaaacacaaagctactcaggagaccagttttgattttaaatgttctcaatccagactaaagacaaccaagtattcttctcagaaagtgataggaactcctcatgccaaaagtattgtgcaaagattccgagaggctgagtccttcacacaactttctgaagaaatccagatggcagttgtatggtgcaggagcaaaaaactcaaggctcaggccatttttctgggtaacaaacttcttaaaagcaaccggcttaaacatctggaagctcaaggtactagtttgccaaagaaactagagtgcataaaaacgtctatttgcaaccaccttcttcgtggctcaggtatcaaaacttcaaagcatcatctgagacagagaagatcacagaataaatttttacggagacaaaggaaaccacagagaaagttgcagtcgactcttttaagggaaattcagcagttctctcaagggactcggaagagtgctacagataccagtgctaagtggagactctcacactgtactgtgcatagaactgatctctaccctaacagtaagcagctcttgaatagtggagtttcaatgcctgtcatacaaactaaggagaaaatgattcatgaaaatcttagaggcatccatgaaaatgaaactgattcgtggacggtgatgcaaataaatactttaatgggagtttagatgttcgttcatatgtgagacttttaagtgattaacaaggctagttcagtgttctaagtagaactgctaagatctggaagtaccacctggactcacagaggagctgctttagtgcagcattgcacaggagttcatttcagttcagtctacatttaaagtagcattgtgtcatttcatcaacaagtatttcttttttggcttcaactacatgtcaggtgttaatatgaaaaatctgccacagcctacccttgagaagcagatgtaattccttgagtgaggctagtaagtctctgaaaaactgaataattttatgacttactaggcaatttaataatcgtttgcaaaaaccattgtgtcttgaggtaaatgaggagcgggggtgggagatagcaaggaaacacctgaaaggtcaatttggtcttattggctccattatacataggtccgcctctgaatactaaagtttgtagctcctgacatttatgttttcttgtttatatgttggaattgatcaacaaggtttgccactgcttgtattaccagggactggttacaaccattatttctcttcatttgcttggcttatctcatattaaagtgagtttggagttctccaaaacgttttaattttatttatttgggtaccagtgattgattccaaataaacctttttacaaaaaggcaataaggtggtttatggttacatatgaaatataataggataacaggtagatgagaaagtaaaatgaaaaaatgaggttaggagatacaaagtagacccaggaatgaggctagaacatttataatttggtgttgatgctgtcatctgataggggatgttgctcgtactgttgctctgaggggagtacatcttgagtattttcaaataatgatgtgaagtttgaggtaggtatctttccaatgttctaactttactagaattaggttattaagcttctctagtgcccttaacttttgttacatagagatttaaagaaaaagaaagtagtaccttagtatgtaccgcatccttcttttcctcagccaccctatcataacagaagttatttcccttccattctttatttggctttgttctttccctgtctgccttctccattttctcagttatctctaccagtggttctcaaactttagactttttgagaatcacctggtgggttgctaaaagatgcagattagccctttcccagagactgataaacaggggccagaaacctgcatttttaacatggagcccaagtgattttgatccaggtggcccccaaatccagttatataaacactactttagcttctctcctgaagccttaagtaaactggtttaattcttaatctgtagtcagttttcatattccttttggctttctaccaagtggtagtatccatttagtgccttaaaatacagacaataccaaggagatttcattctagacaagtctagaaatggccattaacttctaagtgtccttgtgttcaatgaatatcctttacctattgggaaatagaaggtaaattagtaagagaactggtgtatagctttgtggaccatagggcttatttgctgagagttgtctatattcatgcacccagtcccctaagtagcctcttttaatacttcatttagctgattcagaaaaaaactccctgggaattaggagatttaaggttcagtcttgcttctcctacttgtggcttcactgagctagtcagtttcctcaggcttaggtttctggatttgaagtggaattttttcaagaatgaaacttttatagctgaaataaactttggagcttatctttcattggaaaaaccagggtggttcagtgagttaaggacaatatagcatggactgggctgccagtctagcatttgtttccaaattcattcatgttcttttggagtatcttcatctcctctcattttcccatcttctgccctttactattctgggaaaatggcaaaaaagcttcacatgtgtccacaaaatgacaatttgtatgtttataaggaattcagtattctgtatcagttactttttccaaataaatccaaatatttaacatttaaaaaaatgcaatctaaagtataccaaactgtaacttacctagtaaatgagattagaaactattgtcagggtcatcgtagtgaattattattattattattttttgagacagagtcttgtgctgttgcccaggctggagcacagtggtatgatctcagttcactgcaccctccacctcctgggctcaagctattctcccacctcagccgcctgagtagctgacactataggcaccaccatgccctggctaattttttaaaaactttgtgtagagatagggtttcaccatgttgcttaggctggtctcaaactcctggactcaagggatccacccactttggtctcccaaagtgctgggattacccacatcctagtaccaactttatcacttctgatggcattaggacacacaggccatttataagagcagtgtttgagacctcctgtgtgtcacttccaatcctcttggccttcatactaaagtcactgctgtggcaaccagtttcaagcagggctgaaccttgcctcttgctctggggatgtctcacttcctgcccctgggcttctcaccagctacaggaactgcctagcacttgggtatgtacaacctggaagaggtgtggggccaccccatcccctcctcaaagaaattcacaggcacagtatgaggctaaagtaacttccatcttggatgctaatctaccatgttgacttctgataaccagttcctggaatgccctctaagatttctacttttatctattaaaagaacacacacacacacacacacactgtaaatcctggccttaagcaagttataggctaagttgtaaacagcattcttgcctttccctgaggaggtgacttcagtgtctcacatgttccttcatgtacccccttttctctatggcatataagccctgggtcggggggtaactgtggggatcactgcctgagacatggcttctgtgcataagtccctattaaatgtttctttctgacaaactggatttgttggcctctttctttggcatctcagcactctcagcctttgggggtaggttgcatagacctggtcactatacaacacatatttcctaggacttgtcacaagttccctcaagatctagcactagtgcctatgttttggctaactcaatgaatatgttgttaataggcttgtctgtcttgtttcattttgccactgttccctgggatcacttcccaaatttacatatgtaagcttttggctcaggctctgcttataggagaaccaaggataaatcaaagcagtgaagtaacactggcagacaaaaagatgacttctaagataattcttttgttactatatattttatgaatgtctatattaaaaaatcttttttttggctgaaaacattcctgcttagattagaccaattctgtcaactataaaactgacaatatattcagattgttttct

SEQ ID NO: 292251 - DNA, 4945 bp, Homo sapiens
ggcccggactgggtcccatcgccccacctccggtcgctggacgtgctctcgcgtagctccgcctttcgtaagtccccccgcctcgcatgatggctgcggtgccgccgggcctggagccgtggaaccgtgtgagaatccctaaggcggggaaccgcagcgcagtgacagtgcagaaccccggcgcggcccttggttgagcaatgtttaaagcgtttgaaaaacatgaatttggagggctcaattcaagacctgtttgagttgttttcttccaatgaaaatcagcccttaactaccaaagtatgtgttgtccccagtcagccagtggtggagttggtgttgatgaaggttttgggagcctgcaagttgttgctccgcttgttggactgctgctgcaaaacttttcttttgactgtgaaacatctaggtttgcaagagttcattattttaaaccttgtgatggttgggctggtgagcaggttatgtcaccaagagccagtgaagaaaccttgcttggaatttcaaaaaaagctaaacaaatgaagatcaatgtacagaataatgtggatcttggacagccagtaaagaataagagagtcttcaaagaagagtcatcagaatttgatgtgagggctttctgcaaccagctgaaacacaaagctactcaggagaccagttttgattttaaatgttctcaatccagactaaagacaaccaagtattcttctcagaaagtgataggaactcctcatgccaaaagtattgtgcaaagattccgagaggctgagtccttcacacaactttctgaagaaatccagatggcagttgtatggtgcaggagcaaaaaactcaaggctcaggccatttttctgggtaacaaacttcttaaaagcaaccggcttaaacatctggaagctcaaggtactagtttgccaaagaaactagagtgcataaaaacgtctatttgcaaccaccttcttcgtggctcaggtatcaaaacttcaaagcatcatctgagacagagaagatcacagaataaatttttacggagacaaaggaaaccacagagaaagttgcagtcgactcttttaagggaaattcagcagttctctcaagggactcggaagagtgctacagataccagtgctaagtggagactctcacactgtactgtgcatagaactgatctctaccctaacagtaagcagctcttgaatagtggagtttcaatgcctgtcatacaaactaaggagaaaatgattcatgaaaatcttagaggcatccatgaaaatgaaactgattcgtggacggtgatgcaaataaataaaaacagtacatcaggaaccattaaggagacagatgacattgatgatatttttgctttaatgggagtttagatgttcgttcatatgtgagacttttaagtgattaacaaggctagttcagtgttctaagtagaactgctaagatctggaagtaccacctggactcacagaggagctgctttagtgcagcattgcacaggagttcatttcagttcagtctacatttaaagtagcattgtgtcatttcatcaacaagtatttcttttttggcttcaactacatgtcaggtgttaatatgaaaaatctgccacagcctacccttgagaagcagatgtaattccttgagtgaggctagtaagtctctgaaaaactgaataattttatgacttactaggcaatttaataatcgtttgcaaaaaccattgtgtcttgaggtaaatgaggagcgggggtgggagatagcaaggaaacacctgaaaggtcaatttggtcttattggctccattatacataggtccgcctctgaatactaaagtttgtagctcctgacatttatgttttcttgtttatatgttggaattgatcaacaaggtttgccactgcttgtattaccagggactggttacaaccattatttctcttcatttgcttggcttatctcatattaaagtgagtttggagttctccaaaacgttttaattttatttatttgggtaccagtgattgattccaaataaacctttttacaaaaaggcaataaggtggtttatggttacatatgaaatataataggataacaggtagatgagaaagtaaaatgaaaaaatgaggttaggagatacaaagtagacccaggaatgaggctagaacatttataatttggtgttgatgctgtcatctgataggggatgttgctcgtactgttgctctgaggggagtacatcttgagtattttcaaataatgatgtgaagtttgaggtaggtatctttccaatgttctaactttactagaattaggttattaagcttctctagtgcccttaacttttgttacatagagatttaaagaaaaagaaagtagtaccttagtatgtaccgcatccttcttttcctcagccaccctatcataacagaagttatttcccttccattctttatttggctttgttctttccctgtctgccttctccattttctcagttatctctaccagtggttctcaaactttagactttttgagaatcacctggtgggttgctaaaagatgcagattagccctttcccagagactgataaacaggggccagaaacctgcatttttaacatggagcccaagtgattttgatccaggtggcccccaaatccagttatataaacactactttagcttctctcctgaagccttaagtaaactggtttaattcttaatctgtagtcagttttcatattccttttggctttctaccaagtggtagtatccatttagtgccttaaaatacagacaataccaaggagatttcattctagacaagtctagaaatggccattaacttctaagtgtccttgtgttcaatgaatatcctttacctattgggaaatagaaggtaaattagtaagagaactggtgtatagctttgtggaccatagggcttatttgctgagagttgtctatattcatgcacccagtcccctaagtagcctcttttaatacttcatttagctgattcagaaaaaaactccctgggaattaggagatttaaggttcagtcttgcttctcctacttgtggcttcactgagctagtcagtttcctcaggcttaggtttctggatttgaagtggaattttttcaagaatgaaacttttatagctgaaataaactttggagcttatctttcattggaaaaaccagggtggttcagtgagttaaggacaatatagcatggactgggctgccagtctagcatttgtttccaaattcattcatgttcttttggagtatcttcatctcctctcattttcccatcttctgccctttactattctgggaaaatggcaaaaaagcttcacatgtgtccacaaaatgacaatttgtatgtttataaggaattcagtattctgtatcagttactttttccaaataaatccaaatatttaacatttaaaaaaatgcaatctaaagtataccaaactgtaacttacctagtaaatgagattagaaactattgtcagggtcatcgtagtgaattattattattattattttttgagacagagtcttgtgctgttgcccaggctggagcacagtggtatgatctcagttcactgcaccctccacctcctgggctcaagctattctcccacctcagccgcctgagtagctgacactataggcaccaccatgccctggctaattttttaaaaactttgtgtagagatagggtttcaccatgttgcttaggctggtctcaaactcctggactcaagggatccacccactttggtctcccaaagtgctgggattacccacatcctagtaccaactttatcacttctgatggcattaggacacacaggccatttataagagcagtgtttgagacctcctgtgtgtcacttccaatcctcttggccttcatactaaagtcactgctgtggcaaccagtttcaagcagggctgaaccttgcctcttgctctggggatgtctcacttcctgcccctgggcttctcaccagctacaggaactgcctagcacttgggtatgtacaacctggaagaggtgtggggccaccccatcccctcctcaaagaaattcacaggcacagtatgaggctaaagtaacttccatcttggatgctaatctaccatgttgacttctgataaccagttcctggaatgccctctaagatttctacttttatctattaaaagaacacacacacacacacacacactgtaaatcctggccttaagcaagttataggctaagttgtaaacagcattcttgcctttccctgaggaggtgacttcagtgtctcacatgttccttcatgtacccccttttctctatggcatataagccctgggtcggggggtaactgtggggatcactgcctgagacatggcttctgtgcataagtccctattaaatgtttctttctgacaaactggatttgttggcctctttctttggcatctcagcactctcagcctttgggggtaggttgcatagacctggtcactatacaacacatatttcctaggacttgtcacaagttccctcaagatctagcactagtgcctatgttttggctaactcaatgaatatgttgttaataggcttgtctgtcttgtttcattttgccactgttccctgggatcacttcccaaatttacatatgtaagcttttggctcaggctctgcttataggagaaccaaggataaatcaaagcagtgaagtaacactggcagacaaaaagatgacttctaagataattcttttgttactatatattttatgaatgtctatattaaaaaatcttttttttggctgaaaacattcctgcttagattagaccaattctgtcaactataaaactgacaatatattcagattgttttct

SEQ ID NO: 292252 - DNA, 4639 bp, Homo sapiens
tcctggtacagagggggaacaaaacaacttgtatttggagcagtggagaaaaattcagtttttaaagacataaggaaagcttagtgagcaaaaaaatttccttacagactgattttttttttttaatttttaggttttgtgggtacgtagcaggtatatatatttatggggtacgtattttgttataagcatatagtgcataataaccacagggtaaatggggtatccatcacttcaagcatttagggactgataattctaatttttaaattttgattgtgagctagctttccttgttgtcatataattacaagtcagtaacatgtccaatatatttttctcatctttccacgtttcaggagaccagttttgattttaaatgttctcaatccagactaaagacaaccaagtattcttctcagaaagtgataggaactcctcatgccaaaagtattgtgcaaagattccgagaggctgagtccttcacacaactttctgaagaaatccagatggcagttgtatggtgcaggagcaaaaaactcaaggctcaggccatttttctgggtaacaaacttcttaaaagcaaccggcttaaacatctggaagctcaaggtactagtttgccaaagaaactagagtgcataaaaacgtctatttgcaaccaccttcttcgtggctcaggtatcaaaacttcaaagcatcatctgagacagagaagatcacagaataaatttttacggagacaaaggaaaccacagagaaagttgcagtcgactcttttaagggaaattcagcagttctctcaagggactcggaagagtgctacagataccagtgctaagtggagactctcacactgtactgtgcatagaactgatctctaccctaacagtaagcagctcttgaatagtggagtttcaatgcctgtcatacaaactaaggagaaaatgattcatgaaaatcttagaggcatccatgaaaatgaaactgattcgtggacggtgatgcaaataaataaaaacagtacatcaggaaccattaaggagacagatgacattgatgatatttttgctttaatgggagtttagatgttcgttcatatgtgagacttttaagtgattaacaaggctagttcagtgttctaagtagaactgctaagatctggaagtaccacctggactcacagaggagctgctttagtgcagcattgcacaggagttcatttcagttcagtctacatttaaagtagcattgtgtcatttcatcaacaagtatttcttttttggcttcaactacatgtcaggtgttaatatgaaaaatctgccacagcctacccttgagaagcagatgtaattccttgagtgaggctagtaagtctctgaaaaactgaataattttatgacttactaggcaatttaataatcgtttgcaaaaaccattgtgtcttgaggtaaatgaggagcgggggtgggagatagcaaggaaacacctgaaaggtcaatttggtcttattggctccattatacataggtccgcctctgaatactaaagtttgtagctcctgacatttatgttttcttgtttatatgttggaattgatcaacaaggtttgccactgcttgtattaccagggactggttacaaccattatttctcttcatttgcttggcttatctcatattaaagtgagtttggagttctccaaaacgttttaattttatttatttgggtaccagtgattgattccaaataaacctttttacaaaaaggcaataaggtggtttatggttacatatgaaatataataggataacaggtagatgagaaagtaaaatgaaaaaatgaggttaggagatacaaagtagacccaggaatgaggctagaacatttataatttggtgttgatgctgtcatctgataggggatgttgctcgtactgttgctctgaggggagtacatcttgagtattttcaaataatgatgtgaagtttgaggtaggtatctttccaatgttctaactttactagaattaggttattaagcttctctagtgcccttaacttttgttacatagagatttaaagaaaaagaaagtagtaccttagtatgtaccgcatccttcttttcctcagccaccctatcataacagaagttatttcccttccattctttatttggctttgttctttccctgtctgccttctccattttctcagttatctctaccagtggttctcaaactttagactttttgagaatcacctggtgggttgctaaaagatgcagattagccctttcccagagactgataaacaggggccagaaacctgcatttttaacatggagcccaagtgattttgatccaggtggcccccaaatccagttatataaacactactttagcttctctcctgaagccttaagtaaactggtttaattcttaatctgtagtcagttttcatattccttttggctttctaccaagtggtagtatccatttagtgccttaaaatacagacaataccaaggagatttcattctagacaagtctagaaatggccattaacttctaagtgtccttgtgttcaatgaatatcctttacctattgggaaatagaaggtaaattagtaagagaactggtgtatagctttgtggaccatagggcttatttgctgagagttgtctatattcatgcacccagtcccctaagtagcctcttttaatacttcatttagctgattcagaaaaaaactccctgggaattaggagatttaaggttcagtcttgcttctcctacttgtggcttcactgagctagtcagtttcctcaggcttaggtttctggatttgaagtggaattttttcaagaatgaaacttttatagctgaaataaactttggagcttatctttcattggaaaaaccagggtggttcagtgagttaaggacaatatagcatggactgggctgccagtctagcatttgtttccaaattcattcatgttcttttggagtatcttcatctcctctcattttcccatcttctgccctttactattctgggaaaatggcaaaaaagcttcacatgtgtccacaaaatgacaatttgtatgtttataaggaattcagtattctgtatcagttactttttccaaataaatccaaatatttaacatttaaaaaaatgcaatctaaagtataccaaactgtaacttacctagtaaatgagattagaaactattgtcagggtcatcgtagtgaattattattattattattttttgagacagagtcttgtgctgttgcccaggctggagcacagtggtatgatctcagttcactgcaccctccacctcctgggctcaagctattctcccacctcagccgcctgagtagctgacactataggcaccaccatgccctggctaattttttaaaaactttgtgtagagatagggtttcaccatgttgcttaggctggtctcaaactcctggactcaagggatccacccactttggtctcccaaagtgctgggattacccacatcctagtaccaactttatcacttctgatggcattaggacacacaggccatttataagagcagtgtttgagacctcctgtgtgtcacttccaatcctcttggccttcatactaaagtcactgctgtggcaaccagtttcaagcagggctgaaccttgcctcttgctctggggatgtctcacttcctgcccctgggcttctcaccagctacaggaactgcctagcacttgggtatgtacaacctggaagaggtgtggggccaccccatcccctcctcaaagaaattcacaggcacagtatgaggctaaagtaacttccatcttggatgctaatctaccatgttgacttctgataaccagttcctggaatgccctctaagatttctacttttatctattaaaagaacacacacacacacacacacactgtaaatcctggccttaagcaagttataggctaagttgtaaacagcattcttgcctttccctgaggaggtgacttcagtgtctcacatgttccttcatgtacccccttttctctatggcatataagccctgggtcggggggtaactgtggggatcactgcctgagacatggcttctgtgcataagtccctattaaatgtttctttctgacaaactggatttgttggcctctttctttggcatctcagcactctcagcctttgggggtaggttgcatagacctggtcactatacaacacatatttcctaggacttgtcacaagttccctcaagatctagcactagtgcctatgttttggctaactcaatgaatatgttgttaataggcttgtctgtcttgtttcattttgccactgttccctgggatcacttcccaaatttacatatgtaagcttttggctcaggctctgcttataggagaaccaaggataaatcaaagcagtgaagtaacactggcagacaaaaagatgacttctaagataattcttttgttactatatattttatgaatgtctatattaaaaaatcttttttttggctgaaaacattcctgcttagattagaccaattctgtcaactataaaactgacaatatattcagattgttttct

SEQ ID NO: 292253 - DNA, 4365 bp, Homo sapiens
agtctagaggagtccctacatacaagagtcatcagaatttgatgtgagggctttctgcaaccagctgaaacacaaagctactcaggagaccagttttgattttaaatgttctcaatccagactaaagacaaccaagtattcttctcagaaagtgataggaactcctcatgccaaaagtattgtgcaaagattccgagaggctgagtccttcacacaactttctgaagaaatccagatggcagttgtatggtgcaggagcaaaaaactcaaggctcaggccatttttctgggtaacaaacttcttaaaagcaaccggcttaaacatctggaagctcaaggtactagtttgccaaagaaactagagtgcataaaaacgtctatttgcaaccaccttcttcgtggctcaggtatcaaaacttcaaagcatcatctgagacagagaagatcacagaataaatttttacggagacaaaggaaaccacagagaaagttgcagtcgactcttttaagggaaattcagcagttctctcaagggactcggaagagtgctacagataccagtgctaagtggagactctcacactgtactgtgcatagaactgatctctaccctaacagtaagcagctcttgaatagtggagtttcaatgcctgtcatacaaactaaggagaaaatgattcatgaaaatcttagaggcatccatgaaaatgaaactgattcgtggacggtgatgcaaataaataaaaacagtacatcaggaaccattaaggagacagatgacattgatgatatttttgctttaatgggagtttagatgttcgttcatatgtgagacttttaagtgattaacaaggctagttcagtgttctaagtagaactgctaagatctggaagtaccacctggactcacagaggagctgctttagtgcagcattgcacaggagttcatttcagttcagtctacatttaaagtagcattgtgtcatttcatcaacaagtatttcttttttggcttcaactacatgtcaggtgttaatatgaaaaatctgccacagcctacccttgagaagcagatgtaattccttgagtgaggctagtaagtctctgaaaaactgaataattttatgacttactaggcaatttaataatcgtttgcaaaaaccattgtgtcttgaggtaaatgaggagcgggggtgggagatagcaaggaaacacctgaaaggtcaatttggtcttattggctccattatacataggtccgcctctgaatactaaagtttgtagctcctgacatttatgttttcttgtttatatgttggaattgatcaacaaggtttgccactgcttgtattaccagggactggttacaaccattatttctcttcatttgcttggcttatctcatattaaagtgagtttggagttctccaaaacgttttaattttatttatttgggtaccagtgattgattccaaataaacctttttacaaaaaggcaataaggtggtttatggttacatatgaaatataataggataacaggtagatgagaaagtaaaatgaaaaaatgaggttaggagatacaaagtagacccaggaatgaggctagaacatttataatttggtgttgatgctgtcatctgataggggatgttgctcgtactgttgctctgaggggagtacatcttgagtattttcaaataatgatgtgaagtttgaggtaggtatctttccaatgttctaactttactagaattaggttattaagcttctctagtgcccttaacttttgttacatagagatttaaagaaaaagaaagtagtaccttagtatgtaccgcatccttcttttcctcagccaccctatcataacagaagttatttcccttccattctttatttggctttgttctttccctgtctgccttctccattttctcagttatctctaccagtggttctcaaactttagactttttgagaatcacctggtgggttgctaaaagatgcagattagccctttcccagagactgataaacaggggccagaaacctgcatttttaacatggagcccaagtgattttgatccaggtggcccccaaatccagttatataaacactactttagcttctctcctgaagccttaagtaaactggtttaattcttaatctgtagtcagttttcatattccttttggctttctaccaagtggtagtatccatttagtgccttaaaatacagacaataccaaggagatttcattctagacaagtctagaaatggccattaacttctaagtgtccttgtgttcaatgaatatcctttacctattgggaaatagaaggtaaattagtaagagaactggtgtatagctttgtggaccatagggcttatttgctgagagttgtctatattcatgcacccagtcccctaagtagcctcttttaatacttcatttagctgattcagaaaaaaactccctgggaattaggagatttaaggttcagtcttgcttctcctacttgtggcttcactgagctagtcagtttcctcaggcttaggtttctggatttgaagtggaattttttcaagaatgaaacttttatagctgaaataaactttggagcttatctttcattggaaaaaccagggtggttcagtgagttaaggacaatatagcatggactgggctgccagtctagcatttgtttccaaattcattcatgttcttttggagtatcttcatctcctctcattttcccatcttctgccctttactattctgggaaaatggcaaaaaagcttcacatgtgtccacaaaatgacaatttgtatgtttataaggaattcagtattctgtatcagttactttttccaaataaatccaaatatttaacatttaaaaaaatgcaatctaaagtataccaaactgtaacttacctagtaaatgagattagaaactattgtcagggtcatcgtagtgaattattattattattattttttgagacagagtcttgtgctgttgcccaggctggagcacagtggtatgatctcagttcactgcaccctccacctcctgggctcaagctattctcccacctcagccgcctgagtagctgacactataggcaccaccatgccctggctaattttttaaaaactttgtgtagagatagggtttcaccatgttgcttaggctggtctcaaactcctggactcaagggatccacccactttggtctcccaaagtgctgggattacccacatcctagtaccaactttatcacttctgatggcattaggacacacaggccatttataagagcagtgtttgagacctcctgtgtgtcacttccaatcctcttggccttcatactaaagtcactgctgtggcaaccagtttcaagcagggctgaaccttgcctcttgctctggggatgtctcacttcctgcccctgggcttctcaccagctacaggaactgcctagcacttgggtatgtacaacctggaagaggtgtggggccaccccatcccctcctcaaagaaattcacaggcacagtatgaggctaaagtaacttccatcttggatgctaatctaccatgttgacttctgataaccagttcctggaatgccctctaagatttctacttttatctattaaaagaacacacacacacacacacacactgtaaatcctggccttaagcaagttataggctaagttgtaaacagcattcttgcctttccctgaggaggtgacttcagtgtctcacatgttccttcatgtacccccttttctctatggcatataagccctgggtcggggggtaactgtggggatcactgcctgagacatggcttctgtgcataagtccctattaaatgtttctttctgacaaactggatttgttggcctctttctttggcatctcagcactctcagcctttgggggtaggttgcatagacctggtcactatacaacacatatttcctaggacttgtcacaagttccctcaagatctagcactagtgcctatgttttggctaactcaatgaatatgttgttaataggcttgtctgtcttgtttcattttgccactgttccctgggatcacttcccaaatttacatatgtaagcttttggctcaggctctgcttataggagaaccaaggataaatcaaagcagtgaagtaacactggcagacaaaaagatgacttctaagataattcttttgttactatatattttatgaatgtctatattaaaaaatcttttttttggctgaaaacattcctgcttagattagaccaattctgtcaactataaaactgacaatatattcagattgttttct

SEQ ID NO: 292254 - DNA, 4552 bp, Homo sapiens
ggcccggactgggtcccatcgccccacctccggtcgctggacgtgctctcgcgtagctccgcctttcgtaagtccccccgcctcgcatgatggctgcggtgccgccgggcctggagccgtggaaccgtgtgagaatccctaaggcggggaaccgcagcgcagtgacagtgcagaaccccggcgcggcccttggttgagcaatgtttaaagcgtttgaaaaacatgaatttggagggctcaattcaagacctgtttgagttgttttcttccaagagaccagttttgattttaaatgttctcaatccagactaaagacaaccaagtattcttctcagaaagtgataggaactcctcatgccaaaagtattgtgcaaagattccgagaggctgagtccttcacacaactttctgaagaaatccagatggcagttgtatggtgcaggagcaaaaaactcaaggctcaggccatttttctgggtaacaaacttcttaaaagcaaccggcttaaacatctggaagctcaaggtactagtttgccaaagaaactagagtgcataaaaacgtctatttgcaaccaccttcttcgtggctcaggtatcaaaacttcaaagcatcatctgagacagagaagatcacagaataaatttttacggagacaaaggaaaccacagagaaagttgcagtcgactcttttaagggaaattcagcagttctctcaagggactcggaagagtgctacagataccagtgctaagtggagactctcacactgtactgtgcatagaactgatctctaccctaacagtaagcagctcttgaatagtggagtttcaatgcctgtcatacaaactaaggagaaaatgattcatgaaaatcttagaggcatccatgaaaatgaaactgattcgtggacggtgatgcaaataaataaaaacagtacatcaggaaccattaaggagacagatgacattgatgatatttttgctttaatgggagtttagatgttcgttcatatgtgagacttttaagtgattaacaaggctagttcagtgttctaagtagaactgctaagatctggaagtaccacctggactcacagaggagctgctttagtgcagcattgcacaggagttcatttcagttcagtctacatttaaagtagcattgtgtcatttcatcaacaagtatttcttttttggcttcaactacatgtcaggtgttaatatgaaaaatctgccacagcctacccttgagaagcagatgtaattccttgagtgaggctagtaagtctctgaaaaactgaataattttatgacttactaggcaatttaataatcgtttgcaaaaaccattgtgtcttgaggtaaatgaggagcgggggtgggagatagcaaggaaacacctgaaaggtcaatttggtcttattggctccattatacataggtccgcctctgaatactaaagtttgtagctcctgacatttatgttttcttgtttatatgttggaattgatcaacaaggtttgccactgcttgtattaccagggactggttacaaccattatttctcttcatttgcttggcttatctcatattaaagtgagtttggagttctccaaaacgttttaattttatttatttgggtaccagtgattgattccaaataaacctttttacaaaaaggcaataaggtggtttatggttacatatgaaatataataggataacaggtagatgagaaagtaaaatgaaaaaatgaggttaggagatacaaagtagacccaggaatgaggctagaacatttataatttggtgttgatgctgtcatctgataggggatgttgctcgtactgttgctctgaggggagtacatcttgagtattttcaaataatgatgtgaagtttgaggtaggtatctttccaatgttctaactttactagaattaggttattaagcttctctagtgcccttaacttttgttacatagagatttaaagaaaaagaaagtagtaccttagtatgtaccgcatccttcttttcctcagccaccctatcataacagaagttatttcccttccattctttatttggctttgttctttccctgtctgccttctccattttctcagttatctctaccagtggttctcaaactttagactttttgagaatcacctggtgggttgctaaaagatgcagattagccctttcccagagactgataaacaggggccagaaacctgcatttttaacatggagcccaagtgattttgatccaggtggcccccaaatccagttatataaacactactttagcttctctcctgaagccttaagtaaactggtttaattcttaatctgtagtcagttttcatattccttttggctttctaccaagtggtagtatccatttagtgccttaaaatacagacaataccaaggagatttcattctagacaagtctagaaatggccattaacttctaagtgtccttgtgttcaatgaatatcctttacctattgggaaatagaaggtaaattagtaagagaactggtgtatagctttgtggaccatagggcttatttgctgagagttgtctatattcatgcacccagtcccctaagtagcctcttttaatacttcatttagctgattcagaaaaaaactccctgggaattaggagatttaaggttcagtcttgcttctcctacttgtggcttcactgagctagtcagtttcctcaggcttaggtttctggatttgaagtggaattttttcaagaatgaaacttttatagctgaaataaactttggagcttatctttcattggaaaaaccagggtggttcagtgagttaaggacaatatagcatggactgggctgccagtctagcatttgtttccaaattcattcatgttcttttggagtatcttcatctcctctcattttcccatcttctgccctttactattctgggaaaatggcaaaaaagcttcacatgtgtccacaaaatgacaatttgtatgtttataaggaattcagtattctgtatcagttactttttccaaataaatccaaatatttaacatttaaaaaaatgcaatctaaagtataccaaactgtaacttacctagtaaatgagattagaaactattgtcagggtcatcgtagtgaattattattattattattttttgagacagagtcttgtgctgttgcccaggctggagcacagtggtatgatctcagttcactgcaccctccacctcctgggctcaagctattctcccacctcagccgcctgagtagctgacactataggcaccaccatgccctggctaattttttaaaaactttgtgtagagatagggtttcaccatgttgcttaggctggtctcaaactcctggactcaagggatccacccactttggtctcccaaagtgctgggattacccacatcctagtaccaactttatcacttctgatggcattaggacacacaggccatttataagagcagtgtttgagacctcctgtgtgtcacttccaatcctcttggccttcatactaaagtcactgctgtggcaaccagtttcaagcagggctgaaccttgcctcttgctctggggatgtctcacttcctgcccctgggcttctcaccagctacaggaactgcctagcacttgggtatgtacaacctggaagaggtgtggggccaccccatcccctcctcaaagaaattcacaggcacagtatgaggctaaagtaacttccatcttggatgctaatctaccatgttgacttctgataaccagttcctggaatgccctctaagatttctacttttatctattaaaagaacacacacacacacacacacactgtaaatcctggccttaagcaagttataggctaagttgtaaacagcattcttgcctttccctgaggaggtgacttcagtgtctcacatgttccttcatgtacccccttttctctatggcatataagccctgggtcggggggtaactgtggggatcactgcctgagacatggcttctgtgcataagtccctattaaatgtttctttctgacaaactggatttgttggcctctttctttggcatctcagcactctcagcctttgggggtaggttgcatagacctggtcactatacaacacatatttcctaggacttgtcacaagttccctcaagatctagcactagtgcctatgttttggctaactcaatgaatatgttgttaataggcttgtctgtcttgtttcattttgccactgttccctgggatcacttcccaaatttacatatgtaagcttttggctcaggctctgcttataggagaaccaaggataaatcaaagcagtgaagtaacactggcagacaaaaagatgacttctaagataattcttttgttactatatattttatgaatgtctatattaaaaaatcttttttttggctgaaaacattcctgcttagattagaccaattctgtcaactataaaactgacaatatattcagattgttttct

SEQ ID NO: 292255 - DNA, 3477 bp, Homo sapiens
tcgagctcggactcaccttatctgcttctgtcataatgcagcgcatgaagggtgagttcatttcagttcagtctacatttaaagtagcattgtgtcatttcatcaacaagtatttcttttttggcttcaactacatgtcaggtgttaatatgaaaaatctgccacagcctacccttgagaagcagatgtaattccttgagtgaggctagtaagtctctgaaaaactgaataattttatgacttactaggcaatttaataatcgtttgcaaaaaccattgtgtcttgaggtaaatgaggagcgggggtgggagatagcaaggaaacacctgaaaggtcaatttggtcttattggctccattatacataggtccgcctctgaatactaaagtttgtagctcctgacatttatgttttcttgtttatatgttggaattgatcaacaaggtttgccactgcttgtattaccagggactggttacaaccattatttctcttcatttgcttggcttatctcatattaaagtgagtttggagttctccaaaacgttttaattttatttatttgggtaccagtgattgattccaaataaacctttttacaaaaaggcaataaggtggtttatggttacatatgaaatataataggataacaggtagatgagaaagtaaaatgaaaaaatgaggttaggagatacaaagtagacccaggaatgaggctagaacatttataatttggtgttgatgctgtcatctgataggggatgttgctcgtactgttgctctgaggggagtacatcttgagtattttcaaataatgatgtgaagtttgaggtaggtatctttccaatgttctaactttactagaattaggttattaagcttctctagtgcccttaacttttgttacatagagatttaaagaaaaagaaagtagtaccttagtatgtaccgcatccttcttttcctcagccaccctatcataacagaagttatttcccttccattctttatttggctttgttctttccctgtctgccttctccattttctcagttatctctaccagtggttctcaaactttagactttttgagaatcacctggtgggttgctaaaagatgcagattagccctttcccagagactgataaacaggggccagaaacctgcatttttaacatggagcccaagtgattttgatccaggtggcccccaaatccagttatataaacactactttagcttctctcctgaagccttaagtaaactggtttaattcttaatctgtagtcagttttcatattccttttggctttctaccaagtggtagtatccatttagtgccttaaaatacagacaataccaaggagatttcattctagacaagtctagaaatggccattaacttctaagtgtccttgtgttcaatgaatatcctttacctattgggaaatagaaggtaaattagtaagagaactggtgtatagctttgtggaccatagggcttatttgctgagagttgtctatattcatgcacccagtcccctaagtagcctcttttaatacttcatttagctgattcagaaaaaaactccctgggaattaggagatttaaggttcagtcttgcttctcctacttgtggcttcactgagctagtcagtttcctcaggcttaggtttctggatttgaagtggaattttttcaagaatgaaacttttatagctgaaataaactttggagcttatctttcattggaaaaaccagggtggttcagtgagttaaggacaatatagcatggactgggctgccagtctagcatttgtttccaaattcattcatgttcttttggagtatcttcatctcctctcattttcccatcttctgccctttactattctgggaaaatggcaaaaaagcttcacatgtgtccacaaaatgacaatttgtatgtttataaggaattcagtattctgtatcagttactttttccaaataaatccaaatatttaacatttaaaaaaatgcaatctaaagtataccaaactgtaacttacctagtaaatgagattagaaactattgtcagggtcatcgtagtgaattattattattattattttttgagacagagtcttgtgctgttgcccaggctggagcacagtggtatgatctcagttcactgcaccctccacctcctgggctcaagctattctcccacctcagccgcctgagtagctgacactataggcaccaccatgccctggctaattttttaaaaactttgtgtagagatagggtttcaccatgttgcttaggctggtctcaaactcctggactcaagggatccacccactttggtctcccaaagtgctgggattacccacatcctagtaccaactttatcacttctgatggcattaggacacacaggccatttataagagcagtgtttgagacctcctgtgtgtcacttccaatcctcttggccttcatactaaagtcactgctgtggcaaccagtttcaagcagggctgaaccttgcctcttgctctggggatgtctcacttcctgcccctgggcttctcaccagctacaggaactgcctagcacttgggtatgtacaacctggaagaggtgtggggccaccccatcccctcctcaaagaaattcacaggcacagtatgaggctaaagtaacttccatcttggatgctaatctaccatgttgacttctgataaccagttcctggaatgccctctaagatttctacttttatctattaaaagaacacacacacacacacacacactgtaaatcctggccttaagcaagttataggctaagttgtaaacagcattcttgcctttccctgaggaggtgacttcagtgtctcacatgttccttcatgtacccccttttctctatggcatataagccctgggtcggggggtaactgtggggatcactgcctgagacatggcttctgtgcataagtccctattaaatgtttctttctgacaaactggatttgttggcctctttctttggcatctcagcactctcagcctttgggggtaggttgcatagacctggtcactatacaacacatatttcctaggacttgtcacaagttccctcaagatctagcactagtgcctatgttttggctaactcaatgaatatgttgttaataggcttgtctgtcttgtttcattttgccactgttccctgggatcacttcccaaatttacatatgtaagcttttggctcaggctctgcttataggagaaccaaggataaatcaaagcagtgaagtaacactggcagacaaaaagatgacttctaagataattcttttgttactatatattttatgaatgtctatattaaaaaatcttttttttggctgaaaacattcctgcttagattagaccaattctgtcaactataaaactgacaatatattcagattgttttct

SEQ ID NO: 292256 - DNA, 2391 bp, Homo sapiens
gcagcggtacggtcgaatacgaatcgtaccagcgtcggattagccctttcccagagactgataaacaggggccagaaacctgcatttttaacatggagcccaagtgattttgatccaggtggcccccaaatccagttatataaacactactttagcttctctcctgaagccttaagtaaactggtttaattcttaatctgtagtcagttttcatattccttttggctttctaccaagtggtagtatccatttagtgccttaaaatacagacaataccaaggagatttcattctagacaagtctagaaatggccattaacttctaagtgtccttgtgttcaatgaatatcctttacctattgggaaatagaaggtaaattagtaagagaactggtgtatagctttgtggaccatagggcttatttgctgagagttgtctatattcatgcacccagtcccctaagtagcctcttttaatacttcatttagctgattcagaaaaaaactccctgggaattaggagatttaaggttcagtcttgcttctcctacttgtggcttcactgagctagtcagtttcctcaggcttaggtttctggatttgaagtggaattttttcaagaatgaaacttttatagctgaaataaactttggagcttatctttcattggaaaaaccagggtggttcagtgagttaaggacaatatagcatggactgggctgccagtctagcatttgtttccaaattcattcatgttcttttggagtatcttcatctcctctcattttcccatcttctgccctttactattctgggaaaatggcaaaaaagcttcacatgtgtccacaaaatgacaatttgtatgtttataaggaattcagtattctgtatcagttactttttccaaataaatccaaatatttaacatttaaaaaaatgcaatctaaagtataccaaactgtaacttacctagtaaatgagattagaaactattgtcagggtcatcgtagtgaattattattattattattttttgagacagagtcttgtgctgttgcccaggctggagcacagtggtatgatctcagttcactgcaccctccacctcctgggctcaagctattctcccacctcagccgcctgagtagctgacactataggcaccaccatgccctggctaattttttaaaaactttgtgtagagatagggtttcaccatgttgcttaggctggtctcaaactcctggactcaagggatccacccactttggtctcccaaagtgctgggattacccacatcctagtaccaactttatcacttctgatggcattaggacacacaggccatttataagagcagtgtttgagacctcctgtgtgtcacttccaatcctcttggccttcatactaaagtcactgctgtggcaaccagtttcaagcagggctgaaccttgcctcttgctctggggatgtctcacttcctgcccctgggcttctcaccagctacaggaactgcctagcacttgggtatgtacaacctggaagaggtgtggggccaccccatcccctcctcaaagaaattcacaggcacagtatgaggctaaagtaacttccatcttggatgctaatctaccatgttgacttctgataaccagttcctggaatgccctctaagatttctacttttatctattaaaagaacacacacacacacacacacactgtaaatcctggccttaagcaagttataggctaagttgtaaacagcattcttgcctttccctgaggaggtgacttcagtgtctcacatgttccttcatgtacccccttttctctatggcatataagccctgggtcggggggtaactgtggggatcactgcctgagacatggcttctgtgcataagtccctattaaatgtttctttctgacaaactggatttgttggcctctttctttggcatctcagcactctcagcctttgggggtaggttgcatagacctggtcactatacaacacatatttcctaggacttgtcacaagttccctcaagatctagcactagtgcctatgttttggctaactcaatgaatatgttgttaataggcttgtctgtcttgtttcattttgccactgttccctgggatcacttcccaaatttacatatgtaagcttttggctcaggctctgcttataggagaaccaaggataaatcaaagcagtgaagtaacactggcagacaaaaagatgacttctaagataattcttttgttactatatattttatgaatgtctatattaaaaaatcttttttttggctgaaaacattcctgcttagattagaccaattctgtcaactataaaactgacaatatattcagattgttttct

SEQ ID NO: 292257 - DNA, 2352 bp, Homo sapiens
ggcccggactgggtcccatcgccccacctccggtcgctggacgtgctctcgcgtagctccgcctttcgtaagtccccccgcctcgcatgatggctgcggtgccgccgggcctggagccgtggaaccgtgtgagaatccctaaggcggggaaccgcagcgcagtgacagtgcagaaccccggcgcggcccttgacctttgcattgcagctgtaattaaagaatgccatctcgtcatactgtcgctgaagagccaaaccttagatgcagaaacagatgtgttatgtgcagtcctttacagcaatcacaacagaatgggccgccacaaaccccatttggccctcaaacaggttgagcaatgtttaaagcgtttgaaaaacatgaatttggagggctcaattcaagacctgtttgagttgttttcttccaatgaaaatcagcccttaactaccaaagtatgtgttgtccccagtcagccagtggtggagttggtgttgatgaaggttttgggagcctgcaagttgttgctccgcttgttggactgctgctgcaaaacttttcttttgactgtgaaacatctaggtttgcaagagttcattattttaaaccttgtgatggttgggctggtgagcaggttatgggttctctataaaggtgtcttaaaaaggttgattttgttatatgagcctttgtttggattgcttcaagaggtcgctaggattcaaccaatgccttacttcaaagattttacctttccttctgatatcactgaatttttaggacagccatattttgaagcctttaagaaaaaaatgcctatagcttttgcagctaaaggaataaataaattgctaaataaactgtttttaataaatgagcagtcaccaagagccagtgaagaaaccttgcttggaatttcaaaaaaagctaaacaaatgaagatcaatgtacagaataatgtggatcttggacagccagtaaagaataagagagtcttcaaagaagagtcatcagaatttgatgtgagggctttctgcaaccagctgaaacacaaagctactcaggagaccagttttgattttaaatgttctcaatccagactaaagacaaccaagtattcttctcagaaagtgataggaactcctcatgccaaaagtattgtgcaaagattccgagaggctgagtccttcacacaactttctgaagaaatccagatggcagttgtatggtgcaggagcaaaaaactcaaggctcaggccatttttctgggtaacaaacttcttaaaagcaaccggcttaaacatctggaagctcaaggtactagtttgccaaagaaactagagtgcataaaaacgtctatttgcaaccaccttcttcgtggctcaggtatcaaaacttcaaagcatcatctgagacagagaagatcacagaataaatttttacggagacaaaggaaaccacagagaaagttgcagtcgactcttttaagggaaattcagcagttctctcaagggactcggaagagtgctacagataccagtgctaagtggagactctcacactgtactgtgcatagaactgatctctaccctaacagtaagcagctcttgaatagtggagtttcaatgcctgtcatacaaactaaggagaaaatgattcatgaaaatcttagaggcatccatgaaaatgaaactgattcgtggacggtgatgcaaataaataaaaacagtacatcaggaaccattaaggagacagatgacattgatgatatttttgctttaatgggagtttagatgttcgttcatatgtgagacttttaagtgattaacaaggctagttcagtgttctaagtagaactgctaagatctggaagtaccacctggactcacagaggagctgctttagtgcagcattgcacaggagttcatttcagttcagtctacatttaaagtagcattgtgtcatttcatcaacaagtatttcttttttggcttcaactacatgtcaggtgttaatatgaaaaatctgccacagcctacccttgagaagcagatgtaattccttgagtgaggctagtaagtctctgaaaaactgaataattttatgacttactaggcaatttaataatcgtttgaaacacctgaaaggtcaatttggtcttattggctccattatacataggtccgcctctgaatactaaagtttgtagctcctgacatttatgttttcttgtttatatgttggaattgatcaacaaggtttgccactgcttgtattaccagggactggttacaaccattatttctcttcatttgcttggcttatctcatattaaagtgagtttggagttctcca

SEQ ID NO: 292258 - DNA, 1886 bp, Homo sapiens
ggcccggactgggtcccatcgccccacctccggtcgctggacgtgctctcgcgtagctccgcctttcgtaagtccccccgcctcgcatgatggctgcggtgccgccgggcctggagccgtggaaccgtgtgagaatccctaaggcggggaaccgcagcgcagtgacagtgcagaaccccggcgcggcccttgacctttgcattgcagctgtaattaaagaatgccatctcgtcatactgtcgctgaagagccaaaccttagatgcagaaacagatgtgttatgtgcagtcctttacagcaatcacaacagaatgggccgccacaaaccccatttggccctcaaacaggttgagcaatgtttaaagcgtttgaaaaacatgaatttggagggctcaattcaagacctgtttgagttgttttcttccaatgaaaatcagcccttaactaccaaagtatgtgttgtccccagtcagccagtggtggagttggtgttgatgaaggttttgggagcctgcaagttgttgctccgcttgttggactgctgctgcaaaacttttcttttgactgtgaaacatctaggtttgcaagagttcattattttaaaccttgtgatggttgggctggtgagcaggttatgggttctctataaaggtgtcttaaaaaggttgattttgttatatgagcctttgtttggattgcttcaagaggtcgctaggattcaaccaatgccttacttcaaagattttacctttccttctgatatcactgaatttttaggacagccatattttgaagcctttaagaaaaaaatgcctatagcttttgcagctaaaggaataaataaattgctaaataaactgtttttaataaatgagcagtcaccaagagccagtgaagaaaccttgcttggaatttcaaaaaaagctaaacaaatgaagatcaatgtacagaataatgtggatcttggacagccagtaaagaataagagagtcttcaaagaagagtcatcagaatttgatgtgagggctttctgcaaccagctgaaacacaaagctactcaggagaccagttttgattttaaatgttctcaatccagactaaagacaaccaagtattcttctcagaaagtgataggaactcctcatgccaaaagtattgtgcaaagattccgagaggctgagtccttcacacaactttctgaagaaatccagatggcagttgtatggtgcaggagcaaaaaactcaaggctcaggccatttttctgggtaacaaacttcttaaaagcaaccggcttaaacatctggaagctcaaggtactaggtaggtatattgcaaaaattatgttactttactttttctgttgttgttatgagtaaaagtattcaggtcacttttctttaaaatgtgatgtccagcagccgcagcggggctaaattgggatgtactcaaactgcaattgcatttgctgcttttattgtaagagcaaagctgtatcattggaggaagaagataaacaagttaattggacttcagtccccgttatgctcttcatcatttccatcagctcattcaggaaccattaagagtgtctagtgtgctgagcctgaggatacaactgcataaagacgtgacttggtcttcagggagctcagggtcttctgggaaaggcagcccttctgcagacagcttcagtgcagtgcagtgggataagggcatgagagcagaagcagaaggtgcctgccttccatgaggcccacacaagactgctggggtgttgtactgttgctacttgctactgtttgtagcagctggactctatctatatttcttttctgtgatttttatattcacaactgtttaagggtgcttatctttgcttgtgaac

SEQ ID NO: 292259 - DNA, 1213 bp, Homo sapiens
ggcccggactgggtcccatcgccccacctccggtcgctggacgtgctctcgcgtagctccgcctttcgtaagtccccccgcctcgcatgatggctgcggtgccgccgggcctggagccgtggaaccgtgtgagaatccctaaggcggggaaccgcagcgcagtgacagtgcagaaccccggcgcggcccttgacctttgcattgcagctgtaattaaagaatgccatctcgtcatactgtcgctgaagagccaaaccttagatgcagaaacagatgtgttatgtgcagtcctttacagcaatcacaacagaatgggccgccacaaaccccatttggccctcaaacaggttgagcaatgtttaaagcgtttgaaaaacatgaatttggagggctcaattcaagacctgtttgagttgttttcttccaatgaaaatcagcccttaactaccaaagtatgtgttgtccccagtcagccagtggtggagttggtgttgatgaaggttttgggagcctgcaagttgttgctccgcttgttggactgctgctgcaaaacttttcttttgactgtgaaacatctaggtttgcaagagttcattattttaaaccttgtgatggttgggctggtgagcaggttatgggttctctataaaggtgtcttaaaaaggttgattttgttatatgagcctttgtttggattgcttcaagaggtcgctaggattcaaccaatgccttacttcaaagattttacctttccttctgatatcactgaatttttaggacagccatattttgaagcctttaagaaaaaaatgcctatagcttttgcagctaaaggaataaataaattgctaaataaactgtttttaataaatgagcagtcaccaagagccagtgaagaaaccttgcttggaatttcaaaaaaagctaaacaaatgaagatcaatgtacagaataatgtggatcttggacagccagtaaagaataagagagtcttcaaagaagagtcatcagaatttgatgtgagggctttctgcaaccagctgaaacacaaagctactcaggtttgtctggcttcattaaatttagcttatgatttctgctaatttgtagaggatgcttcttaccaagggcagagattgaatcttttcattttatccccagctctaagcttagtgccttcttagttgtcagtgtgtgcttctgaatgaataga

SEQ ID NO: 292260 - DNA, 337 bp, Homo sapiens
ttactgtagaaatacatactaaatcttattagatgtctctgcttcagacctttgcattgcagctgtaattaaagaatgccatctcgtcatactgtcgctgaagagccaaaccttagatgcagaaacagatgtgttatgtgcagtcctttacagcaatcacaacagaatgggccgccacaaaccccatttggccctcaaacaggtgaggaagcccggtaggtgagacccaacctgttcacttgaaaatgtagatcacactgccacttactatattgctatttatggaaatctcgtggaaatctcagtaaattacttgtgttttataggcctatagccc

SEQ ID NO: 292261 - DNA, 286 bp, Homo sapiens
atgtaatctgcaaattgtaattactggctaattaatgagctcctatttctttctctagggttctctataaaggtgtcttaaaaaggttgattttgttatatgagcctttgtttggattgcttcaagaggtcgctaggattcaaccaatgccttacttcaaagattttacctttccttctgatatcactgaatttttaggacagccatattttgaagcctttaagaaaaaaatgcctatagcttttgcagctaaaggaataaataaattgctaaataaactgttttt

SEQ ID NO: 292262 - DNA, 383 bp, Homo sapiens
cacagcctacccttgagaagcagatgtaattccttgagtgaggctagtaagtctctgaaaaactgaataattttatgacttactaggcaatttaataatcgtttgcaaaaaccattgtgtcttgaggtaaatgaggagcgggggtgggagatagcaaggaaacacctgaaaggtcaatttggtcttattggctccattatacataggtccgcctctgaatactaaagtttgtagctcctgacatttatgttttcttgtttatatgttggaattgatcaacaaggtttgccactgcttgtattaccagggactggttacaaccattatttctcttcatttgcttggcttatctcatattaaagtgagtttggagttctccaaaa

SEQ ID NO: 292263 - DNA, 292 bp, Homo sapiens
tggaacagcttgttggagtggttgaagatgatgagtgcgatctcgcagtcacatagcacgctcagctcatacgccttcttcatcaggccaaacttccgcttggtgaaagtcacctgcagagaaggatgggtgggcggccagatctggctcagttaaggcctgattgggagtcccagcctacagatggctggacatagcccctgccctcaggagcccccattctcagtgtgacacagcccctggtctcaggagtccctggtttggggaaggaccaggctagtgcctgtaggcc

SEQ ID NO: 292264 - DNA, 2758 bp, Homo sapiens
acagcaatctcgggaaattggagactgacgcggctgctcctgcatgttatttatttttcctctttccctcccgtggagaccctcctgttggaaagagagctgcagcacgggacagagacaggcaggaagaagcagagaggactcggtgacgcccccaccgagcagcccctggcccactcctccagcaggggccatgagcaccaagcaggaggccaggagagatgagggagaagccaggacgagggggcaggaggcacagcttcgagaccgagcccacctgagccagcagcgccggctcaaacaggccacccagttcctgcacaaggactcggccgacctgctcccgctggacagcctcaagaggctcggcacctccaaggacttgcagccgcgcagtgtgatccaaagacgcctggtggagggaaacccgaattggcttcagggggagcctccccggatgcaggacctgattcatggccaggagagcaggaggaagaccagcaggacagagattccagctcttctggtcaactgcaagtgccaggaccagctgcttagagtggccgttgacacaggcacccaatacaatcggatctctgctggatgtctcagccgcctggggttagagaaaagggtcctaaaagcctcagctggggacctggcccctgggcccccaacccaggtggagcagttggagctacagctggggcaggagactgtggtgtgctcggcacaggtggtggatgctgagagtcctgaattctgcctgggcctgcagactctgctttctctcaagtgctgcatcgacctggagcacggagtgctgcggctgaaagccccgttctcagagctacccttcctgcctttgtaccaagagcctggccagtgactgctgtctcagtcagtccccagagggaaagaccttgccttagaagaagaggcgtgtggggaacgggggctcttgaagccaggtagctggggactatggtgtctgcccttccaatcacctccctgacccctgctgtcccattttccccagctggccgcattcctctctgcttctcagcagctgtcctactccccaggacgagttttcactagagggcccacgatgccaggattctgattcatcttcctcccaagaaaagcaaagccaaatcaagaccacagataggaacctaagcacaatggggtgcctgcttgggctgggtcgaaggctctgctgactgctgtccttgtccatcacccaataccaccccaaacacaactcaacttcccacaccaccatgtctctcaccacaccttctgggcctcattatctcccacaactagaccgccatgcctcaccaacctatgtccctggacctcctggtgtctgcctctcggagtctgtgcacatctgctcacagttgagtgggggaagaaacagccagaattcaatacaacaaagagcgggagttagtataggaatgtccatctcataaggctgagagctattttttcctgtggctgcaaatgtctgaagccagttagtttgattaccctgtgcaaaaccttggacatacttctgctattaacgctataggtatttatccgtttccactggctttttgtacccaccgagcccctgagccttgcgtgtgtgtgtgtggaagagccttgtagagaactgctcctgtgaggcagacaggacagtgaggttgtcaccactcagacttcacctattcagcattctttctgatttctagaactatccacctcattaggccttcttcctatccccatctctggcctcttgagcttaagcttgtattgtcctggaatcagtggctttctaaccccctgccaggctttgccaaagcaaaaagacagaggctttttttttttttttaaagtttggggtctgtcaggagacagaggcttttttgaattcactgtgaagagaagaacccgaaccttaagacgccagatccctgagagtctttctggctggtttgagtctctcaaatcatggattaggagtaaagaaagaggccaggcgcaatggctcatgcctgtaatcccagcactttgggaggctgaggtgggtggatcacttgaggtcaggagtttgagaccagcctgggtaatatggcaaaaccccatctctactaaaaaatacaaaaattagccaggtatggtggtgaacacctgtaatcccagctacttggaaggctgaggcataggagttgcttgaacctgggagatgggggttgtagtgagccaagttcgtgccatcggactccagcctgggtgaaggagtgagaccctgtctccaaaaacaaacaaaaaaggagcagagaaagacagtggtacagctaacctgaacaagggaactgggaccgttgggctgaaacagtcttgagcctggggttgactgggttagagaagaaccgggatgcaaggagctgcctgtgacacctggcctgccctttctcagctgcctcccctgccctttctcagctgcctcccctgccctcagaaggaaaggagagggctcacttatcacttgtgccatagcacctggtctcaaaatcctaaaagctttcctcgccctcactgccttgctccacaaggtccactttcctgggtcttgtgctgtgcctttccttgtctgcctcctgctgcttctgtaactgcagaccccaggcccaatggcaagccctcggctcagctgcttctccattggaataaactcttgtttctctaaaaaaaaaaa

SEQ ID NO: 292265 - DNA, 975 bp, Homo sapiens
gcattcattgatataccttccggtaacatatcttatagtaaatactcaatgaatgtttggaatgagaaaacgatgtgtgtgtatatccaagcgtatatcaaaatgtctatgtcccaaagtaggtgaagttgtcttcctttgtttccaatagcgaacttcttggttactcatatctgagtttcctaacagggattccagtcttctcatccttcctctattcctaacctggagttttcgaaccaggaggccatcaaactcccaaggattcctctaaacaaacaaatcaccgtttctccatttctggcagatcttccccaaacttatgaacccatcacatataaccactttttttttttccattttattttttgtagagacagagtcttgctatgatgcctaggctggtcttgaactcctggcttcaagtgatcctcttgcctccaaagtgctagaactacaagcatgagccaccgcacctggtccacttcctttttgtgatttatttatctgggagttctgcccctattgtatgagtctcataaaaaccagtttttttgtttgttttgagacagagttttgctcttgttgcccaggctggagtgtaatggcgtgatcttggctcaccacaacctccgcctctcgggttcaagcgattctcctgcctcagcctcccgagtagctgggattacaggcatgcgccaccacacccagctaattttgtatttttagtagagacagggtttctactaaaccctggtcaggctggtcttgaactcccgacctcaggtgatccacccgcctcggccttccaaagtgctgggattacaggcgtgagccaccgcgcctggccccgataaaagccagttttaaagacagttcattttctccactcatttctaggagggaatcatcaatgggctgggaaactgaaggatccaattccaacccattctcctagggactcactgattcacc

SEQ ID NO: 292266 - DNA, 1239 bp, Homo sapiens
acagcaatctcgggaaattggagactgacgcggctgctcctgcatgttatttatttttcctctttccctcccgtggagaccctcctgttggaaagagagctgcagcacgggacagagacaggcaggaagaagcagagaggactcggtgacgcccccaccgagcagcccctggcccactcctccagcaggggccatgagcaccaagcaggaggccaggagagatgagggagaagccaggacgagggggcaggaggcacagcttcgagaccgagcccacctgagccagcagcgccggctcaaacaggccacccagttcctgcacaaggactcggccgacctgctcccgctggacagcctcaagaggctcggcacctccaaggacttgcagccgcgcagtgtgatccaaagacgcctggtggagggaaacccgaattggcttcagggggagcctccccggatgcaggacctgattcatggccaggagagcaggaggaagaccagcaggacagagattccagctcttctggtcaactgcaagtgccaggaccagctgcttagagtggccgttgacacaggcacccaatacaatcggatctctgctggatgtctcagccgcctggggttagagaaaagggtcctaaaagcctcagctggggacctggcccctgggcccccaacccaggtggagcagttggagctacagctggggcaggagactgtggtgtgctcggcacaggtggtgggtaagtccccccttctgcaacagccctggtgctcacctcacctttctctttggggtggggcaaaggctgagactttcactccctgcagcacgaggagttcccagagatgttctgactatcccccatctctgtgccagtgtcctcggatctggggatggggtgggcagagaaggagcaacggctaagaggagggcagcagtgaccactgggaaccctcagcctcttctgttttcaaattgttcctatagatgctgagagtcctgaattctgcctgggcctgcagactctgctttctctcaaggtaaggcacccactcagggcctgacccaaagcactgggaaaaagtagtagaaggcacaggtgtggaacctggaccaggttctgatgagagtgacttagagatgggcaactgtccctttgcttccttagaggttccttacttaccaccaagtgaaaaatcaagaggactgggtcacccccttcaacaggagtctag

SEQ ID NO: 292267 - DNA, 811 bp, Homo sapiens
acaggcgtgagccaccgcgcctggccccgataaaagccagttttaaagacagttcattttctccactcatttctaggagggaatcatcaatgggctgggaaactgaaggatccaattccaacccattctcctagggactcactgattcaccacgattcttctttcttagtgccaggaccagctgcttagagtggccgttgacacaggcacccaatacaatcggatctctgctggatgtctcagccgcctggggtaagaatgtggcccaaacaagcaagtgggggacagggtttctttttggggtgatgaaaatattctcaaattagatagtgacgacagttgcatattttatctcaataaagctgttatttaacaaaagagtggctagaagactctggcagagaaggcaaggatttagaccccacgtgaggtcaggggttggagatgaaaccatagtagagagggacacctgctgattaatggggtggaaccctctaggggctgtggtagccataacccttgcttcccaaccacaggttagagaaaagggtcctaaaagcctcagctggggacctggcccctgggcccccaacccaggtggagcagttggagctacagctggggcaggagactgtggtgtgctcggcacaggtggtgggtaagtccccccttctgcaacagccctggtgctcacctcacctttctctttggggtggggcaaaggctgagactttcactccctgcagcacgaggagttcccagagatgttctgactatcccccatctctgtgccagtgtcctcggatctggg

SEQ ID NO: 292268 - DNA, 197 bp, Homo sapiens
ccgcacacagaaagcactcagtaaatgctgtttccccccttccccctatacaaagagctatggggaccggaaggcgaaacagagctgtcgacgcgggagcatacgctgcccaccagtggagcgcaggtaaagaaagagcgcgcgatttcccggcgcggagaggggtgggggaagccccaccaggactgggcggcgcc

SEQ ID NO: 292269 - DNA, 1716 bp, Homo sapiens
ggcacgaggggcgggcgcccctcccccagcgtcactgccgccttgcagtttgatctcagactgctgtgctagcaatcagtgagagtccgtgggcgtaggaccttccgagccaggctgttcacggaagaccaggatgtagatgagggacttgtctatgacactgtattcaagcacttcaaaagacataagctggagatatcaaatgcaataaaaaagacatttccattccttgagggcctccgcgatcgggaactcatcacaaataaaatgtttgaagattctgaagattcttgtagaaacctggtccctgtacaaagagtggtgtacaatgttctcagtgaactggagaagacatttaacctgtcagttttggaagcactgttcagcgaggtcaacatgcaggaataccccgatttaattcacatttataaaagcttcaaaaatgcaatccaagacaaattgtctttccaagaaagtgatcgaaaagaaagggaagagaggcctgacatcaaactaagtcttaaacaaggagaagtgccagaaagcccggaagcaaggaaggaaagtgaccaagcatgtggcaaaatggatactgtggatattgcaaacaactctactttgggaaaacccaagaggaaaagaagtaagaataaataagaatttacttgcttttgatgttacaaatacatttttaatgccagagttttctttttgtcattgttactgtttctgttattatttgcaatactgtggtagagagaatgatggccaccccaaaaaacgtccacctcctaatccctggacctgtaatctgctatcttacatggcaaacgggactttacagatacaattaatttagagaccttgaaatggggagatgatcctgggttatgtggtgggcccaatctaatcttgtaggctttaaagagtggagaacttttcctggctgtggagaaaggaaaatgtgactatggaagagtcatcagaaacatgtaatgttgcaggctttgaagatggaagagggaaccaaggaatgtggatgacctctagaagctgaaaaaacaaggaaatagtttgtcctttccagcccccagaaaggaatgaaggcctacaccttgactttaggcagtaagacccgtgtcacacttctcactgacataactggaagataatatatttgtgttgttttaaaccactaaatttgtggtaatttgttatggcagcaattaagagtaatacggattttagtacttggcagtggggtgtggctatcacatattcctgaaagtgttggggtgtctttgagattgcgcagtggaaagaggttggaagaattttaaatagagtgataggaaaatcctagatgaaaaaatggaaattaagtcaattaataaccctacaatggcctgtaagtgctcaagttaaagaaagagtcggccgggcgcggtggctcacgcctgtaatcctagcactttgggaggccgagacgggcggatcacgaggtcaggagatcgagaccatcttggctaacacggtgaaaccccgtttctactaaaaatacaaaaaattagccgggcgtgttggcgggcacctgtagtcccagctgcttgggaggctgaggcaggagaatggcatgaacctgggaggcggagcttgcagtgagccaggatcgcgccactgcactccaacctgggagacacagcgagactccgtctc

SEQ ID NO: 292270 - DNA, 3586 bp, Homo sapiens
  misc_feature (1609)..(1609): n is a, c, g, or t
ggcacgaggggcgggcgcccctcccccagcgtcactgccgccttgcagtttgatctcagactgctgtgctagcaatcagtgagagtccgtgggcgtaggaccttccgagccaggctgttcacggaagaccaggatgtagatgagggacttgtctatgacactgtattcaagcacttcaaaagacataagctggagatatcaaatgcaataaaaaagacatttccattccttgagggcctccgcgatcgggaactcatcacaaataaaatgtttgaagattctgaagattcttgtagaaacctggtccctgtacaaagagtggtgtacaatgttctcagtgaactggagaagacatttaacctgtcagttttggaagcactgttcagcgaggtcaacatgcaggaataccccgatttaattcacatttataaaagcttcaaaaatgcaatccaagacaaattgtctttccaagaaagtgatcgaaaagaaagggaagagaggcctgacatcaaactaagtcttaaacaaggagaagtgccagaaagcccggaagcaaggaaggaaagtgaccaagcatgtggcaaaatggatactgtggatattgcaaacaactctactttgggaaaacccaagaggaaaagaagaaaaaagaaggggcatggctggagcagaacgggaacgagaacgcagaaaaacaaccaacaaaatgataacagcaaagccgatggccagctggtctcgagtgaaaagaaggcgaacatgaatctgaaagacctttccaagattagggggagaaagagaggcaaacctggaacccactttactcagagtgacagagctccacagaaaagagtccgatcaagagcttcaagaaagcacaaagatgaaactgtggattttcaggctcctttacttccagtgacctgtggtggggtgaagggaattttacataaggagaaattggaacaaggaaccttggcaaagtgtatacagactgaggatggaaaatggttcacccccatggaatttgaaatcaaaggaggctacgcaagatcaaagaactggaggctgagtgtgcgctgtggcgggtggcccctacgacggctgatggaggaaggatctctacctaatccttcaagaatatattacaggaacaaaaagagaatactgaagtctcaaaacaatagctcagttgacccttgtatgagaaacttggatgagtgtgaggtgtgccgggacggaggggagctgttctgttgcgacacttgttcaagagtcttccatgaggactgccacatcccacctgtggaaagtgagaagtaagtgacatgcaggcacctctctttcatcctttaagggaccttccacctgccatgcgcactctccagcagaatgtctgcttgtgtctagatggggaaggagcaggttcatcgggtactgggacccagcagtgtgatccagagagcagtgggagacgctggcagcaggaggtaaatgctctctgtgctctcagggacacctcctctgatatgctgaggccagtgttggggacctttgcctacatactggtattgtcctttccttgaagttttgcagtagggtctcctgncccagggggttgaggaaaaaaaacaccagttgtttatattttgtgcttattcatacaagacaggaagcacggtcttaggcggatggaggcctgacgtccctggagttgaaagcccagtttctgacacacaggcctggcaggcaggactccttgtgctcccagcagctcagacagggaaaggatagtccccactcacggtgacaccaccttcctgaggcttccctcctgctgctaccactgatgcgagggaaaggccagtggctggagaccccatgtgcagttcttggatactctgggaggtgttcccctccctcccatgactgagcccatcagccattcctgaaggaagacagtggtagccacaggaacggtggccatttccaagctccctgccctctgctcacccatgtccaatctctcaggaccccgtggaattgcatcttctgcaggatgaaggagtctccgggaagccaacagtgttgtcaggaatctgaggtcctggagaggcagatgtgtcctgaggaacagttggtaaatcagatgcaaaccccaagccttctcctttcccctcacacgtgagaaccatgaacaagcgcaagggcaggggaatgtactgaaaggagcctgctcttccgcgccacacttcaatggcactgatagaacaccacaccttgtttgcacaaaaaataactcagccatgacatgtctgtttccaagagccacacatgttagagaaacttgaggaagaagggtgtgagtcgtgtgctgtgtctcatgcatgtgggctcattctctccaagctgcttttcatttacggcctctttcttttgcagaaatgtgagttcctcctcttgaaagtctattgctgttctgagagctccttttttgccaagattccatactattattatattagagaggcgtgtcaaggcctgaaggagcccatgtggttggataaaatcaagaaaaggctgaatgagcacggttacccccaagtggaggggtttgtacaagacatgcgcctcatcttccagaaccacagggcctcttacaagtataaggattttggccaaatgggacttagactggaggctgaatttgagaaggatttcaaggaagtgtttgctattcaggaaacaaatgggaacagttgactggtttagtggatgctgaaggccttcaggaaatatgctactggttgccactgacttcaaactgagagcacttgggaaatagcacatgcagggagaggcttttctctgagcctccctcatctgcccaaaaacaaatcctcaaaagaaatttgatcatcatgaatcccatccccaagaatctcatcaaccagggaagaggaactgagatcacagggaaggagattggaggtgataccagcacagacagactctcacctcttctcctgaggtctgctccagacaacatttattactcacaagacctttttcctccgttttttttttgagatggagtctcacacagtcacccgggattggaatgcaatggcgcgatctcagctcactgcaacctctgcctcccggattcaagtgattctcctgtctcagcctcccaagtagctgggattacagtgcctgccaccatgcccagctaattttttgcatttttagtagagacggggtttcactatgttggccaggctggtctcgaactcctgacctcatgagccgcccgccttggcctcccaaagtgctgggacgtgacaggagtgagccaccacacctggccactcgcaagaccttttatctgaaaaccagccaagctttattcacgacacacttcttcccttcactctcccacttctgtggtcaactccctgcagaactcccaaactgccgttcttttcgatagctcacgatggtgtatgagtgtcaatcatctgacccttcttggagtctcatatttcgtggaactcctgtgcaaacatatattattaaatttttt

SEQ ID NO: 292271 - DNA, 2671 bp, Homo sapiens
ggcacgaggggcgggcgcccctcccccagcgtcactgccgccttgcagtttgatctcagactgctgtgctagcaatcagtgagagtccgtgggcgtaggaccttccgagccaggctgttcacggaagaccaggatgtagatgagggacttgtctatgacactgtattcaagcacttcaaaagacataagctggagatatcaaatgcaataaaaaagacatttccattccttgagggcctccgcgatcgggaactcatcacaaataaaatgtttgaagattctgaagattcttgtagaaacctggtccctgtacaaagagtggtgtacaatgttctcagtgaactggagaagacatttaacctgtcagttttggaagcactgttcagcgaggtcaacatgcaggaataccccgatttaattcacatttataaaagcttcaaaaatgcaatccaagacaaattgtctttccaagaaagtgatcgaaaagaaagggaagagaggcctgacatcaaactaagtcttaaacaaggagaagtgccagaaagcccggaagcaaggaaggaaagtgaccaagcatgtggcaaaatggatactgtggatattgcaaacaactctactttgggaaaacccaagaggaaaagaagaaaaaagaaggggcatggctggagcagaacgggaacgagaacgcagaaaaacaaccaacaaaatgataacagcaaagccgatggccagctggtctcgagtgaaaagaaggcgaacatgaatctgaaagacctttccaagattagggggagaaagagaggcaaacctggaacccactttactcagagtgacagagctccacagaaaagagtccgatcaagagcttcaagaaagcacaaagatgaaactgtggattttcaggctcctttacttccagtgacctgtggtggggtgaagggaattttacataaggagaaattggaacaaggaaccttggcaaagtgtatacagactgaggatggaaaatggttcacccccatggaatttgaaatcaaaggaggctacgcaagatcaaagaactggaggctgagtgtgcgctgtggcgggtggcccctacgacggctgatggaggaaggatctctacctaatccttcaagaatatattacaggaacaaaaagagaatactgaagtctcaaaacaatagctcagttgacccttgtatgagaaacttggatgagtgtgaggtgtgccgggacggaggggagctgttctgttgcgacacttgttcaagagtcttccatgaggactgccacatcccacctgtggaaagtgagaaaatgtctgcttgtgtctagatggggaaggagcaggttcatcgggtactgggacccagcagtgtgatccagagagcagtgggagacgctggcagcaggaggaccccgtggaattgcatcttctgcaggatgaaggagtctccgggaagccaacagtgttgtcaggaatctgaggtcctggagaggcagatgtgtcctgaggaacagttgaaatgtgagttcctcctcttgaaagtctattgctgttctgagagctccttttttgccaagattccatactattattatattagagaggcgtgtcaaggcctgaaggagcccatgtggttggataaaatcaagaaaaggctgaatgagcacggttacccccaagtggaggggtttgtacaagacatgcgcctcatcttccagaaccacagggcctcttacaagtataaggattttggccaaatgggacttagactggaggctgaatttgagaaggatttcaaggaagtgtttgctattcaggaaacaaatgggaacagttgactggtttagtggatgctgaaggccttcaggaaatatgctactggttgccactgacttcaaactgagagcacttgggaaatagcacatgcagggagaggcttttctctgagcctccctcatctgcccaaaaacaaatcctcaaaagaaatttgatcatcatgaatcccatccccaagaatctcatcaaccagggaagaggaactgagatcacagggaaggagattggaggtgataccagcacagacagactctcacctcttctcctgaggtctgctccagacaacatttattactcacaagacctttttcctccgttttttttttgagatggagtctcacacagtcacccgggattggaatgcaatggcgcgatctcagctcactgcaacctctgcctcccggattcaagtgattctcctgtctcagcctcccaagtagctgggattacagtgcctgccaccatgcccagctaattttttgcatttttagtagagacggggtttcactatgttggccaggctggtctcgaactcctgacctcatgagccgcccgccttggcctcccaaagtgctgggacgtgacaggagtgagccaccacacctggccactcgcaagaccttttatctgaaaaccagccaagctttattcacgacacacttcttcccttcactctcccacttctgtggtcaactccctgcagaactcccaaactgccgttcttttcgatagctcacgatggtgtatgagtgtcaatcatctgacccttcttggagtctcatatttcgtggaactcctgtgcaaacatatattattaaatttttt

SEQ ID NO: 292272 - DNA, 3734 bp, Homo sapiens
  misc_feature (1537)..(1537): n is a, c, g, or t
ggcacgaggggcgggcgcccctcccccagcgtcactgccgccttgcagtttgatctcagactgctgtgctagcaatcagtgagagtccgtgggcgtaggaccttccgagccaggctgttcacggaagaccaggatgtagatgagggacttgtctatgacactgtattcaagcacttcaaaagacataagctggagatatcaaatgcaataaaaaagacatttccattccttgagggcctccgcgatcgggaactcatcacaaataaaatgtttgaagattctgaagattcttgtagaaacctggtccctgtacaaagagtggtgtacaatgttctcagtgaactggagaagacatttaacctgtcagttttggaagcactgttcagcgaggtcaacatgcaggaataccccgatttaattcacatttataaaagcttcaaaaatgcaatccaagacaaattgtctttccaagaaagtgatcgaaaagaaagggaagagaggcctgacatcaaactaagtcttaaacaaggagaagtgccagaaagcccggaagcaaggaaggaaagtgaccaagcatgtggcaaaatggatactgtggatattgcaaacaactctactttgggaaaacccaagaggaaaagaagaaaaaagaaggggcatggctggagcagaacgggaacgagaacgcagaaaaacaaccaacaaaatgataacagcaaagccgatggccagctggtctcgagtgaaaagaaggcgaacatgaatctgaaagacctttccaagattagggggagaaagagaggcaaacctggaacccactttactcagagtgacagagctccacagaaaagagtccgatcaagagcttcaagaaagcacaaagatgaaactgtggattttcaggctcctttacttccagtgacctgtggtggggtgaagggaattttacataaggagaaattggaacaaggaaccttggcaaagtgtatacagactgaggatggaaaatggttcacccccatggaatttgaaatcaaaggaggctacgcaagatcaaagaactggaggctgagtgtgcgctgtggcgggtggcccctacgacggctgatggaggaaggatctctacctaatccttcaagaatatattacaggaacaaaaagagaatactgaagtctcaaaacaatagctcagttgacccttgtatgagaaacttggatgagtgtgaggtgtgccgggacggaggggagctgttctgttgcgacacttgttcaagagtcttccatgaggactgccacatcccacctgtggaaagtgagaaaatgtctgcttgtgtctagatggggaaggagcaggttcatcgggtactgggacccagcagtgtgatccagagagcagtgggagacgctggcagcaggaggtaaatgctctctgtgctctcagggacacctcctctgatatgctgaggccagtgttggggacctttgcctacatactggtattgtcctttccttgaagttttgcagtagggtctcctgncccagggggttgaggaaaaaaaacaccagttgtttatattttgtgcttattcatacaagacaggaagcacggtcttaggcggatggaggcctgacgtccctggagttgaaagcccagtttctgacacacaggcctggcaggcaggactccttgtgctcccagcagctcagacagggaaaggatagtccccactcacggtgacaccaccttcctgaggcttccctcctgctgctaccactgatgcgagggaaaggccagtggctggagaccccatgtgcagttcttggatactctgggaggtgttcccctccctcccatgactgagcccatcagccattcctgaaggaagacagtggtagccacaggaacggtggccatttccaagctccctgccctctgctcacccatgtccaatctctcaggaccccgtggaattgcatcttctgcaggatgaaggagtctccgggaagccaacagtgttgtcaggaatctgaggtcctggagaggcagatgtgtcctgaggaacagttggtaaatcagatgcaaaccccaagccttctcctttcccctcacacgtgagaaccatgaacaagcgcaagggcaggggaatgtactgaaaggagcctgctcttccgcgccacacttcaatggcactgatagaacaccacaccttgtttgcacaaaaaataactcagccatgacatgtctgtttccaagagccacacatgttagagaaacttgaggaagaagggtgtgagtcgtgtgctgtgtctcatgcatgtgggctcattctctccaagctgcttttcatttacggcctctttcttttgcagaaatgtgagttcctcctcttgaaagtctattgctgttctgagagctccttttttgccaagattccatactattattatgtaagtaacaacagcaacccatgattacaggctgccatgacattacctgaccctgaaatgggccctcgtgagatttgtgatcttaatcccacggggcaagagcacacgctgtcattagttgccttcaccttgttgtatttctgctggattttatgggaatccacagaaggtagacactgaactatgctggtagcttttccattggtatatttgtcaccagattagagaggcgtgtcaaggcctgaaggagcccatgtggttggataaaatcaagaaaaggctgaatgagcacggttacccccaagtggaggggtttgtacaagacatgcgcctcatcttccagaaccacagggcctcttacaagtataaggattttggccaaatgggacttagactggaggctgaatttgagaaggatttcaaggaagtgtttgctattcaggaaacaaatgggaacagttgactggtttagtggatgctgaaggccttcaggaaatatgctactggttgccactgacttcaaactgagagcacttgggaaatagcacatgcagggagaggcttttctctgagcctccctcatctgcccaaaaacaaatcctcaaaagaaatttgatcatcatgaatcccatccccaagaatctcatcaaccagggaagaggaactgagatcacagggaaggagattggaggtgataccagcacagacagactctcacctcttctcctgaggtctgctccagacaacatttattactcacaagacctttttcctccgttttttttttgagatggagtctcacacagtcacccgggattggaatgcaatggcgcgatctcagctcactgcaacctctgcctcccggattcaagtgattctcctgtctcagcctcccaagtagctgggattacagtgcctgccaccatgcccagctaattttttgcatttttagtagagacggggtttcactatgttggccaggctggtctcgaactcctgacctcatgagccgcccgccttggcctcccaaagtgctgggacgtgacaggagtgagccaccacacctggccactcgcaagaccttttatctgaaaaccagccaagctttattcacgacacacttcttcccttcactctcccacttctgtggtcaactccctgcagaactcccaaactgccgttcttttcgatagctcacgatggtgtatgagtgtcaatcatctgacccttcttggagtctcatatttcgtggaactcctgtgcaaacatatattattaaatttttt

SEQ ID NO: 292273 - DNA, 2572 bp, Homo sapiens
ggcacgaggggcgggcgcccctcccccagcgtcactgccgccttgcagtttgatctcagactgctgtgctagcaatcagtgagagtccgtgggcgtaggaccttccgagccaggctgttcacggaagaccaggatgtagatgagggacttgtctatgacactgtattcaagcacttcaaaagacataagctggagatatcaaatgcaataaaaaagacatttccattccttgagggcctccgcgatcgggaactcatcacaaataaaatgtttgaagattctgaagattcttgtagaaacctggtccctgtacaaagagtggtgtacaatgttctcagtgaactggagaagacatttaacctgtcagttttggaagcactgttcagcgaggtcaacatgcaggaataccccgatttaattcacatttataaaagcttcaaaaatgcaatccaagacaaattgtctttccaagaaagtgatcgaaaagaaagggaagagaggcctgacatcaaactaagtcttaaacaaggagaagtgccagaaagcccggaagcaaggaaggaaagtgaccaagcatgtggcaaaatggatactgtggatattgcaaacaactctactttgggaaaacccaagaggaaaagaagaaaaaagaaggggcatggctggagcagaacgggaacgagaacgcagaaaaacaaccaacaaaatgataacagcaaagccgatggccagctggtctcgagtgaaaagaaggcgaacatgaatctgaaagacctttccaagattagggggagaaagagaggcaaacctggaacccactttactcagagtgacagagctccacagaaaagagtccgatcaagagcttcaagaaagcacaaagatgaaactgtggattttcaggctcctttacttccagtgacctgtggtggggtgaagggaattttacataaggagaaattggaacaaggaaccttggcaaagtgtatacagactgaggatggaaaatggttcacccccatggaatttgaaatcaaaggaggctacgcaagatcaaagaactggaggctgagtgtgcgctgtggcgggtggcccctacgacggctgatggaggaaggatctctacctaatccttcaagaatatattacaggaacaaaaagagaatactgaagtctcaaaacaatagctcagttgacccttgtatgagaaacttggatgagtgtgaggtgtgccgggacggaggggagctgttctgttgcgacacttgttcaagagtcttccatgaggactgccacatcccacctgtggaaagtgagaagaccccgtggaattgcatcttctgcaggatgaaggagtctccgggaagccaacagtgttgtcaggaatctgaggtcctggagaggcagatgtgtcctgaggaacagttgaaatgtgagttcctcctcttgaaagtctattgctgttctgagagctccttttttgccaagattccatactattattatattagagaggcgtgtcaaggcctgaaggagcccatgtggttggataaaatcaagaaaaggctgaatgagcacggttacccccaagtggaggggtttgtacaagacatgcgcctcatcttccagaaccacagggcctcttacaagtataaggattttggccaaatgggacttagactggaggctgaatttgagaaggatttcaaggaagtgtttgctattcaggaaacaaatgggaacagttgactggtttagtggatgctgaaggccttcaggaaatatgctactggttgccactgacttcaaactgagagcacttgggaaatagcacatgcagggagaggcttttctctgagcctccctcatctgcccaaaaacaaatcctcaaaagaaatttgatcatcatgaatcccatccccaagaatctcatcaaccagggaagaggaactgagatcacagggaaggagattggaggtgataccagcacagacagactctcacctcttctcctgaggtctgctccagacaacatttattactcacaagacctttttcctccgttttttttttgagatggagtctcacacagtcacccgggattggaatgcaatggcgcgatctcagctcactgcaacctctgcctcccggattcaagtgattctcctgtctcagcctcccaagtagctgggattacagtgcctgccaccatgcccagctaattttttgcatttttagtagagacggggtttcactatgttggccaggctggtctcgaactcctgacctcatgagccgcccgccttggcctcccaaagtgctgggacgtgacaggagtgagccaccacacctggccactcgcaagaccttttatctgaaaaccagccaagctttattcacgacacacttcttcccttcactctcccacttctgtggtcaactccctgcagaactcccaaactgccgttcttttcgatagctcacgatggtgtatgagtgtcaatcatctgacccttcttggagtctcatatttcgtggaactcctgtgcaaacatatattattaaatttttt

SEQ ID NO: 292274 - DNA, 1860 bp, Homo sapiens
ggtgatctagcggatcctctctgacgagttcacagaaaagagtccgatcaagagcttcaagaaagcacaaagatgaaactgtggattttcaggctcctttacttccagtgacctgtggtggggtgaagggaattttacataaggagaaattggaacaaggaaccttggcaaagtgtatacagactgaggatggaaaatggttcacccccatggaatttgaaatcaaaggaggctacgcaagatcaaagaactggaggctgagtgtgcgctgtggcgggtggcccctacgacggctgatggaggaaggatctctacctaatccttcaagaatatattacaggaacaaaaagagaatactgaagtctcaaaacaatagctcagttgacccttgtatgagaaacttggatgagtgtgaggtgtgccgggacggaggggagctgttctgttgcgacacttgttcaagagtcttccatgaggactgccacatcccacctgtggaaagtgagaaaatgtctgcttgtgtctagatggggaaggagcaggttcatcgggtactgggacccagcagtgtgatccagagagcagtgggagacgctggcagcaggaggaccccgtggaattgcatcttctgcaggatgaaggagtctccgggaagccaacagtgttgtcaggaatctgaggtcctggagaggcagatgtgtcctgaggaacagttgaaatgtgagttcctcctcttgaaagtctattgctgttctgagagctccttttttgccaagattccatactattattatattagagaggcgtgtcaaggcctgaaggagcccatgtggttggataaaatcaagaaaaggctgaatgagcacggttacccccaagtggaggggtttgtacaagacatgcgcctcatcttccagaaccacagggcctcttacaagtataaggattttggccaaatgggacttagactggaggctgaatttgagaaggatttcaaggaagtgtttgctattcaggaaacaaatgggaacagttgactggtttagtggatgctgaaggccttcaggaaatatgctactggttgccactgacttcaaactgagagcacttgggaaatagcacatgcagggagaggcttttctctgagcctccctcatctgcccaaaaacaaatcctcaaaagaaatttgatcatcatgaatcccatccccaagaatctcatcaaccagggaagaggaactgagatcacagggaaggagattggaggtgataccagcacagacagactctcacctcttctcctgaggtctgctccagacaacatttattactcacaagacctttttcctccgttttttttttgagatggagtctcacacagtcacccgggattggaatgcaatggcgcgatctcagctcactgcaacctctgcctcccggattcaagtgattctcctgtctcagcctcccaagtagctgggattacagtgcctgccaccatgcccagctaattttttgcatttttagtagagacggggtttcactatgttggccaggctggtctcgaactcctgacctcatgagccgcccgccttggcctcccaaagtgctgggacgtgacaggagtgagccaccacacctggccactcgcaagaccttttatctgaaaaccagccaagctttattcacgacacacttcttcccttcactctcccacttctgtggtcaactccctgcagaactcccaaactgccgttcttttcgatagctcacgatggtgtatgagtgtcaatcatctgacccttcttggagtctcatatttcgtggaactcctgtgcaaacatatattattaaatttttt

SEQ ID NO: 292275 - DNA, 1521 bp, Homo sapiens
ggcacgaggggcgggcgcccctcccccagcgtcactgccgccttgcagtttgatctcagactgctgtgctagcaatcagtgagagtccgtgggcgtaggaccttccgagccaggctgttcacggaagaccaggatgtagatgagggacttgtctatgacactgtattcaagcacttcaaaagacataagctggagatatcaaatgcaataaaaaagacatttccattccttgagggcctccgcgatcgggaactcatcacaaataaaatgtttgaagattctgaagattcttgtagaaacctggtccctgtacaaagagtggtgtacaatgttctcagtgaactggagaagacatttaacctgtcagttttggaagcactgttcagcgaggtcaacatgcaggaataccccgatttaattcacatttataaaagcttcaaaaatgcaatccaagacaaattgtctttccaagaaagtgatcgaaaagaaagggaagagaggcctgacatcaaactaagtcttaaacaaggagaagtgccagaaagcccggaagcaaggaaggaaagtgaccaagcatgtggcaaaatggatactgtggatattgcaaacaactctactttgggaaaacccaagaggaaaagaagaaaaaagaaggggcatggctggagcagaacgggaacgagaacgcagaaaaacaaccaacaaaatgataacagcaaagccgatggccagctggtctcgagtgaaaagaaggcgaacatgaatctgaaagacctttccaagattagggggagaaagagaggcaaacctggaacccactttactcagagtgacagagctccacagaaaagagtccgatcaagaggtaaaaaagaaaagaggaatgcactttcaataactaaacatctaatttcctgtgctttatgctgtattttcagtaataaacctatttctttaattgttttatgaagctatactaactattgaaaaacatatcttattaagtcattttccaaaaaaaaaaaaaaaaaaaaaaaaaaaaatttggggggggcctggggcccggaaaaagcgttttcaaaaccaatccggtggggggcgggggcgcccacaggggacagggagacctggcgccaaaggctggtgccctaagagaaacccggggcagagacagggcgcggggttcccaccaaataaaaaacgcgccgggggggaacccgacgggtttctgtgaacaacttccagatgggaggctcagagagggcgataccgggggctcttttacccagggggggcccaagggagcgtcggaaatttcaaattagcgcgagcgccgggggacgccaagtaaacagaaggcagagagaggaaaagaaaaacaaaaaaaaaacaaagaaaaaaaaaaaaacgagacaggaagaaaccaagacgaaaaagcaagaaaggaaaaaaagaacaaaaagaaaacaaagaaggaaagaacaagaaaaagcgaagaaaaacaggaaaaagacaaaccag

SEQ ID NO: 292276 - DNA, 839 bp, Homo sapiens
ttcttgagattctcctttggctgcttacacaggaaaccaaggcggggagtgccacgggtgatctcatgctggcatgacgtcaagaactcttgacgtcagaaggcggttgccacggacaccgttcgccaccgacggcagagtcgtgaaaccccatcactaccacactcgtctccgtttcggcctctgcagggtgtaagctgctaaagaagcttcaaccttaagggggcctcagggagagagttgtgctcctgccgccgagagctccaccttcgtggctctgggtccggggccccggcctgtggcggcgagcggcggccgctggagacgagcggcggcggcaggcggccagcccgggtctacctcgctccgtgcagggccgggagagggatccgccatattggagctggggccgaaggtgccttggagccgcggcgcgaggcgggtggaggtggcggccctggcctggatcgggaaggagtcggctctgccctggcccgcaaggctggggagctaatgagcctctctggctagtctcctccccgtccactccctccactttctgccgccgggacccggctgggagccggctgtggcagtggcagtggcagtggcagcgacaggatgttctccaagaagccgcacggggacgtgaagaagtccacccagaaggtgctagacaccaagaaggacgcactgactcgcctcaagcacctgcgcatcgtcatcgagaatgcagaatctattgatcttaaacagtttttcgaccaacatttttcacatatatactatgtgttctttgaaaattttgtgactattgaagctagtcttaaacagaaagg

SEQ ID NO: 292277 - DNA, 886 bp, Homo sapiens
ttcttgagattctcctttggctgcttacacaggaaaccaaggcggggagtgccacgggtgatctcatgctggcatgacgtcaagaactcttgacgtcagaaggcggttgccacggacaccgttcgccaccgacggcagagtcgtgaaaccccatcactaccacactcgtctccgtttcggcctctgcagggtgtaagctgctaaagaagcttcaaccttaagggggcctcagggagagagttgtgctcctgccgccgagagctccaccttcgtggctctgggtccggggccccggcctgtggcggcgagcggcggccgctggagacgagcggcggcggcaggcggccagcccgggtctacctcgctccgtgcagggccgggagagggatccgccatattggagctggggccgaaggtgccttggagccgcggcgcgaggcgggtggaggtggcggccctggcctggatcgggaaggagtcggctctgccctggcccgcaaggctggggagctaatgagcctctctggctagtctcctccccgtccactccctccactttctgccgccgggacccggctgggagccggctgtggcagtggcagtggcagtggcagcgacaggatgttctccaagaagccgcacggggacgtgaagaagtccacccagaaggtgctagacaccaagaaggacgcactgactcgcctcaagcacctgcgcatcgtcatcggtgaggagcgaggggtggcagcgccgaggcctgggttgcccggccttccctctcctgggagcccctgcggactctctctcgggacctggcgcggtgcaggagagggcaaatcgtagcctctgcggagacgcgggagggtgaataattcggagaagcgaa

SEQ ID NO: 292278 - DNA, 3886 bp, Homo sapiens
  misc_feature (2657)..(2658): n is a, c, g, or t
  misc_feature (2660)..(2661): n is a, c, g, or t
  misc_feature (3016)..(3018): n is a, c, g, or t
  misc_feature (3023)..(3023): n is a, c, g, or t
  misc_feature (3026)..(3027): n is a, c, g, or t
  misc_feature (3029)..(3029): n is a, c, g, or t
  misc_feature (3035)..(3035): n is a, c, g, or t
  misc_feature (3038)..(3038): n is a, c, g, or t
  misc_feature (3047)..(3047): n is a, c, g, or t
  misc_feature (3085)..(3085): n is a, c, g, or t
  misc_feature (3103)..(3103): n is a, c, g, or t
atggagcctgcaggggagcgctttcccgaacaaaggcaagtcctgattctccttcttttactggaagtgactctggcaggctgggaaccccgtcgctattctgtgatggaggaaacagagagaggttcttttgtagccaacctggccaatgacctagggctgggagtgggggagctagccgagcggggagcccgggtagtttctgaggataacgaacaaggcttgcagcttgatctgcagaccgggcagttgatattaaatgagaagctggaccgggagaagctgtgtggccctactgagccctgtataatgcatttccaagtgttactgaaaaaacctttggaagtatttcgagctgaactactagtgacagacataaacgatcattctcctgagtttcctgaaagagaaatgaccctgaaaatcccagaaactagctcccttgggactgtgtttcctctgaaaaaagctcgggacttggacgtgggcagcaataatgttcaaaactacaatatttctcccaattctcatttccatgtttccactcgcacccgaggggatggcaggaaatacccagagctggtgctggacacagaactggatcgcgaggagcaggccgagctcagattaaccttgacagcggtggacggtggctctccaccccgatctggcaccgtccagatcctcatcttggtcttggacgccaatgacaatgccccggagtttgtgcaggcgctctacgaggtgcaggtcccagagaacagcccagtaggctccctagttgtcaaggtctctgctagggatttagacactgggacaaatggagagatatcatactccctttattacagctctcaggagatagacaaaccttttgagctaagcagcctttcaggagaaattcgactaattaaaaaactagattttgagacaatgtcttcgtatgatctagatatagaggcatctgatggcgggggactttctggaaaatgctctgtctctgttaaggtgctggatgttaacgataacttcccggaactaagtatttcatcacttaccagccctattcccgagaattctccagagacagaagtggccctgtttaggattagagaccgagactctggggaaaatggaaaaatgatttgctcaattcaggatgatgttccttttaagctaaaaccttctgttgagaatttctacaggctggtaacagaaggggcgctggacagagagaccagagccgagtacaacatcaccatcaccatcacagacttggggactccaaggctgaaaaccgagcagagcataaccgtgctggtgtcggacgtcaatgacaacgcccccgccttcacccaaacctcctacaccctgttcgtccgcgagaacaacagccccgccctgcacatcggcagtgtcagcgccacagacagagactcgggcaccaacgcccaggtcacctactcgctgctgccgccccgggacccgcacctgcccctcacctccctggtctccattaacacggacaacggccacctgttcgctctccagtcgctggactacgaggccctgcaggctttcgagttccgcgtgggcgccacagaccgcggcttcccggcgctgagcagcgaggcgctggtgcgagtgctggtgctggacgccaacgacaactcgcccttcgtgctgtacccgctgcagaacggctccgcgccctgcaccgagctggtgccccgggcggccgagccgggctacctggtgaccaaggtggtggcggtggacggcgactcgggccagaacgcctggctgtcgtaccagctgctcaaggccacggagcccgggctgttcggcgtgtgggcgcacaatggcgaggtgcgcaccgccaggctgctgagcgagcgcgacgtggccaagcacaggctagtggtgctggtcaaggacaatggcgagcctccgcgctcggccaccgccacgctgcaagtgctcctggtggacggcttctctcagccctacctgccgctcccagaggcggccccggcccaagcccaggccgactcgcttaccgtctacctggtggtggcattggcctcggtgtcttcgctcttcctcttctcggtgttcctgttcgtggcagtgcggctgtgcaggaggagcagggcggcctcagtgggtcgctgctcggtgcccgagggcccctttccagggcatctggtggacgtgagcggcaccgggaccctttcccagagctaccagtacgaggtgtgtctgacgggaggctctgaaagtaatgatttcaagttcttgaagcctatattcccaaatattgtaagccaggactctaggaggaaatcagaatttctagaataatgtaggtatctgtagctttccgaccgtctgttaattttgtcttcctcacttttcaccttagttttttttaaccctttagtaatcttgaattctacttttttttaaatttctactgttgtctttagtaatgttactcatttcctttgtctgattgttagttttcaaattattgtattattataaatattttatatcaggaaagttcatatttctgaataaattaatagtattcattcctgaagggtgatatgaaagttaaccccacctaataaacataactctaattctgaaannanntttcacactatatgacactacataagaatgtatgatttttgaagtcatattttaagttttttttatagtttttcttattcacacagcttgactttttgacaaaagtttggggtgtaatcatttcatatttatccatgtgtaatttcttccaagcttcatatttggagttttgttttttccaataaggagcaacatggataagtttaagctactcttttcaaggtcacacttgtaagcattagattttcattctaaaacacatatgtcatctcataaaaatatatctgcgtaatgtattctgtctcatgtttaacataggactaatgggttcttccttatctctatcaaaggttannnttatntanncnagtgtnggncctttgggncatgacagctttataatacccagattttctgtgtttanggtgttcgtataggccantagcactaggaccaagtaatgcatctcctgcatttcctcttttcacagcaggaaaatcttaacgagttccaaattctgggcttagaggagctttctgatggtacagtatgccaacatctacttgttttggatggcaacattgttctgattcataaggaatttgaaagaaaatacattgtagaattaatattagttaaccaaacaaaatttattaaaggatatgttggtgaaggagttgaattatttgaggaaaaaacatctgctctcttgtcaggacttttctgtctccaggagcttctcaactttgcagatactctagaatggtattgcatgcaaaataatgaccgccaagatgttcctgccctaatccccagaacctatgaatatgttatattgcaaagaaattaaggttcaaacagaattaaggttgccaatcagctaaacttaaaatagggagactctcctagataatctgggtgggtctatttcaatcagtggaaaggccataaaagcagagttgagtcttccgtgagatgaaaataaattttgtttaaggacagcagcttcagcttatgccccagaattccagcctgcccctcctaactgcctgctgtacagattttggacttgtccagccacgtttcaaaactgagtaagtcacttccttgcaataaattgattactacacatctgctgcctgtttctctggctgaactccaactaacacagattttgatacctggaagtggggtgctactgtaataaacacttaaaatgtgcaga

SEQ ID NO: 292279 - DNA, 606 bp, Homo sapiens
aacacactccctctgccgccagattcacacgttccacatgaagtccctgcagactggatccaaactgaggactcgcccttattcgtaacacagcaccagagagttctcttcacgtgtaatcatgtgaacgagtgcttcagctgtgagcctgtccagccacgtttctaatgagtttcctattaagttagctatttgaccttcaagttattattttcattgttttcttttgattacacccaagtcatttttctagaggctggagatcagaaacaaaacagctacaaactaatgctactcccaggctgtcctgcctcaccctcctgggtttcctggaattcaatattttctagtgccttaaataatgacacttatacttgacactaatttttaaagaaaaaaaaaagactctattgccctttactatggggtctttcggaatgaactgggatagctttcttaatttgcgcaggcagtcaccagcatgcatttgggaaggctcacagagcacagaagaggggcctccacaatggccatgtacaacagtggggatttggatattgaaaggggggtcagattagatgaactgtaacttttaacctgccgagt

SEQ ID NO: 292280 - DNA, 439 bp, Homo sapiens
tgcgtctagagtgttgacagttgtttccatggacttcaaatcaacccaaccctgtgagcacagactttcagcaccagagtcagatttcccaaaaatgctattcttgaagcgtagagccagactcacagatcctgtaaagaaaacagatctttcagcaagtgaaacacccaatcttccattgcatgggactcacagaggttctgagggagagatgtgaatagaaggagtgatcatcactgtggactctatttcttccatctgtgcgtgcaagatttatatctgtatgtgtttgttttaaagttttattgaggtataattgatacacaataatctgtacctatttaatgtatacaatttgatgagtttggacatacttaaatacctgtgaaaccatcaccacaatcaaggtaatagacatagccatcacctccaaaagttt

SEQ ID NO: 292281 - DNA, 742 bp, Homo sapiens
acgggcaaaaaaggtcggacaggcaagactaactagggtagtacatctcccaaatagggcaaatattgttaaactgtgcaatttaacagtttgtggtgttatcaattagcttcttagtgttgaagaaaagaagaaaatagggcatctttgtaaattgctgattgaccaaggtcgaatccagtatttgcagcagaagggattcagtcctgctttgcagtactatacagaccctctggtgtctttggaaaatgttttgttaactgctttaccaaatcattcttcatcaccagaaacaactgcttaatggaaaagaaatttgagcatcatctgtcttccaccaaaaaaaattttttaattatatttttatatcaaaaaaatatatactttaaatagcaaataatatgaactttaaaaaatgctgtggcctcattaaactttggtaatagcttttctttttacttcagaaatccaaacattagagaattcaccaaagtaatcctctttagaagggcatcttgaattatattatccatccgtatttatggagattggtaaagtagttgaaccgttgacttggtgatctgctcttctccgtgactcttgtatgtatgtgtgcataaactgaaggccaaataattcccgttcctcttcttcatctgtgccttcactgggaggaagtgatactttcaatttcagtgggttgtctctgaagttgacaaacctcagatttgccatttcttcc

SEQ ID NO: 292282 - DNA, 3164 bp, Homo sapiens
tatcgctatcgtcgaccacgcccccgagcgagccctagaattatggcgacctccgcgacgtcgccgcacgcgcctggttttccagctgagggtagatgcggttactatgtggaaaagaagaaacggttctgcaggatggtggtggccgcagggaaaagattttgtggtgaacacgctggagccatggaggaagaagatgctcggaaaagaatcctgtgtcctttagatccaaaacacacagtatatgaagatcaactagcaaagcatttgaaaaaatgtaactcaagagagaaaccaaaacctgatttctatattcaagatattaatgcaggcttaagagatgaaacagaaatacctgaacaattagttccaatttcttctctatctgaagagcagttggaaaagttaattaagaaattgagaaaagcaagtgaaggcttgaattctacacttaaagatcatattatgtcccatccagcattacacgatgcacttaatgaccctaaaaatggcgattctgcaaccaagcacctgaaacagcaggcttctattttaggtaacattgaaaatttaaagttacttggtccaagaagatgctttgttgagtttggagcgggaaagggaaaattatctcattgggttgatattgccttaaaagatgctgaaaaagttcacttcatcctagtggaaaaggtgaccacaagattcaaggtggatggaaaacacagaaagaaaaattcagtgtttgaaagacttcaaattgatattcaacacttgtgtttgaacaagattcctgtgctaagagaagaaaaactacctgtggtaggaattggaaagcatctgtgtggtatggcaacagatcttgcattacgatgtttggttgaaacctatgctgccagttttgaggaaaggaatgaagaacctttagccaaacgcataaagaatgataaaacagaaaaagaaatttacactttggccaaggaaggaaatgaaaaaaatgtcccagagaagtggaaccctgtggctggcattgttattgcactctgttgtcaccacaggtgtgattggagacattatgtgggcaaagaatatttcagggctctaggccttggagcagtggaattccattatttccagcgaatgagtagttgggcaacttgtgggatgcggaaaacatctttggaaacctcaaatagtaccacaaagaggcaagataatcagaatgatgatagtgaagagcatgatgatggaggatacagaatcacagatgatggcgctgattgtttgcctgggcttcttagtgttgaagaaaagaagaaaatagggcatctttgtaaattgctgattgaccaaggtcgaatccagtatttgcagcagaagggattcagtcctgctttgcagtactatacagaccctctggtgtctttggaaaatgttttgttaactgctttaccaaatcattcttcatcaccagaaacaactgcttaatggaaaagaaatttgagcatcatctgtcttccaccaaaaaaaattttttaattatatttttatatcaaaaaaatatatactttaaatagcaaataatatgaactttaaaaaatgctgtggcctcattaaactttggtaatagcttttctttttacttcagaaatccaaacattagagaattcaccaaagtaatcctctttagaagggcatcttgaattatattatccatccgtatttatggagattggtaaagtagttgaaccgttgacttggtgatctgaaacatacataacatgtcaacacataattagcgtatttctgtttgtattaattttggaaatttatcttcctttgattttatttaatattttttatttcttaagttcaagaggtagtgattgattgtaacaagggccaatctgagaatttgacttatatgtggacatttttccctacagatctggaaagcacaattgtgattttctcaaatgcagacaattcagagatattcacaattaataaacacaattaattaatgaagtcaccttcaaatttccagagccatacatgtatatattgtcagaatctgtccatgacaaacacaaaactgaagagctgttttcaaagaaaaaagattatttcacttaattattttgttggataattgtctagttagaacttccaaaaagatacttacaaacataattcacaaatttgaaataatttctgaagttgattagctatctcatatcttttatcaggtcattttttatatatgtaggcacaaacaataagtatgttctcttctgtttgggaaaataatttggaataaaatagaaattagataatgaaaccaaaaaccttctcaaatttaggccttatttaactcatgactggtttctatgcacaagaaaatactaaaccaaatatatggtaggactgttattctcttctgcatcttatccctattttgtttctgcctttatttgtaaaaattgtcttaattgatggtacatttgccaagacaaaggttcagaattactaattttagatattatgatattctgaaataactatttttatcctgtagttctatgattatatgatttgtaaataagaagcctaaccaatttaaaattcctgactttagtctcatatatcttgtcagactgtctcggttcaaattccaaacctaccatcttcagttgtgcgaccttgggcatgctacctaatctctttgtgcctcaatttcctccttttaaaatggggatgatgatgataacaataatacctacctcacaaggttgttgtgagcatcaaatgagataacacaagtaaaatgcatagaacagttccaagcacagagtaattcaataaatattaactagtaatagtagtggtagtaactcgtgaatctttttaataacataataggctttgattttattatctctttaagttgttaacttttttcccttgttataagttttatgtcaagtaaggtagtttgtttaagttagttacccatgtccccaatcaagggaacctaaatgaagatatatcattaaataattaacctttttttattgtgtcaagcaatactaatttgtgtcataaaatttgttttgcatcattcaacaatttatgcccagaaataaacaatattctacaacagg

SEQ ID NO: 292283 - DNA, 3462 bp, Homo sapiens
tatcgctatcgtcgaccacgcccccgagcgagccctagaattatggcgacctccgcgacgtcgccgcacgcgcctggttttccagctgagggtagatgcggttactatgtggaaaagaagaaacggttctgcaggatggtggtggccgcagggaaaagattttgtggtgaacacgctggagccatggaggaagaagatgctcggaaaagaatcctgtgtcctttagatccaaaacacacagtatatgaagatcaactagcaaagcatttgaaaaaatgtaactcaagagagaaaccaaaacctgatttctatattcaagatattaatgcaggcttaagagatgaaacagaaatacctgaacaattagttccaatttcttctctatctgaagagcagttggaaaagttaattaagaaattgagaaaagcaagtgaaggcttgaattctacacttaaagatcatattatgtcccatccagcattacacgatgcacttaatgaccctaaaaatggcgattctgcaaccaagcacctgaaacagcaggcttctattttaggtaacattgaaaatttaaagttacttggtccaagaagatgctttgttgagtttggagcgggaaagggaaaattatctcattgggttgatattgccttaaaagatgctgaaaaagttcacttcatcctagtggaaaaggtgaccacaagattcaaggtggatggaaaacacagaaagaaaaattcagtgtttgaaagacttcaaattgatattcaacacttgtgtttgaacaagattcctgtgctaagagaagaaaaactacctgtggtaggaattggaaagcatctgtgtggtatggcaacagatcttgcattacgatgtttggttgaaacctatgctgccagttttgaggaaaggaatgaagaacctttagccaaacgcataaagaatgataaaacagaaaaagaaatttacactttggccaaggaaggaaatgaaaaaaatgtcccagagaagtggaaccctgtggctggcattgttattgcactctgttgtcaccacaggtgtgattggagacattatgtgggcaaagaatatttcagggctctaggccttggagcagtggaattccattatttccagcgaatgagtagttgggcaacttgtgggatgcggaaaacatctttggaaacctcaaatagtaccacaaagaggcaagataatcagaatgatgatagtgaagagcatgatgatggaggatacagaatcacagatgatggcgctgattgtttgcctgggtaagagactacttttgtaatgcatgatactaaaggagaaatattatattgtactgtactttagatgactattatcaacaattcatgaaaatgtattttataatctaattttagaataagctaaaatatacacatcttttattgtggtcataaatataatgtgtcttggaagcatgggacaaagtacttagtacattatgggttagttaacagtctctcaataaatagtgacaaaaataattttttataaacttttgcaaaattttaacaatgttttgtgtgtgtttattcaatttaggcttcttagtgttgaagaaaagaagaaaatagggcatctttgtaaattgctgattgaccaaggtcgaatccagtatttgcagcagaagggattcagtcctgctttgcagtactatacagaccctctggtgtctttggaaaatgttttgttaactgctttaccaaatcattcttcatcaccagaaacaactgcttaatggaaaagaaatttgagcatcatctgtcttccaccaaaaaaaattttttaattatatttttatatcaaaaaaatatatactttaaatagcaaataatatgaactttaaaaaatgctgtggcctcattaaactttggtaatagcttttctttttacttcagaaatccaaacattagagaattcaccaaagtaatcctctttagaagggcatcttgaattatattatccatccgtatttatggagattggtaaagtagttgaaccgttgacttggtgatctgaaacatacataacatgtcaacacataattagcgtatttctgtttgtattaattttggaaatttatcttcctttgattttatttaatattttttatttcttaagttcaagaggtagtgattgattgtaacaagggccaatctgagaatttgacttatatgtggacatttttccctacagatctggaaagcacaattgtgattttctcaaatgcagacaattcagagatattcacaattaataaacacaattaattaatgaagtcaccttcaaatttccagagccatacatgtatatattgtcagaatctgtccatgacaaacacaaaactgaagagctgttttcaaagaaaaaagattatttcacttaattattttgttggataattgtctagttagaacttccaaaaagatacttacaaacataattcacaaatttgaaataatttctgaagttgattagctatctcatatcttttatcaggtcattttttatatatgtaggcacaaacaataagtatgttctcttctgtttgggaaaataatttggaataaaatagaaattagataatgaaaccaaaaaccttctcaaatttaggccttatttaactcatgactggtttctatgcacaagaaaatactaaaccaaatatatggtaggactgttattctcttctgcatcttatccctattttgtttctgcctttatttgtaaaaattgtcttaattgatggtacatttgccaagacaaaggttcagaattactaattttagatattatgatattctgaaataactatttttatcctgtagttctatgattatatgatttgtaaataagaagcctaaccaatttaaaattcctgactttagtctcatatatcttgtcagactgtctcggttcaaattccaaacctaccatcttcagttgtgcgaccttgggcatgctacctaatctctttgtgcctcaatttcctccttttaaaatggggatgatgatgataacaataatacctacctcacaaggttgttgtgagcatcaaatgagataacacaagtaaaatgcatagaacagttccaagcacagagtaattcaataaatattaactagtaatagtagtggtagtaactcgtgaatctttttaataacataataggctttgattttattatctctttaagttgttaacttttttcccttgttataagttttatgtcaagtaaggtagtttgtttaagttagttacccatgtccccaatcaagggaacctaaatgaagatatatcattaaataattaacctttttttattgtgtcaagcaatactaatttgtgtcataaaatttgttttgcatcattcaacaatttatgcccagaaataaacaatattctacaacagg

SEQ ID NO: 292284 - DNA, 3263 bp, Homo sapiens
tatcgctatcgtcgaccacgcccccgagcgagccctagaattatggcgacctccgcgacgtcgccgcacgcgcctggttttccagctgagggtagatgcggttactatgtggaaaagaagaaacggttctgcaggatggtggtggccgcagggaaaagattttgtggtgaacacgctggagccatggaggaagaagatgctcggaaaagaatcctgtgtcctttagatccaaaacacacagtatatgaagatcaactagcaaagcatttgaaaaaatgtaactcaagagagaaaccaaaacctgatttctatattcaagatattaatgcaggcttaagagatgaaacagaaatacctgaacaattagttccaatttcttctctatctgaagagcagttggaaaagttaattaagaaattgagaaaagcaagtgaaggcttgaattctacacttaaagatcatattatgtcccatccagcattacacgatgcacttaatgaccctaaaaatggcgattctgcaaccaagcacctgaaacagcaggcttctattttaggtaacattgaaaatttaaagttacttggtccaagaagatgctttgttgagtttggagcgggaaagggaaaattatctcattgggttgatattgccttaaaagatgctgaaaaagttcacttcatcctagtggaaaaggtgaccacaagattcaaggtggatggaaaacacagaaagaaaaattcagtgtttgaaagacttcaaattgatattcaacacttgtgtttgaacaagattcctgtgctaagagaagaaaaactacctgtggtaggaattggaaagcatctgtgtggtatggcaacaggtgtgattggagacattatgtgggcaaagaatatttcagggctctaggccttggagcagtggaattccattatttccagcgaatgagtagttgggcaacttgtgggatgcggaaaacatctttggaaacctcaaatagtaccacaaagaggcaagataatcagaatgatgatagtgaagagcatgatgatggaggatacagaatcacagatgatggcgctgattgtttgcctgggtaagagactacttttgtaatgcatgatactaaaggagaaatattatattgtactgtactttagatgactattatcaacaattcatgaaaatgtattttataatctaattttagaataagctaaaatatacacatcttttattgtggtcataaatataatgtgtcttggaagcatgggacaaagtacttagtacattatgggttagttaacagtctctcaataaatagtgacaaaaataattttttataaacttttgcaaaattttaacaatgttttgtgtgtgtttattcaatttaggcttcttagtgttgaagaaaagaagaaaatagggcatctttgtaaattgctgattgaccaaggtcgaatccagtatttgcagcagaagggattcagtcctgctttgcagtactatacagaccctctggtgtctttggaaaatgttttgttaactgctttaccaaatcattcttcatcaccagaaacaactgcttaatggaaaagaaatttgagcatcatctgtcttccaccaaaaaaaattttttaattatatttttatatcaaaaaaatatatactttaaatagcaaataatatgaactttaaaaaatgctgtggcctcattaaactttggtaatagcttttctttttacttcagaaatccaaacattagagaattcaccaaagtaatcctctttagaagggcatcttgaattatattatccatccgtatttatggagattggtaaagtagttgaaccgttgacttggtgatctgaaacatacataacatgtcaacacataattagcgtatttctgtttgtattaattttggaaatttatcttcctttgattttatttaatattttttatttcttaagttcaagaggtagtgattgattgtaacaagggccaatctgagaatttgacttatatgtggacatttttccctacagatctggaaagcacaattgtgattttctcaaatgcagacaattcagagatattcacaattaataaacacaattaattaatgaagtcaccttcaaatttccagagccatacatgtatatattgtcagaatctgtccatgacaaacacaaaactgaagagctgttttcaaagaaaaaagattatttcacttaattattttgttggataattgtctagttagaacttccaaaaagatacttacaaacataattcacaaatttgaaataatttctgaagttgattagctatctcatatcttttatcaggtcattttttatatatgtaggcacaaacaataagtatgttctcttctgtttgggaaaataatttggaataaaatagaaattagataatgaaaccaaaaaccttctcaaatttaggccttatttaactcatgactggtttctatgcacaagaaaatactaaaccaaatatatggtaggactgttattctcttctgcatcttatccctattttgtttctgcctttatttgtaaaaattgtcttaattgatggtacatttgccaagacaaaggttcagaattactaattttagatattatgatattctgaaataactatttttatcctgtagttctatgattatatgatttgtaaataagaagcctaaccaatttaaaattcctgactttagtctcatatatcttgtcagactgtctcggttcaaattccaaacctaccatcttcagttgtgcgaccttgggcatgctacctaatctctttgtgcctcaatttcctccttttaaaatggggatgatgatgataacaataatacctacctcacaaggttgttgtgagcatcaaatgagataacacaagtaaaatgcatagaacagttccaagcacagagtaattcaataaatattaactagtaatagtagtggtagtaactcgtgaatctttttaataacataataggctttgattttattatctctttaagttgttaacttttttcccttgttataagttttatgtcaagtaaggtagtttgtttaagttagttacccatgtccccaatcaagggaacctaaatgaagatatatcattaaataattaacctttttttattgtgtcaagcaatactaatttgtgtcataaaatttgttttgcatcattcaacaatttatgcccagaaataaacaatattctacaacagg

SEQ ID NO: 292285 - DNA, 3799 bp, Homo sapiens
tatcgctatcgtcgaccacgcccccgagcgagccctagaattatggcgacctccgcgacgtcgccgcacgcgcctggttttccagctgagggtagatgcggttactatgtggaaaagaagaaacggttctgcaggatggtggtggccgcagggaaaagattttgtggtgaacacgctggagccatggaggaagaagatgctcggaaaagaatcctgtgtcctttagatccaaaacacacagtatatgaagatcaactagcaaagcatttgaaaaaatgtaactcaagagagaaaccaaaacctgatttctatattcaagatattaatgcaggcttaagagatgaaacagaaatacctgaacaattagttccaatttcttctctatctgaagagcagttggaaaagttaattaagaaattgagaaaagcaagtgaaggcttgaattctacacttaaagatcatattatgtcccatccagcattacacgatgcacttaatgaccctaaaaatggcgattctgcaaccaagcacctgaaacagcaggtatgtttaggctatagtaactactaaacatggcctttgttcatttgttaaaactgttttaaatgtaattattaataagattttattttgtttacctttgagggtaccaaatatttccatttcaaaaatatatagaaacatatacaaaaaattgagggcatggatgtgattctgagtaccgtatattaaatatttaaaggcaagagagaaaaattttaagtcaaatacaaattatcaatgtaagcatactgccttatgcagaaattaccttgctgttttcccatttgaaccaaatgtgtttactctagtttataaaataatcttgtgaagtttgcaggcttctattttaggtaacattgaaaatttaaagttacttggtccaagaagatgctttgttgagtttggagcgggaaagggaaaattatctcattgggttgatattgccttaaaagatgctgaaaaagttcacttcatcctagtggaaaaggtgaccacaagattcaaggtggatggaaaacacagaaagaaaaattcagtgtttgaaagacttcaaattgatattcaacacttgtgtttgaacaagattcctgtgctaagagaagaaaaactacctgtggtaggaattggaaagcatctgtgtggtatggcaacagatcttgcattacgatgtttggttgaaacctatgctgccagttttgaggaaaggaatgaagaacctttagccaaacgcataaagaatgataaaacagaaaaagaaatttacactttggccaaggaaggaaatgaaaaaaatgtcccagagaagtggaaccctgtggctggcattgttattgcactctgttgtcaccacaggtgtgattggagacattatgtgggcaaagaatatttcagggctctaggccttggagcagtggaattccattatttccagcgaatgagtagttgggcaacttgtgggatgcggaaaacatctttggaaacctcaaatagtaccacaaagaggcaagataatcagaatgatgatagtgaagagcatgatgatggaggatacagaatcacagatgatggcgctgattgtttgcctgggtaagagactacttttgtaatgcatgatactaaaggagaaatattatattgtactgtactttagatgactattatcaacaattcatgaaaatgtattttataatctaattttagaataagctaaaatatacacatcttttattgtggtcataaatataatgtgtcttggaagcatgggacaaagtacttagtacattatgggttagttaacagtctctcaataaatagtgacaaaaataattttttataaacttttgcaaaattttaacaatgttttgtgtgtgtttattcaatttaggcttcttagtgttgaagaaaagaagaaaatagggcatctttgtaaattgctgattgaccaaggtcgaatccagtatttgcagcagaagggattcagtcctgctttgcagtactatacagaccctctggtgtctttggaaaatgttttgttaactgctttaccaaatcattcttcatcaccagaaacaactgcttaatggaaaagaaatttgagcatcatctgtcttccaccaaaaaaaattttttaattatatttttatatcaaaaaaatatatactttaaatagcaaataatatgaactttaaaaaatgctgtggcctcattaaactttggtaatagcttttctttttacttcagaaatccaaacattagagaattcaccaaagtaatcctctttagaagggcatcttgaattatattatccatccgtatttatggagattggtaaagtagttgaaccgttgacttggtgatctgaaacatacataacatgtcaacacataattagcgtatttctgtttgtattaattttggaaatttatcttcctttgattttatttaatattttttatttcttaagttcaagaggtagtgattgattgtaacaagggccaatctgagaatttgacttatatgtggacatttttccctacagatctggaaagcacaattgtgattttctcaaatgcagacaattcagagatattcacaattaataaacacaattaattaatgaagtcaccttcaaatttccagagccatacatgtatatattgtcagaatctgtccatgacaaacacaaaactgaagagctgttttcaaagaaaaaagattatttcacttaattattttgttggataattgtctagttagaacttccaaaaagatacttacaaacataattcacaaatttgaaataatttctgaagttgattagctatctcatatcttttatcaggtcattttttatatatgtaggcacaaacaataagtatgttctcttctgtttgggaaaataatttggaataaaatagaaattagataatgaaaccaaaaaccttctcaaatttaggccttatttaactcatgactggtttctatgcacaagaaaatactaaaccaaatatatggtaggactgttattctcttctgcatcttatccctattttgtttctgcctttatttgtaaaaattgtcttaattgatggtacatttgccaagacaaaggttcagaattactaattttagatattatgatattctgaaataactatttttatcctgtagttctatgattatatgatttgtaaataagaagcctaaccaatttaaaattcctgactttagtctcatatatcttgtcagactgtctcggttcaaattccaaacctaccatcttcagttgtgcgaccttgggcatgctacctaatctctttgtgcctcaatttcctccttttaaaatggggatgatgatgataacaataatacctacctcacaaggttgttgtgagcatcaaatgagataacacaagtaaaatgcatagaacagttccaagcacagagtaattcaataaatattaactagtaatagtagtggtagtaactcgtgaatctttttaataacataataggctttgattttattatctctttaagttgttaacttttttcccttgttataagttttatgtcaagtaaggtagtttgtttaagttagttacccatgtccccaatcaagggaacctaaatgaagatatatcattaaataattaacctttttttattgtgtcaagcaatactaatttgtgtcataaaatttgttttgcatcattcaacaatttatgcccagaaataaacaatattctacaacagg

SEQ ID NO: 292286 - DNA, 3757 bp, Homo sapiens
tatcgctatcgtcgaccacgcccccgagcgagccctagaattatggcgacctccgcgacgtcgccgcacgcgcctggttttccagctgagggtagatgcggttactatgtggaaaagaagaaacggttctgcaggatggtggtggccgcagggaaaagattttgtggtgaacacgctggagccatggaggaagaagatgctcggaaaagaatcctgtgtcctttagatccaaaacacacagtatatgaagatcaactagcaaagcatttgaaaaaatgtaactcaagagagaaaccaaaacctgatttctatattcaagatattaatgcaggcttaagagatgaaacagaaatacctgaacaattagttccaatttcttctctatctgaagagcagttggaaaagttaattaagaaattgagaaaagcaagtgaagcattacacgatgcacttaatgaccctaaaaatggcgattctgcaaccaagcacctgaaacagcaggtatgtttaggctatagtaactactaaacatggcctttgttcatttgttaaaactgttttaaatgtaattattaataagattttattttgtttacctttgagggtaccaaatatttccatttcaaaaatatatagaaacatatacaaaaaattgagggcatggatgtgattctgagtaccgtatattaaatatttaaaggcaagagagaaaaattttaagtcaaatacaaattatcaatgtaagcatactgccttatgcagaaattaccttgctgttttcccatttgaaccaaatgtgtttactctagtttataaaataatcttgtgaagtttgcaggcttctattttaggtaacattgaaaatttaaagttacttggtccaagaagatgctttgttgagtttggagcgggaaagggaaaattatctcattgggttgatattgccttaaaagatgctgaaaaagttcacttcatcctagtggaaaaggtgaccacaagattcaaggtggatggaaaacacagaaagaaaaattcagtgtttgaaagacttcaaattgatattcaacacttgtgtttgaacaagattcctgtgctaagagaagaaaaactacctgtggtaggaattggaaagcatctgtgtggtatggcaacagatcttgcattacgatgtttggttgaaacctatgctgccagttttgaggaaaggaatgaagaacctttagccaaacgcataaagaatgataaaacagaaaaagaaatttacactttggccaaggaaggaaatgaaaaaaatgtcccagagaagtggaaccctgtggctggcattgttattgcactctgttgtcaccacaggtgtgattggagacattatgtgggcaaagaatatttcagggctctaggccttggagcagtggaattccattatttccagcgaatgagtagttgggcaacttgtgggatgcggaaaacatctttggaaacctcaaatagtaccacaaagaggcaagataatcagaatgatgatagtgaagagcatgatgatggaggatacagaatcacagatgatggcgctgattgtttgcctgggtaagagactacttttgtaatgcatgatactaaaggagaaatattatattgtactgtactttagatgactattatcaacaattcatgaaaatgtattttataatctaattttagaataagctaaaatatacacatcttttattgtggtcataaatataatgtgtcttggaagcatgggacaaagtacttagtacattatgggttagttaacagtctctcaataaatagtgacaaaaataattttttataaacttttgcaaaattttaacaatgttttgtgtgtgtttattcaatttaggcttcttagtgttgaagaaaagaagaaaatagggcatctttgtaaattgctgattgaccaaggtcgaatccagtatttgcagcagaagggattcagtcctgctttgcagtactatacagaccctctggtgtctttggaaaatgttttgttaactgctttaccaaatcattcttcatcaccagaaacaactgcttaatggaaaagaaatttgagcatcatctgtcttccaccaaaaaaaattttttaattatatttttatatcaaaaaaatatatactttaaatagcaaataatatgaactttaaaaaatgctgtggcctcattaaactttggtaatagcttttctttttacttcagaaatccaaacattagagaattcaccaaagtaatcctctttagaagggcatcttgaattatattatccatccgtatttatggagattggtaaagtagttgaaccgttgacttggtgatctgaaacatacataacatgtcaacacataattagcgtatttctgtttgtattaattttggaaatttatcttcctttgattttatttaatattttttatttcttaagttcaagaggtagtgattgattgtaacaagggccaatctgagaatttgacttatatgtggacatttttccctacagatctggaaagcacaattgtgattttctcaaatgcagacaattcagagatattcacaattaataaacacaattaattaatgaagtcaccttcaaatttccagagccatacatgtatatattgtcagaatctgtccatgacaaacacaaaactgaagagctgttttcaaagaaaaaagattatttcacttaattattttgttggataattgtctagttagaacttccaaaaagatacttacaaacataattcacaaatttgaaataatttctgaagttgattagctatctcatatcttttatcaggtcattttttatatatgtaggcacaaacaataagtatgttctcttctgtttgggaaaataatttggaataaaatagaaattagataatgaaaccaaaaaccttctcaaatttaggccttatttaactcatgactggtttctatgcacaagaaaatactaaaccaaatatatggtaggactgttattctcttctgcatcttatccctattttgtttctgcctttatttgtaaaaattgtcttaattgatggtacatttgccaagacaaaggttcagaattactaattttagatattatgatattctgaaataactatttttatcctgtagttctatgattatatgatttgtaaataagaagcctaaccaatttaaaattcctgactttagtctcatatatcttgtcagactgtctcggttcaaattccaaacctaccatcttcagttgtgcgaccttgggcatgctacctaatctctttgtgcctcaatttcctccttttaaaatggggatgatgatgataacaataatacctacctcacaaggttgttgtgagcatcaaatgagataacacaagtaaaatgcatagaacagttccaagcacagagtaattcaataaatattaactagtaatagtagtggtagtaactcgtgaatctttttaataacataataggctttgattttattatctctttaagttgttaacttttttcccttgttataagttttatgtcaagtaaggtagtttgtttaagttagttacccatgtccccaatcaagggaacctaaatgaagatatatcattaaataattaacctttttttattgtgtcaagcaatactaatttgtgtcataaaatttgttttgcatcattcaacaatttatgcccagaaataaacaatattctacaacagg

SEQ ID NO: 292287 - DNA, 3490 bp, Homo sapiens
tatcgctatcgtcgaccacgcccccgagcgagccctagaattatggcgacctccgcgacgtcgccgcacgcgcctggttttccagctgagggtagatgcggttactatgtggaaaagaagaaacggttctgcaggatggtggtggccgcagggaaaagattttgtggtgaacacgctggagccatggaggaagaagatgctcggaaaagaatcctgtgtcctttagatccaaaacacacagtatatgaagatcaactagcaaagcatttgaaaaaatgtaactcaagagagaaaccaaaacctgatttctatattcaagatattaatgcaggcttaagagatgaaacagaaatacctgaacaattagttccaatttcttctctatctgaagagcagttggaaaagttaattaagaaattgagaaaagcaagtgaaggcttgaattctacacttaaagatcatattatgtcccatccagcattacacgatgcacttaatgaccctaaaaatggcgattctgcaaccaagcacctgaaacagcaggcttctattttaggtaacattgaaaatttaaagttacttggtccaagaagatgctttgttgagtttggagcgggaaagggaaaattatctcattgggttgatattgccttaaaagatgctgaaaaagttcacttcatcctagtggaaaaggtgaccacaagattcaaggtggatggaaaacacagaaagaaaaattcagtgtttgaaagacttcaaattgatattcaacacttgtgtttgaacaagattcctgtgctaagagaagaaaaactacctgtggtaggaattggaaagcatctgtgtggtatggcaacagatcttgcattacgatgtttggttgaaacctatgctgccagttttgaggaaaggaatgaagaacctttagccaaacgcataaagaatgataaaacagaaaaagaaatttacactttggccaaggaaggaaatgaaaaaaatgtcccagagaagtggaaccctgtggctggcattgttattgcactctgttgtcaccacaggtgtgattggagacattatgtgggcaaagaatatttcagggctctaggccttggagcagtggaattccattatttccagcgaatgagtagttgggcaacttgtgggatgcggaaaacatctttggaaacctcaaatagtaccacaaagaggcaagataatcagaatgatgatagtgaagagcatgatgatggaggatacagaatcacagatgatggcgctgattgtttgcctgggtaagagactacttttgtaatgcatgatactaaaggagaaatattatattgtactgtactttagatgactattatcaacaattcatgaaaatgtattttataatctaattttagaataagctaaaatatacacatcttttattgtggtcataaatataatgtgtcttggaagcatgggacaaagtacttagtacattatgggttagttaacagtctctcaataaatagtgacaaaaataattttttataaacttttgcaaaattttaacaatgttttgtgtgtgtttattcaatttaggcttcttagtgttgaagaaaagaagaaaatagggcatctttgtaaattgctgattgaccaaggtcgaatccagtatttgcagcagaagggattcagtcctgctttgcagtactatacagaccctctggtgtctttggaaaatgttttgttaactgctttaccaaatcattcttcatcaccagaaacaactgcttaatggaaaagaaatttgagcatcatctgtcttccaccaaaaaaaattttttaattatatttttatatcaaaaaaatatatactttaaatagcaaataatatgaactttaaaaaatgctgtggcctcattaaactttggtaatagcttttctttttacttcagaaatccaaacattagagaattcaccaaagtaatcctctttagaagggcatcttgaattatattatccatccgtatttatggagattggtaaagtagttgaaccgttgacttggtgatctgaaacatacataacatgtcaacacataattagcgtatttctgtttgtattaattttggaaatttatcttcctttgattttatttaatattttttatttcttaagttcaagaggtagtgattgattgtaacaagggccaatctgagaatttgacttatatgtggacatttttccctacagatctggaaagcacaattgtgattttctcaaatgcagacaattcagagatattcacaattaataaacacaattaattaatgaagtcaccttcaaatttccagagccatacatgtatatattgtcagaatctgtccatgacaaacacaaaactgaagagctgttttcaaagaaaaaagattatttcacttaattattttgttggataattgtctagttagaacttccaaaaagatacttacaaacataattcacaaatttgaaataatttctgaagttgattagctatctcatatcttttatcaggtcattttttatatatgtaggcacaaacaataagtatgttctcttctgtttgggaaaataatttggaataaaatagaaattagataatgaaaccaaaaaccttctcaaatttaggccttatttaactcatgactggtttctatgcacaagaaaatactaaaccaaatatatggtaggactgttattctcttctgcatcttatccctattttgtttctgcctttatttgtaaaaattgtcttaattgatggtacatttgccaagacaaaggttcagaattactaattttagatattatgatattctgaaataactatttttatcctgtagttctatgattatatgatttgtaaataagaagcctaaccaatttaaaattcctgactttagtctcatatatcttgtcagactgtctcggttcaaattccaaacctaccatcttcagttgtgcgaccttgggcatgctacctaatctctttgtgcctcaatttcctccttttaaaatggggatgatgatgataacaataatacctacctcacaaggttgttgtgagcatcaaatgagataacacaagtaaaatgcatagaacagttccaagcacagagtaattcaataaatattaactagtaatagtagtggtagtaactcgtgaatctttttaataacataataggctttgattttattatctctttaagttgttaacttttttcccttgttataagttttatgtcaagtaaggtagtttgtttaagttagttacccatgtccccaatcaagggaacctaaatgaagatatatcattaaataattaacctttttttattgtgtcaagcaatactaatttgtgtcataaaatttgttttgcatcattcaacaatttatgcccagaaataaacaatattctacaacaggaaaaaaaaaaaataaaaacaaaaaaagg

SEQ ID NO: 292288 - DNA, 2835 bp, Homo sapiens
tattgggaagtaggctttatgcagaataaatcattaaagaaattgagaagatagaagagcaaatttgaatgaagttgataattcatgatagtattattacaaatataaagctgagtaggtttttgctgtttttattgttgagtttttaaaaacagtactgcttaataaatgtaaaaagtatttatttttaaagatgatgtggtttgggggggccacataattgtgtttgcagatcttgcattacgatgtttggttgaaacctatgctgccagttttgaggaaaggaatgaagaacctttagccaaacgcataaagaatgataaaacagaaaaagaaatttacactttggccaaggaaggaaatgaaaaaaatgtcccagagaagtggaaccctgtggctggcattgttattgcactctgttgtcaccacaggtgtgattggagacattatgtgggcaaagaatatttcagggctctaggccttggagcagtggaattccattatttccagcgaatgagtagttgggcaacttgtgggatgcggaaaacatctttggaaacctcaaatagtaccacaaagaggcaagataatcagaatgatgatagtgaagagcatgatgatggaggatacagaatcacagatgatggcgctgattgtttgcctgggtaagagactacttttgtaatgcatgatactaaaggagaaatattatattgtactgtactttagatgactattatcaacaattcatgaaaatgtattttataatctaattttagaataagctaaaatatacacatcttttattgtggtcataaatataatgtgtcttggaagcatgggacaaagtacttagtacattatgggttagttaacagtctctcaataaatagtgacaaaaataattttttataaacttttgcaaaattttaacaatgttttgtgtgtgtttattcaatttaggcttcttagtgttgaagaaaagaagaaaatagggcatctttgtaaattgctgattgaccaaggtcgaatccagtatttgcagcagaagggattcagtcctgctttgcagtactatacagaccctctggtgtctttggaaaatgttttgttaactgctttaccaaatcattcttcatcaccagaaacaactgcttaatggaaaagaaatttgagcatcatctgtcttccaccaaaaaaaattttttaattatatttttatatcaaaaaaatatatactttaaatagcaaataatatgaactttaaaaaatgctgtggcctcattaaactttggtaatagcttttctttttacttcagaaatccaaacattagagaattcaccaaagtaatcctctttagaagggcatcttgaattatattatccatccgtatttatggagattggtaaagtagttgaaccgttgacttggtgatctgaaacatacataacatgtcaacacataattagcgtatttctgtttgtattaattttggaaatttatcttcctttgattttatttaatattttttatttcttaagttcaagaggtagtgattgattgtaacaagggccaatctgagaatttgacttatatgtggacatttttccctacagatctggaaagcacaattgtgattttctcaaatgcagacaattcagagatattcacaattaataaacacaattaattaatgaagtcaccttcaaatttccagagccatacatgtatatattgtcagaatctgtccatgacaaacacaaaactgaagagctgttttcaaagaaaaaagattatttcacttaattattttgttggataattgtctagttagaacttccaaaaagatacttacaaacataattcacaaatttgaaataatttctgaagttgattagctatctcatatcttttatcaggtcattttttatatatgtaggcacaaacaataagtatgttctcttctgtttgggaaaataatttggaataaaatagaaattagataatgaaaccaaaaaccttctcaaatttaggccttatttaactcatgactggtttctatgcacaagaaaatactaaaccaaatatatggtaggactgttattctcttctgcatcttatccctattttgtttctgcctttatttgtaaaaattgtcttaattgatggtacatttgccaagacaaaggttcagaattactaattttagatattatgatattctgaaataactatttttatcctgtagttctatgattatatgatttgtaaataagaagcctaaccaatttaaaattcctgactttagtctcatatatcttgtcagactgtctcggttcaaattccaaacctaccatcttcagttgtgcgaccttgggcatgctacctaatctctttgtgcctcaatttcctccttttaaaatggggatgatgatgataacaataatacctacctcacaaggttgttgtgagcatcaaatgagataacacaagtaaaatgcatagaacagttccaagcacagagtaattcaataaatattaactagtaatagtagtggtagtaactcgtgaatctttttaataacataataggctttgattttattatctctttaagttgttaacttttttcccttgttataagttttatgtcaagtaaggtagtttgtttaagttagttacccatgtccccaatcaagggaacctaaatgaagatatatcattaaataattaacctttttttattgtgtcaagcaatactaatttgtgtcataaaatttgttttgcatcattcaacaatttatgcccagaaataaacaatattctacaacagg

SEQ ID NO: 292289 - DNA, 2463 bp, Homo sapiens
tatcgctatcgtcgaccacgcccccgagcgagccctagaattatggcgacctccgcgacgtcgccgcacgcgcctggttttccagctgagggtagatgcggttactatgtggaaaagaagaaacggttctgcaggatggtggtggccgcagggaaaagattttgtggtgaacacgctggagccatggaggaagaagatgctcggaaaagaatcctgtgtcctttagatccaaaacacacagtatatgaagatcaactagcaaagcatttgaaaaaatgtaactcaagagagaaaccaaaacctgatttctatattcaagatattaatgcaggcttaagagatgaaacagaaatacctgaacaattagttccaatttcttctctatctgaagagcagttggaaaagttaattaagaaattgagaaaagcaagtgaaggcttgaattctacacttaaagatcatattatgtcccatccagcattacacgatgcacttaatgaccctaaaaatggcgattctgcaaccaagcacctgaaacagcaggcttctattttaggtaacattgaaaatttaaagttacttggtccaagaagatgctttgttgagtttggagcgggaaagggaaaattatctcattgggttgatattgccttaaaagatgctgaaaaagttcacttcatcctagtggaaaaggtgaccacaagattcaaggtggatggaaaacacagaaagaaaaattcagtgtttgaaagacttcaaattgatattcaacacttgtgtttgaacaagattcctgtgctaagagaagaaaaactacctgtggtaggaattggaaagcatctgtgtggtatggcaacagatcttgcattacgatgtttggttgaaacctatgctgccagttttgaggaaaggaatgaagaacctttagccaaacgcataaagaatgataaaacagaaaaagaaatttacactttggccaaggaaggaaatgaaaaaaatgtcccagagaagtggaaccctgtggctggcattgttattgcactctgttgtcaccacaggtgtgattggagacattatgtgggcaaagaatatttcagggctctaggccttggagcagtggaattccattatttccagcgaatgagtagttgggcaacttgtgggatgcggaaaacatctttggaaacctcaaatagtaccacaaagaggcaagataatcagaatgatgatagtgaagagcatgatgatggaggatacagaatcacagatgatggcgctgattgtttgcctgggtaagagactacttttgtaatgcatgatactaaaggagaaatattatattgtactgtactttagatgactattatcaacaattcatgaaaatgtattttataatctaattttagaataagctaaaatatacacatcttttattgtggtcataaatataatgtgtcttggaagcatgggacaaagtacttagtacattatgggttagttaacagtctctcaataaatagtgacaaaaataattttttataaacttttgcaaaattttaacaatgttttgtgtgtgtttattcaatttaggcttcttagtgttgaagaaaagaagaaaatagggcatctttgtaaattgctgattgaccaaggtcgaatccagtatttgcagcagaagggattcagtcctgctttgcagtactatacagaccctctggtgtctttggaaaatgttttgttaactgctttaccaaatcattcttcatcaccagaaacaactgcttaatggaaaagaaatttgagcatcatctgtcttccaccaaaaaaaattttttaattatatttttatatcaaaaaaatatatactttaaatagcaaataatatgaactttaaaaaatgctgtggcctcattaaactttggtaatagcttttctttttacttcagaaatccaaacattagagaattcaccaaagtaatcctctttagaagggcatcttgaattatattatccatccgtatttatggagattggtaaagtagttgaaccgttgacttggtgatctgctcttctccgtgactcttgtatgtatgtgtgcataaactgaaggccaaataattcccgttcctcttcttcatctgtgccttcactgggaggaagtgatactttcaatttcagtgggttgtctctgaagttgacaaacctagaagttcatcaaaaaacagtatttttataggtgtcatggaagtgtacatttatttccctggagaaaggtcaaatgataatatactaaattactcgtttttaactggtttcaataactgaacgacttggtgagatgtgatatatctcaagaatcttatgtttttttcctaagagaaaaaaaaacactagctttagacaacttactttcaaagcttataaaagcaactgttagtctagttgcacaggctggagtgtagt

SEQ ID NO: 292290 - DNA, 1623 bp, Homo sapiens
tatcgctatcgtcgaccacgcccccgagcgagccctagaattatggcgacctccgcgacgtcgccgcacgcgcctggttttccagctgagggtagatgcggttactatgtggaaaagaagaaacggttctgcaggatggtggtggccgcagggaaaagattttgtggtgaacacgctggagccatggaggaagaagatgctcggaaaagaatcctgtgtcctttagatccaaaacacacagtatatgaagatcaactagcaaagcatttgaaaaaatgtaactcaagagagaaaccaaaacctgatttctatattcaagatattaatgcaggcttaagagatgaaacagaaatacctgaacaattagttccaatttcttctctatctgaagagcagttggaaaagttaattaagaaattgagaaaagcaagtgaaggcttgaattctacacttaaagatcatattatgtcccatccagcattacacgatgcacttaatgaccctaaaaatggcgattctgcaaccaagcacctgaaacagcaggtatgtttaggctatagtaactactaaacatggcctttgttcatttgttaaaactgttttaaatgtaattattaataagattttattttgtttacctttgagggtaccaaatatttccatttcaaaaatatatagaaacatatacaaaaaattgagggcatggatgtgattctgagtaccgtatattaaatatttaaaggcaagagagaaaaattttaagtcaaatacaaattatcaatgtaagcatactgccttatgcagaaattaccttgctgttttcccatttgaaccaaatgtgtttactctagtttataaaataatcttgtgaagtttgcaggcttctattttaggtaacattgaaaatttaaagttacttggtccaagaagatgctttgttgagtttggagcgggaaagggaaaattatctcattgggttgatattgccttaaaagatgctgaaaaagttcacttcatcctagtggaaaaggtgaccacaagattcaaggtggatggaaaacacagaaagaaaaattcagtgtttgaaagacttcaaattgatattcaacacttgtgtttgaacaagattcctgtgctaagagaagaaaaactacctgtggtaggaattggaaagcatctgtgtggtatggcaacaggtacgtaaacatactgataatgtttacattaatgcattaagttttggcctaacctggccccaaccatttcagtggtctcttttgaatagatatcttatgtttacaactcaataatctttatagagcactggccctgtgctttattagatgcatagctttcctatttatctgctcatattggccattttgcaggatgaattaagagttttgtatgtaaatactgcatcacattagaccttaaagttctttgggttaaatttcaaccagaaaaggaaaataagaccatttatggaaactgtatgattccacctagaagctactgattttttagagtagttgcttagaaagaactcagaaacctcttctactaaaagactattgtgtttcaggattctggggaaaaagaaaaaaataaatgttagacaaa

SEQ ID NO: 292291 - DNA, 641 bp, Homo sapiens
aaatgattagtatgtgaggcaatacatgttaattagcttgatttagccattccacaatgtatacatatttgaaaacattatgttgtattaaaaccatacataaataatagtgtatattatttttattgccataaaaatcacaattacttttgtacaaacctaatatgtgataaatatatacaactatttgtcaattaacatgaaataggcagcatttttttctttcttggttgtgcataaaatagtcatacatataatagttgatgctatcttagatttcagacaccatatgtaggccttctctataccctgtttgaagctatagacccttgtttgtccaaagcagtatttgttcatatgtatttaagccagtacactggagagtttttgttaaacccttgggacctgattttgccaacttttcattatgtccttgtaaggtttccttaccttgttttgagattacagagacactgaagttatatctggtatctgtaagcaataaacttgatattttatttaaataaatgtatctcttaatttattaggaagaagatgctcggaaaagaatcctgtgtcctttagatccaaaacagtaagtgtggatcagatacgggtttttttttgtgctggaaacagta

SEQ ID NO: 292292 - DNA, 378 bp, Homo sapiens
atggaatgagaaatatataaaggaattaatcaaaaggcagcagttagtgatacacacattactctaccaaaaaacatttaatctgtgttatatacaaatcttatacctgctcttctccgtgactcttgtatgtatgtgtgcataaactgaaggccaaataattcccgttcctcttcttcatctgtgccttcactgggaggaagtgatactttcaatttcagtgggttgtctctgaagttgacaaacctagaagttcatcaaaaaacagtatttttataggtgtcatggaagtgtacatttatttccctggagaaaggtcaaatgataatatactaaattactcgtttttaactggtttcaataactgaacgacttggt

SEQ ID NO: 292293 - DNA, 2376 bp, Homo sapiens
cgacccgccacccgccgtagcccgcgcgcccctggcactcaatccccgccatgtgggggctcctgctcgccctggccgccttcgcgccggccgtcggcccggctctgggggcgcccaggaactcggtgctgggcctcgcgcagcccgggaccaccaaggtcccaggctcgaccccggccctgcatagcagcccggcacagccgccggcggagacagctaacgggacctcagaacagcatgtccggattcgagtcatcaagaagaaaaaggtcattatgaagaagcggaagaagctaactctaactcgccccaccccactggtgactgccgggccccttgtgacccccactccagcagggaccctcgaccccgctgagaaacaagaaacaggctgtcctcctttgggtctggagtccctgcgagtttcagatagccggcttgaggcatccagcagccagtcctttggtcttggaccacaccgaggacggctcaacattcagtcaggcctggaggacggcgatctatatgatggagcctggtgtgctgaggagcaggacgccgatccatggtttcaggtggacgctgggcaccccacccgcttctcgggtgttatcacacagggcaggaactctgtctggaggtatgactgggtcacatcatacaaggtccagttcagcaatgacagtcggacctggtggggaagtaggaaccacagcagtgggatggacgcagtatttcctgccaattcagacccagaaactccagtgctgaacctcctgccggagccccaggtggcccgcttcattcgcctgctgccccagacctggctccagggaggcgcgccttgcctccgggcagagatcctggcctgcccagtctcagaccccaatgacctattccttgaggcccctgcgtcgggatcctctgaccctctagactttcagcatcacaattacaaggccatgaggaagctgatgaagcaggtacaagagcaatgccccaacatcacccgcatctacagcattgggaagagctaccagggcctgaagctgtatgtgatggaaatgtcggacaagcctggggagcatgagctgggggagcctgaggtgcgctacgtggctggcatgcatgggaacgaggccctggggcgggagttgcttctgctcctgatgcagttcctgtgccatgagttcctgcgagggaacccacgggtgacccggctgctctctgagatgcgcattcacctgctgccctccatgaaccctgatggctatgagatcgcctaccaccggggttcagagctggtgggctgggccgagggccgctggaacaaccagagcatcgatcttaaccataattttgctgacctcaacacaccactgtgggaagcacaggacgatgggaaggtgccccacatcgtccccaaccatcacctgccattgcccacttactacaccctgcccaatgccaccgtggctcctgaaacgcgggcagtaatcaagtggatgaagcggatcccctttgtgctaagtgccaacctccacgggggtgagctcgtggtgtcctacccattcgacatgactcgcaccccgtgggctgcccgcgagctcacgcccacaccagatgatgctgtgtttcgctggctcagcactgtctatgctggcagtaatctggccatgcaggacaccagccgccgaccctgccacagccaggacttctccgtgcacggcaacatcatcaacggggctgactggcacacggtccccgggagcatgaatgacttcagctacctacacaccaactgctttgaggtcactgtggagctgtcctgtgacaagttccctcacgagaatgaattgccccaggagtgggagaacaacaaagacgccctcctcacctacctggagcaggtgcgcatgggcattgcaggagtggtgagggacaaggacacggagcttgggattgctgacgctgtcattgccgtggatgggattaaccatgacgtgaccacggcgtggggcggggattattggcgtctgctgaccccaggggactacatggtgactgccagtgccgagggctaccattcagtgacacggaactgtcgggtcacctttgaagagggccccttcccctgcaatttcgtgctcaccaagactcccaaacagaggctgcgcgagctgctggcagctggggccaaggtgcccccggaccttcgcaggcgcctggagcggctaaggggacagaaggattgatacctgcggtttaagagccctagggcaggctggacctgtcaagacgggaaggggaagagtagagagggagggacaaagtgaggaaaaggtgctcattaaagctaccgggcaccttagctca

SEQ ID NO: 292294 - DNA, 2308 bp, Homo sapiens
gtcagattgcaggcctttgatgtcctgtgaaggctgttagatcctggtggtgtggcctgctgtgggctcacatgtcttcttgggctggcagacctttccatccggggtttcaccattcttcctttcccccatgctgtgcctctcggaccccaagggacctcagaacagcatgtccggattcgagtcatcaagaagaaaaaggtcattatgaagaagcggaagaagctaactctaactcgccccaccccactggtgactgccgggccccttgtgacccccactccagcagggaccctcgaccccgctgagaaacaagaaacaggctgtcctcctttgggtctggagtccctgcgagtttcagatagccggcttgaggcatccagcagccagtcctttggtcttggaccacaccgaggacggctcaacattcagtcaggcctggaggacggcgatctatatgatggagcctggtgtgctgaggagcaggacgccgatccatggtttcaggtggacgctgggcaccccacccgcttctcgggtgttatcacacagggcaggaactctgtctggaggtatgactgggtcacatcatacaaggtccagttcagcaatgacagtcggacctggtggggaagtaggaaccacagcagtgggatggacgcagtatttcctgccaattcagacccagaaactccagtgctgaacctcctgccggagccccaggtggcccgcttcattcgcctgctgccccagacctggctccagggaggcgcgccttgcctccgggcagagatcctggcctgcccagtctcagaccccaatgacctattccttgaggcccctgcgtcgggatcctctgaccctctagactttcagcatcacaattacaaggccatgaggaagctgatgaagcaggtacaagagcaatgccccaacatcacccgcatctacagcattgggaagagctaccagggcctgaagctgtatgtgatggaaatgtcggacaagcctggggagcatgagctgggggagcctgaggtgcgctacgtggctggcatgcatgggaacgaggccctggggcgggagttgcttctgctcctgatgcagttcctgtgccatgagttcctgcgagggaacccacgggtgacccggctgctctctgagatgcgcattcacctgctgccctccatgaaccctgatggctatgagatcgcctaccaccggggttcagagctggtgggctgggccgagggccgctggaacaaccagagcatcgatcttaaccataattttgctgacctcaacacaccactgtgggaagcacaggacgatgggaaggtgccccacatcgtccccaaccatcacctgccattgcccacttactacaccctgcccaatgccaccgtggctcctgaaacgcgggcagtaatcaagtggatgaagcggatcccctttgtgctaagtgccaacctccacgggggtgagctcgtggtgtcctacccattcgacatgactcgcaccccgtgggctgcccgcgagctcacgcccacaccagatgatgctgtgtttcgctggctcagcactgtctatgctggcagtaatctggccatgcaggacaccagccgccgaccctgccacagccaggacttctccgtgcacggcaacatcatcaacggggctgactggcacacggtccccgggagcatgaatgacttcagctacctacacaccaactgctttgaggtcactgtggagctgtcctgtgacaagttccctcacgagaatgaattgccccaggagtgggagaacaacaaagacgccctcctcacctacctggagcaggtgcgcatgggcattgcaggagtggtgagggacaaggacacggagcttgggattgctgacgctgtcattgccgtggatgggattaaccatgacgtgaccacggcgtggggcggggattattggcgtctgctgaccccaggggactacatggtgactgccagtgccgagggctaccattcagtgacacggaactgtcgggtcacctttgaagagggccccttcccctgcaatttcgtgctcaccaagactcccaaacagaggctgcgcgagctgctggcagctggggccaaggtgcccccggaccttcgcaggcgcctggagcggctaaggggacagaaggattgatacctgcggtttaagagccctagggcaggctggacctgtcaagacgggaaggggaagagtagagagggagggacaaagtgaggaaaaggtgctcattaaagctaccgggcaccttagctca

SEQ ID NO: 292295 - DNA, 295 bp, Homo sapiens
gtcagatataacccctatgacctgggaaggagggcccacccatctcaggtccccttcccaccttcccaccggggcacaacctgctgtgactgcgcttgtatgcccctgctgcctcctgatgtctcagccttctctcctgtggacccctaagctccatcccactttcccttattatggcgcccccccagtcctaccccttcctcccggctctgctgccgctcccctcctgtaccatgatgggatgccccctctgtgtgggccatcgctgactttttaagtctttccatggcacatg

SEQ ID NO: 292296 - DNA, 351 bp, Homo sapiens
gtatgtgcctgagggtggagttagccctggccccgtaacccccgccctgataagacagcctgcggttgcgtacagtgctggcgtctgttcccactctgaagtgtccctcagagaagggagggtagcgggaggatgggaccgcatcccgcctgcttaggcagcagtgtctgtggtccccttaggcatgaatgacttcagctacctacacaccaactgctttgaggtcactgtggagctgtcctgtgacaagttccctcacgagaatgaattgccccaggagtgggagaacaacaaagacgccctcctcacctacctggagcaggtcggatctgcgtcccggcccccagcctg

SEQ ID NO: 292297 - DNA, 3490 bp, Homo sapiens
taaggaacttgtgttataattttggtaaaagtataaacccactccctctggacaatacttagcgacagttgctaaagggggctcctttttaaatgtaaggactgaaatggatatacttctaataagtaaatttccaacacttatttgctccaccccctcccccctcccccctccccctttatcatgttaaacagcctttttgcttttcttattcctcctctcctggagagctgtgattagaaaccacacccacccttgaatgaagtgcttgaactgggggagggaggctggctacctgtgaacaaacattggcccaaataagggaaaataagtgttcctggactttggactagtttatagccagatattccaagagcagcaagacgttgctctctgccgtctctgaaaacaaaagagatgcataacatgcttgcacaaccttttaaaatatagatcagtatagtgctacctctatagttttcttcctcttctgagaaagcctgtatattgatgatcacacacacacacactttgcaattagagaatttggtttgctttactaatctgtttaactattccttcattcattatgaacgcttatattgatgaacatacacacagaggtttctttgctattagaaaattctgtttgctttcctaatctgtttaagcattcattcatgaagagtgtggggccattactggggaaggggggtgacagtgcctcagccagcaaaataccaatgaccaggattggggactaaatttaggaagctaaaatggccagagcaattaacatttgagaaaatcctgtctaggaaaacaacttgagtgtaggcatttgtaattcacttataccaaagttggaaaagtaaaatttaagcctaggacaatttttacttcatggatgttaaatagacaaatgcatagttcccagggggaatttaaacactttactggtgggaagaaacctagtattaaagttgtaaggactctcaaaaacttcacatttattaaaatgcactgctcttacccaatttatcctctgaattaaaatttcagtggattctacaaaacctcgtacaaatagctacagaactttgtgcctattttattcctctatttattcttctaggaagaagcctcttcctagaatcttgaaatagatcccttgactgaatgccaattcctctcctgtttttcaaatgagagaaccttttctgatcaccttgaccttttccctcatttcatatgtcttcccagaaagtagacagactgctctgctgccttcagtcattgtgcctcatttgggttgtccctccttctttgtggagaaatctggaaatgatgcacagtgtatccaaaagttgtgggatgaagtggatgaaagtgatttaattcatttttagaatttttttttgttttgttttagcaacatgctgaacaactaatttactttaaaaataagccagttaaaacaaaggacgctaagcccaagtggggggcaatattagtcaggatctttggggtctaattccagaccaactttcagaagcacttctttgtctctgttctcacctctgctgtccctctcttccctcatcccctaagagagacaaagataaaagcccacctgcatccctaagtcttactgagatcagccaccccaggggagagaaactggatctacttacagccaccccctgtttccatccatatacttacttcccccaatttgcatgtgattatggaaacaagtcatgctcatgaaagcaactgtaaaataaaaggttatggagtagttcagcaacttcttcacagccagctttgtggagctggggaggacttagggcccattggagtctcttatgtgtacagcttcagggctgtccctttcagtttgattttaagcaatgcctcacttcatagcttagggggtaaggattccattcaggtaggttgtctaaaggaactaatgggacctctcagtgaattagctgaccagattttaggaaatctttttaatttctatgattttccttctcacattttgaaatggtaaaattgactggaaataatttttcttggtgccttattggttttccttgcaaacctttctcatattttctcatgaccattgccagtgaccaaggcccatgtgtgtgttgtgtgtaattgtgggcatgtacaagcttaaataacgtgccgacagcactgtttcaaagttggtattcattaggctgttgcctcctgggctggagctgcgctaatcctgacaccggctgccaggagaaaacctcatggatcacacaccaaaccttaataacagcatccgtgacctgcactctccagtacagaatgggaaccccagagctaggaaatgtagttgtatattttaatgaactgctaccccagccaaagaagcttctttcacttttgtgctctacagaaagcccaaggggggtaggagggacagagctttgaataactgctttctaacactaaatgtggccaacaggacagagcacatcacacgtataggcaggtgtgagggacagtggctaagaattgcctgctccctctgcatgctctttcttgtttccaaagtccaatcaagtgatcctgggaaacaaatctgtctggattgcggagggtggttctgaaagaactgccaagacgttaaagaagggtgaagagtaggcagaatataagtagctaacctgagtcaagactctcaaaagctagcagcctgatgacaataggatttatttcagccaggatagtgtctgtctgtgagtgcatcattttaagacagtatgacttcatgttgttacaaactatgtatagtatgtatgttttgtgggttgtatatatacataatatatattatatatatatatgagagatttggtgacttttgatacgggtttggtgcaggtgaatttattactgagccaaatgaggcacataccgagtcagtagttgaagtccagggcattcgatactgtttatgatttccatatatgtatagtgcctatcccatgctgtagtcactgttatgttaaatccagaagttacactagagccagcgatactttatttgtagacaatcaatttgaatccatatgttattactggcagatgatacatgattacagttctgaatctgtaacacttacaaaaggaaacccagagcagcttgatgagtttttgtttctgcttcgttcctgggagtcagtagaaacagcagttgtatgtggttatgttagtctcaagatacttaatttgttgaccttacttcagaaaaattttgtatgtattatatttgtgggaaggtaaaataatcatttgagatttttatcaaatatgaagattagttatttatgaaaaacaaagaaatgtctatttttctttgttcccaattaatgtagataaattttaaaatgcattaaagtaatggtaaagacaataaaaagatgctgtagaaaaa

SEQ ID NO: 292298 - DNA, 3317 bp, Homo sapiens
gtcgtctacaactacttaatttcggggccgcgtcgacattcctcctctcctggagagctgtgattagaaaccacacccacccttgaatgaagtgcttgaactgggggagggaggctggctacctgtgaacaaacattggcccaaataagggaaaataagtgttcctggactttggactagtttatagccagatattccaagagcagcaagacgttgctctctgccgtctctgaaaacaaaagagatgcataacatgcttgcacaaccttttaaaatatagatcagtatagtgctacctctatagttttcttcctcttctgagaaagcctgtatattgatgatcacacacacacacactttgcaattagagaatttggtttgctttactaatctgtttaactattccttcattcattatgaacgcttatattgatgaacatacacacagaggtttctttgctattagaaaattctgtttgctttcctaatctgtttaagcattcattcatgaagagtgtggggccattactggggaaggggggtgacagtgcctcagccagcaaaataccaatgaccaggattggggactaaatttaggaagctaaaatggccagagcaattaacatttgagaaaatcctgtctaggaaaacaacttgagtgtaggcatttgtaattcacttataccaaagttggaaaagtaaaatttaagcctaggacaatttttacttcatggatgttaaatagacaaatgcatagttcccagggggaatttaaacactttactggtgggaagaaacctagtattaaagttgtaaggactctcaaaaacttcacatttattaaaatgcactgctcttacccaatttatcctctgaattaaaatttcagtggattctacaaaacctcgtacaaatagctacagaactttgtgcctattttattcctctatttattcttctaggaagaagcctcttcctagaatcttgaaatagatcccttgactgaatgccaattcctctcctgtttttcaaatgagagaaccttttctgatcaccttgaccttttccctcatttcatatgtcttcccagaaagtagacagactgctctgctgccttcagtcattgtgcctcatttgggttgtccctccttctttgtggagaaatctggaaatgatgcacagtgtatccaaaagttgtgggatgaagtggatgaaagtgatttaattcatttttagaatttttttttgttttgttttagcaacatgctgaacaactaatttactttaaaaataagccagttaaaacaaaggacgctaagcccaagtggggggcaatattagtcaggatctttggggtctaattccagaccaactttcagaagcacttctttgtctctgttctcacctctgctgtccctctcttccctcatcccctaagagagacaaagataaaagcccacctgcatccctaagtcttactgagatcagccaccccaggggagagaaactggatctacttacagccaccccctgtttccatccatatacttacttcccccaatttgcatgtgattatggaaacaagtcatgctcatgaaagcaactgtaaaataaaaggttatggagtagttcagcaacttcttcacagccagctttgtggagctggggaggacttagggcccattggagtctcttatgtgtacagcttcagggctgtccctttcagtttgattttaagcaatgcctcacttcatagcttagggggtaaggattccattcaggtaggttgtctaaaggaactaatgggacctctcagtgaattagctgaccagattttaggaaatctttttaatttctatgattttccttctcacattttgaaatggtaaaattgactggaaataatttttcttggtgccttattggttttccttgcaaacctttctcatattttctcatgaccattgccagtgaccaaggcccatgtgtgtgttgtgtgtaattgtgggcatgtacaagcttaaataacgtgccgacagcactgtttcaaagttggtattcattaggctgttgcctcctgggctggagctgcgctaatcctgacaccggctgccaggagaaaacctcatggatcacacaccaaaccttaataacagcatccgtgacctgcactctccagtacagaatgggaaccccagagctaggaaatgtagttgtatattttaatgaactgctaccccagccaaagaagcttctttcacttttgtgctctacagaaagcccaaggggggtaggagggacagagctttgaataactgctttctaacactaaatgtggccaacaggacagagcacatcacacgtataggcaggtgtgagggacagtggctaagaattgcctgctccctctgcatgctctttcttgtttccaaagtccaatcaagtgatcctgggaaacaaatctgtctggattgcggagggtggttctgaaagaactgccaagacgttaaagaagggtgaagagtaggcagaatataagtagctaacctgagtcaagactctcaaaagctagcagcctgatgacaataggatttatttcagccaggatagtgtctgtctgtgagtgcatcattttaagacagtatgacttcatgttgttacaaactatgtatagtatgtatgttttgtgggttgtatatatacataatatatattatatatatatatgagagatttggtgacttttgatacgggtttggtgcaggtgaatttattactgagccaaatgaggcacataccgagtcagtagttgaagtccagggcattcgatactgtttatgatttccatatatgtatagtgcctatcccatgctgtagtcactgttatgttaaatccagaagttacactagagccagcgatactttatttgtagacaatcaatttgaatccatatgttattactggcagatgatacatgattacagttctgaatctgtaacacttacaaaaggaaacccagagcagcttgatgagtttttgtttctgcttcgttcctgggagtcagtagaaacagcagttgtatgtggttatgttagtctcaagatacttaatttgttgaccttacttcagaaaaattttgtatgtattatatttgtgggaaggtaaaataatcatttgagatttttatcaaatatgaagattagttatttatgaaaaacaaagaaatgtctatttttctttgttcccaattaatgtagataaattttaaaatgcattaaagtaatggtaaagacaataaaaagatgctgtagaaaaa

SEQ ID NO: 292299 - DNA, 2635 bp, Homo sapiens
  misc_feature (344)..(344): n is a, c, g, or t
cttcattcactacacactctgagcctcatcatgcaaaaatacctaggagccaattttaaacatagaattcttttagctgttgattcacaaaatgtcttaggatgattaatttctaaaaatatcctcaaaggtatgagataataaggccacagcagtgttttcaatgcggcttccaagttaagcattattatgtggatgtagctatatctataccaacagagctataaatgcattcatttggggatgagtagtcttgatgtataattaatctctcattccttctgacagtactttttttcaaagttgaaaagtaagttgctttgttacttctgggacatgaaagnatcattcagtttcaattactgtcttaaggataaggaatactgcaagctgctccagatcctactgaagggaatgaaggtttaggaactttacccgagaactatagttattagggaaaacgataaccagaaggtccagaactgtcaagaattccatcatcagctgggaatttacaaatccaaatcagcagagaagtgcaataccagatagggacaaatgttttattccagttctgtgggagagaaaaggccagcttctgttgtgtacccagagtatagagcttcaaaacaaaatcagaaaacactattttaaaaactaattttccaaaaatcctgagatctctacttgaaaacataggtagcctaaagctttctgtgcacattaaactcatctgcttcatttatctgatttctaatcaatttgctggtattgttataacttcatgctttcataccttcgtgtttgttggtgggatctgcagccccagtggcacccgactcgctctcctctccctcaccgacgcccctgagtcgaaataatctgctaccacctattggcacagctgaagtggaacatgtgagcactgtggggccacaaagacagatggtatgtttctttcatattgcctctccatgtacttaccatacaacctaatgggcagtaattctgcaggatctgtgccctgatcttgatttatactgtgttttgtcaaaagtacaaacacagtgctaatttatgacgtggaattggagctgtttggcctgcacttaccatatctgccatggtcgatagggttttaactacataccacattacagatagttttcactgtttctgtaacttttgtctcctctgcagaaaccccatggcgactctagtcgagctcaaagtgcggtggtggatgaacctaactatcagcagccacaagaaaggctccttttgcccgactttttccccaggcccaacacaactcaatcatttttgctggatacacagtatcgtcgctcatgtgcagttgagtatcctcatcaggcccgacctggcaggggatctgcaggtcctcagttacatgggtctacaaaatctcaaagcggaggcagaccagtctctcgaaccaggcagggaccataaggcaaatgagaagaatctatcaggctgcaggaaacacgagatttcatgaagcagtattcagtcatcaagtgatgcagagcttgtatagaagatcgactagaaatcatcttcatgaagagtgattttggcacaagtgaccgaagaacaaaacaccatagcagccaaaaatgacatgagtgttgtttctatctccagttactgtctctttcagcagaaattaacctatcccattggaaaggcaagtttgtacccaaagatgcaacagtgaataatacccaaatcactgctcatgttatctcttaacaatgatcagttcaatcatataggatttgatgagctcacacatacacaaaaagcagcaaatcatcagtgacaatatcactggcttcagaatacttcagcctgtgttcatttctggagagttgtactcagttttaagtcattttgctgttgaaaatctgacctcatcaaatagatgtcattcctaaaactctctttagatgtcctaccctatcagcagattaaaatggaaggggtgtgtaactaaaaacataaatgttaagcattagtataaagtaacttctgtaataaattatatcgcatattttttcagataggacagctcaaccttacgatgcctacctgatgccaggtgatgcttattttcttcctaaagtaggttactggtcatatcttttttccaaatattaaatgcaccttgccagatattctcctgcagctctaaggaaaggaaatcaatttaaaaataatttgtagaatctactattgagccaccaaagtataattccctaaaagtttaagaaaccctggcaattaattcagcataaacatatcctataaacagcaggagaggttcagctttctgattttactgtggaccttttcctaagggcattcatgaatgcagcaacagttttaactatggcttacatttattttaaatttcactaaatacaaatcttgattgtcatgccagttttagatcttattaattttcagaatggataaattcaaataatcataaattacggtaactttttattataccaaggtgttctaatgccatcatatgaagacagatgcttcaaacaacctgcattaaattatatttttaataaaattaaaatctatttttaaccta

SEQ ID NO: 292300 - DNA, 5554 bp, Homo sapiens
  misc_feature (4806)..(4806): n is a, c, g, or t
ctaggtgacggggcgagacggggccggtaggtggcgggaggggccgggccggagccggcgggagggccaggcccggaggcccccaccctggcgtgcctgccccggccgcggctgaggaggaggaggaggaggaggaggaggaggatgatctccagatacactcggaaggcggtgccacagagcttggagctgaaaggaataacaaaacatgctcttaaccatcatccccctccagagaagctggaggaaatttcccccaccagtgacagtcatgagaaagacacaagttcccaaagcaagtctgacatcacaagagaatcatcttttacatcagccgacactgggaattcactgtctgcttttccaagttatacaggcgcagggatatctactgaaggaagctcggacttctcctggggatatggaactcgatcaaaatgccactgaaaaagtccagacaatgttcacagccattgatgaactcttgtatgagcagaagttgagtgtgcataccaagagtctacaagaagagtgccaacagtggacagctagctttcctcacctcaggattctaggtaggcagataatcactccaagtgaaggttatagattgtatcctagatccccttctgctgtttccgcttcatatgaaacaaccttgtctcaagaaagagattctactatatttggtataaggggaaagaagttacatttttcatcttcttatgctcataaagcatcttccattgccaaatcctccagcttttgttctatggaaagagatgaggaagactctataatcgtctcagaaggaataattgaggaatacctagcattcgatcacatagatatagaagagggatttcatgggaagaaatcagaagcagctacagagaaacagaaattagggtatcctcccattgctccattttactgcatgaaagaagatgtccttgcttatgtgtttgacagtgtatggtgcaaggttgtgagctgtatggagcagttgacacgtagtcactgggaaggatttgcctctgatgatgagagtaatgttgcagttaccagacccgattcagaaagttcctgtgtgctgagtgaactacatcctttggtgttaccgcgagtgccacagtctaaggtgctgtacattacctcaaatccgatgagtctctgtcaagcaagcagacatcagccaaatgtgaatgatctcttggttcatggaatgcctctacagccaagaaatctctccctaatggacaagctcctagatcttgatgacaagctacttatgaggcctgggtccagtaccatcctttcaactcgaaattggccaaatcgagctgtggagtttagtacatcatctctgtcatacacagtgcagtccaccaggagacgcaatccaccaccacgaactcttcatccgatcagcacgagccattcatgtgctgaaacaccaagatctgtggaagaaatcctcagaggagcccgagtcccagtggcacccgactcgctctcctctccctcaccgacgcccctgagtcgaaataatctgctaccacctattggcacagctgaagtggaacatgtgagcactgtggggccacaaagacagatgaaaccccatggcgactctagtcgagctcaaagtgcggtggtggatgaacctaactatcagcagccacaagaaaggctccttttgcccgactttttccccaggcccaacacaactcaatcatttttgctggatacacagtatcgtcgctcatgtgcagttgagtatcctcatcaggcccgacctggcaggggatctgcaggtcctcagttacatgggtctacaaaatctcaaagcggaggcagaccagtctctcgaaccaggcagggaccataaggcaaatgagaagaatctatcaggctgcaggaaacacgagatttcatgaagcagtattcagtcatcaagtgatgcagagcttgtatagaagatcgactagaaatcatcttcatgaagagtgattttggcacaagtgaccgaagaacaaaacaccatagcagccaaaaatgacatgagtgttgtttctatctccagttactgtctctttcagcagaaattaacctatcccattggaaaggcaagtttgtacccaaagatgcaacagtgaataatacccaaatcactgctcatgttatctcttaacaatgatcagttcaatcatataggatttgatgagctcacacatacacaaaaagcagcaaatcatcagtgacaatatcactggcttcagaatacttcagcctgtgttcatttctggagagttgtactcagttttaagtcattttgctgttgaaaatctgacctcatcaaatagatgtcattcctaaaactctctttagatgtcctaccctatcagcagattaaaatggaaggggtgtgtaactaaaaacataaatgttaagcattagtataaagtaacttctgtaataaattatatcgcatattttttcagataggacagctcaaccttacgatgcctacctgatgccaggtgatgcttattttcttcctaaagtaggttactggtcatatcttttttccaaatattaaatgcaccttgccagatattctcctgcagctctaaggaaaggaaatcaatttaaaaataatttgtagaatctactattgagccaccaaagtataattccctaaaagtttaagaaaccctggcaattaattcagcataaacatatcctataaacagcaggagaggttcagctttctgattttactgtggaccttttcctaagggcattcatgaatgcagcaacagttttaactatggcttacatttattttaaatttcactaaatacaaatcttgattgtcatgccagttttagatcttattaattttcagaatggataaattcaaataatcataaattacggtaactttttattataccaaggtgttctaatgccatcatatgaagacagatgcttcaaacaacctgcattaaattatatttttaataaaattaaaatctatttttaacctatttgtagtcacaaaccgaaaacgtgtcgtctttaccttagagctaaaggcttactttatgcatacggtatatttaatagtctacaaatcaaagatttaaacagtcccttaaaaattccatatattctcataccaactcatctacatagaaatgaaaatctctattgttctcacaaaccattaccatgagttcactataacaactggatcaatatggcttgcctttcaaagttaaagaatcagaaaggggcctgtaagaagtcatttagcccaattccctcaccctgtgtgttttccctcaaagccagtgcaatttttttttaaccaaaaaactggacatgtttaatacatacagtttgacaaatttggatttcactctttgttttgatgtagtaactcttttataaaagggaacagattcagacaagctcagtggcccaactgaagacattcagcaattaatggcaggacttcagtaatcagtggcaggactacaacatacatctcttcatgctagggaaaccaggctctctattataaagctgaccagggctattgttttccccttttctctcatcctaaacaccattcatatttttcctaggtcacattttagtgggatcatttacaaagcccccagaacttaatcatcatgttttaccttttttattgaattatatacacctcttacaaaaatgcttgaagtaatttaacacctgtacatcagtacaaaacctggctgagtaaaatgaagagaggatctattcaagatcattaagaccaaatgtaaactgggaagtatgtggaagatagctgtccagcaagtgtctggaaggtgttctagctgggtagagagcctattctaacagacacgcacatcgcagaaagcagcatgaacagaaccacatcctagataagagttctgtgtacagaagatccatggaggcaagtgctgtcaggaaggacactgcctccctccaccctcccaaatgtcaccaccaagttccttcaggtgagacctcacacaatgtcaagtgctttctaggaaatactaagatcaggttgagagattctgcttggtctagtcaatctgaaaaattcaggctggaaagacaccttttctcaagagctgaattgacttttgccttcaaatcctgcctgcaccttgcctacgatggcatcaatttacacctaaggacctttgaagagaaaaattccattatttcttttctttcttgagagcagattttttccctcctcctttggaagatttgcagtactttgcttccatctgagccagaaaattgtccatttccttttgccgatccttttgtctgctctgtttgagaagttaaaacacaagctttcacaacattatccatagacagaaagtacctagtggttgccaggggctggaaaagtggaataactactaatgggtatggagtttttttggaatggtgaaaatgtcctacaattggtgttaataattgtaaaactttgtaaatacacttaaaaccaccaaattgtacactttaaaaggacaaatagaaggtatgcggttatgtcttaaaagaagaaaacaaaatacaacattccaaagaaaatattagcagtaggaatcagatcattaaagatgtggcaacaaactgccaagtttacctgaatggctgccttcaggctatccacgccttcatcaagccccaactcctttctgctcatttctgcttctttggcctcttcctgagcctganacaggaactcacatgagactcagggccaccaggaaatgcttaaaatacatactctttcccaaaagcaaatctataattctgtttcaattttatgaatatatgaatagacaaaatgaatcgaattacataactatgtcattcattaaatggcaacaatgctgacagcaagcagtagatcctctgattccaattaccatttgttttttacccaattctatttgctagaggtagtaagtactctggcactcataaatcacatgatgataaaaaggaacatgaggccgggtatggtggctcacaactgtaatccccataccttgggaggccaaggtgggaggatcacttgaactcaggagttcaagacctgcctgggtaacatagtgagacctcagttctataaaaaagaaaagaaatgagcctggtgtggtggcatgtgcttgtagtcccagctactagggaggctgaggtgggaagatggcttcagtctgagagttcaggctgcaataagctgtgatcatgcctctgcactccagcctgggtgatggagatgccatctcttagaaaaaagagaaaaaaaaaaaaaaaaggcaaatgatgcaattgccaggatacaggtatttccaatttctctcctggaaacccaatttactccatgggactggtggtgccttgtgaacaaccccagtttaaaatgacttctccccagtagtcagaagaaccaacatcaataaactcagttttaacatct

SEQ ID NO: 292301 - DNA, 2927 bp, Homo sapiens
ctaggtgacggggcgagacggggccggtaggtggcgggaggggccgggccggagccggcgggagggccaggcccggaggcccccaccctggcgtgcctgccccggccgcggctgaggaggaggaggaggaggaggaggaggaggatgatctccagatacactcggaaggcggtgccacagagcttggagctgaaaggaataacaaaacatgctcttaaccatcatccccctccagagaagctggaggaaatttcccccaccagtgacagtcatgagaaagacacaagttcccaaagcaagtctgacatcacaagagaatcatcttttacatcagccgacactgggaattcactgtctgcttttccaagttatacaggcgcagggatatctactgaaggaagctcggacttctcctggggatatggaactcgatcaaaatgccactgaaaaagtccagacaatgttcacagccattgatgaactcttgtatgagcagaagttgagtgtgcataccaagagtctacaagaagagtgccaacagtggacagctagctttcctcacctcaggattctaggtaggcagataatcactccaagtgaaggttatagattgtatcctagatccccttctgctgtttccgcttcatatgaaacaaccttgtctcaagaaagagattctactatatttggtataaggggaaagaagttacatttttcatcttcttatgctcataaagcatcttccattgccaaatcctccagcttttgttctatggaaagagatgaggaagactctataatcgtctcagaaggaataattgaggaatacctagcattcgatcacatagatatagaagagggatttcatgggaagaaatcagaagcagctacagagaaacagaaattagggtatcctcccattgctccattttactgcatgaaagaagatgtccttgcttatgtgtttgacagtgtatggtgcaaggttgtgagctgtatggagcagttgacacgtagtcactgggaaggatttgcctctgatgatgagagtaatgttgcagttaccagacccgattcagaaagttcctgtgtgctgagtgaactacatcctttggtgttaccgcgagtgccacagtctaaggtgctgtacattacctcaaatccgatgagtctctgtcaagcaagcagacatcagccaaatgtgaatgatctcttggttcatggaatgcctctacagccaagaaatctctccctaatggacaagctcctagatcttgatgacaagctacttatgaggcctgggtccagtaccatcctttcaactcgaaattggccaaatcgagctgtggagtttagtacatcatctctgtcatacacagtgcagtccaccaggagacgcaatccaccaccacgaactcttcatccgatcagcacgagccattcatgtgctgaaacaccaagatctgtggaagaaatcctcagaggagcccgagtcccagtggcacccgactcgctctcctctccctcaccgacgcccctgagtcgaaataatctgctaccacctattggcacagctgaagtggaacatgtgagcactgtggggccacaaagacagatgctggatacacagtatcgtcgctcatgtgcagttgagtatcctcatcaggcccgacctggcaggggatctgcaggtcctcagttacatgggtctacaaaatctcaaagcggaggcagaccagtctctcgaaccaggcagggaccataaggcaaatgagaagaatctatcaggctgcaggaaacacgagatttcatgaagcagtattcagtcatcaagtgatgcagagcttgtatagaagatcgactagaaatcatcttcatgaagagtgattttggcacaagtgaccgaagaacaaaacaccatagcagccaaaaatgacatgagtgttgtttctatctccagttactgtctctttcagcagaaattaacctatcccattggaaaggcaagtttgtacccaaagatgcaacagtgaataatacccaaatcactgctcatgttatctcttaacaatgatcagttcaatcatataggatttgatgagctcacacatacacaaaaagcagcaaatcatcagtgacaatatcactggcttcagaatacttcagcctgtgttcatttctggagagttgtactcagttttaagtcattttgctgttgaaaatctgacctcatcaaatagatgtcattcctaaaactctctttagatgtcctaccctatcagcagattaaaatggaaggggtgtgtaactaaaaacataaatgttaagcattagtataaagtaacttctgtaataaattatatcgcatattttttcagataggacagctcaaccttacgatgcctacctgatgccaggtgatgcttattttcttcctaaagtaggttactggtcatatcttttttccaaatattaaatgcaccttgccagatattctcctgcagctctaaggaaaggaaatcaatttaaaaataatttgtagaatctactattgagccaccaaagtataattccctaaaagtttaagaaaccctggcaattaattcagcataaacatatcctataaacagcaggagaggttcagctttctgattttactgtggaccttttcctaagggcattcatgaatgcagcaacagttttaactatggcttacatttattttaaatttcactaaatacaaatcttgattgtcatgccagttttagatcttattaattttcagaatggataaattcaaataatcataaattacggtaactttttattataccaaggtgttctaatgccatcatatgaagacagatgcttcaaacaacctgcattaaattatatttttaataaaattaaaatctatttttaaccta

SEQ ID NO: 292302 - DNA, 2279 bp, Homo sapiens
aggctagtgcgagccgggggttaattcggccgagggatttggtataaggggaaagaagttacatttttcatcttcttatgctcataaagcatcttccattgccaaatcctccagcttttgttctatggaaagagatgaggaagactctataatcgtctcagaaggaataattgaggaatacctagcattcgatcacatagatatagaagagggatttcatgggaagaaatcagaagcagctacagagaaacagaaattagggtatcctcccattgctccattttactgcatgaaagaagatgtccttgcttatgtgtttgacagtgtatggtgcaaggttgtgagctgtatggagcagttgacacgtagtcactgggaaggatttgcctctgatgatgagagtaatgttgcagttaccagacccgattcagaaagttcctgtgtgctgagtgaactacatcctttggtgttaccgcgagtgccacagtctaaggtgctgtacattacctcaaatccgatgagtctctgtcaagcaagcagacatcagccaaatgtgaatgatctcttggttcatggaatgcctctacagccaagaaatctctccctaatggacaagctcctagatcttgatgacaagctacttatgaggcctgggtccagtaccatcctttcaactcgaaattggccaaatcgagctgtggagtttagtacatcatctctgtcatacacagtgcagtccaccaggagacgcaatccaccaccacgaactcttcatccgatcagcacgagccattcatgtgctgaaacaccaagatctgtggaagaaatcctcagaggagcccgagtcccagtggcacccgactcgctctcctctccctcaccgacgcccctgagtcgaaataatctgctaccacctattggcacagctgaagtggaacatgtgagcactgtggggccacaaagacagatgctggatacacagtatcgtcgctcatgtgcagttgagtatcctcatcaggcccgacctggcaggggatctgcaggtcctcagttacatgggtctacaaaatctcaaagcggaggcagaccagtctctcgaaccaggcagggaccataaggcaaatgagaagaatctatcaggctgcaggaaacacgagatttcatgaagcagtattcagtcatcaagtgatgcagagcttgtatagaagatcgactagaaatcatcttcatgaagagtgattttggcacaagtgaccgaagaacaaaacaccatagcagccaaaaatgacatgagtgttgtttctatctccagttactgtctctttcagcagaaattaacctatcccattggaaaggcaagtttgtacccaaagatgcaacagtgaataatacccaaatcactgctcatgttatctcttaacaatgatcagttcaatcatataggatttgatgagctcacacatacacaaaaagcagcaaatcatcagtgacaatatcactggcttcagaatacttcagcctgtgttcatttctggagagttgtactcagttttaagtcattttgctgttgaaaatctgacctcatcaaatagatgtcattcctaaaactctctttagatgtcctaccctatcagcagattaaaatggaaggggtgtgtaactaaaaacataaatgttaagcattagtataaagtaacttctgtaataaattatatcgcatattttttcagataggacagctcaaccttacgatgcctacctgatgccaggtgatgcttattttcttcctaaagtaggttactggtcatatcttttttccaaatattaaatgcaccttgccagatattctcctgcagctctaaggaaaggaaatcaatttaaaaataatttgtagaatctactattgagccaccaaagtataattccctaaaagtttaagaaaccctggcaattaattcagcataaacatatcctataaacagcaggagaggttcagctttctgattttactgtggaccttttcctaagggcattcatgaatgcagcaacagttttaactatggcttacatttattttaaatttcactaaatacaaatcttgattgtcatgccagttttagatcttattaattttcagaatggataaattcaaataatcataaattacggtaactttttattataccaaggtgttctaatgccatcatatgaagacagatgcttcaaacaacctgcattaaattatatttttaataaaattaaaatctatttttaaccta

SEQ ID NO: 292303 - DNA, 2271 bp, Homo sapiens
ctgccatctggggtgtggtgtggtatgtatttggtataaggggaaagaagttacatttttcatcttcttatgctcataaagcatcttccattgccaaatcctccagcttttgttctatggaaagagatgaggaagactctataatcgtctcagaaggaataattgaggaatacctagcattcgatcacatagatatagaagagggatttcatgggaagaaatcagaagcagctacagagaaacagaaattagggtatcctcccattgctccattttactgcatgaaagaagatgtccttgcttatgtgtttgacagtgtatggtgcaaggttgtgagctgtatggagcagttgacacgtagtcactgggaaggatttgcctctgatgatgagagtaatgttgcagttaccagacccgattcagaaagttcctgtgtgctgagtgaactacatcctttggtgttaccgcgagtgccacagtctaaggtgctgtacattacctcaaatccgatgagtctctgtcaagcaagcagacatcagccaaatgtgaatgatctcttggttcatggaatgcctctacagccaagaaatctctccctaatggacaagctcctagatcttgatgacaagctacttatgaggcctgggtccagtaccatcctttcaactcgaaattggccaaatcgagctgtggagtttagtacatcatctctgtcatacacagtgcagtccaccaggagacgcaatccaccaccacgaactcttcatccgatcagcacgagccattcatgtgctgaaacaccaagatctgtggaagaaatcctcagaggagcccgagtcccagtggcacccgactcgctctcctctccctcaccgacgcccctgagtcgaaataatctgctaccacctattggcacagctgaagtggaacatgtgagcactgtggggccacaaagacagatgctggatacacagtatcgtcgctcatgtgcagttgagtatcctcatcaggcccgacctggcaggggatctgcaggtcctcagttacatgggtctacaaaatctcaaagcggaggcagaccagtctctcgaaccaggcagggaccataaggcaaatgagaagaatctatcaggctgcaggaaacacgagatttcatgaagcagtattcagtcatcaagtgatgcagagcttgtatagaagatcgactagaaatcatcttcatgaagagtgattttggcacaagtgaccgaagaacaaaacaccatagcagccaaaaatgacatgagtgttgtttctatctccagttactgtctctttcagcagaaattaacctatcccattggaaaggcaagtttgtacccaaagatgcaacagtgaataatacccaaatcactgctcatgttatctcttaacaatgatcagttcaatcatataggatttgatgagctcacacatacacaaaaagcagcaaatcatcagtgacaatatcactggcttcagaatacttcagcctgtgttcatttctggagagttgtactcagttttaagtcattttgctgttgaaaatctgacctcatcaaatagatgtcattcctaaaactctctttagatgtcctaccctatcagcagattaaaatggaaggggtgtgtaactaaaaacataaatgttaagcattagtataaagtaacttctgtaataaattatatcgcatattttttcagataggacagctcaaccttacgatgcctacctgatgccaggtgatgcttattttcttcctaaagtaggttactggtcatatcttttttccaaatattaaatgcaccttgccagatattctcctgcagctctaaggaaaggaaatcaatttaaaaataatttgtagaatctactattgagccaccaaagtataattccctaaaagtttaagaaaccctggcaattaattcagcataaacatatcctataaacagcaggagaggttcagctttctgattttactgtggaccttttcctaagggcattcatgaatgcagcaacagttttaactatggcttacatttattttaaatttcactaaatacaaatcttgattgtcatgccagttttagatcttattaattttcagaatggataaattcaaataatcataaattacggtaactttttattataccaaggtgttctaatgccatcatatgaagacagatgcttcaaacaacctgcattaaattatatttttaataaaattaaaatctatttttaaccta

SEQ ID NO: 292304 - DNA, 5618 bp, Homo sapiens
  misc_feature (4870)..(4870): n is a, c, g, or t
ctaggtgacggggcgagacggggccggtaggtggcgggaggggccgggccggagccggcgggagggccaggcccggaggcccccaccctggcgtgcctgccccggccgcggctgaggaggaggaggaggaggaggaggaggaggatgatctccagatacactcggaaggcggtgccacagagcttggagctgaaaggaataacaaaacatgctcttaaccatcatccccctccagagaagctggaggaaatttcccccaccagtgacagtcatgagaaagacacaagttcccaaagcaagtctgacatcacaagagaatcatcttttacatcagccgacactgggaattcactgtctgcttttccaagttatacaggcgcagggatatctactgaaggaagctcggacttctcctggggatatggaactcgatcaaaatgccactgaaaaagtccagacaatgttcacagccattgatgaactcttgtatgagcagaagttgagtgtgcataccaagagtctacaagaagagtgccaacagtggacagctagctttcctcacctcaggattctaggtaggcagataatcactccaagtgaaggttatagattgtatcctagatccccttctgctgtttccgcttcatatgaaacaaccttgtctcaagaaagagattctactatatttggtataaggggaaagaagttacatttttcatcttcttatgctcataaagcatcttccattgccaaatcctccagcttttgttctatggaaagagatgaggaagactctataatcgtctcagaaggaataattgaggaatacctagcattcgatcacatagatatagaagagggatttcatgggaagaaatcagaagcagctacagagaaacagaaattagggtatcctcccattgctccattttactgcatgaaagaagatgtccttgcttatgtgtttgacagtgtatggtgcaaggttgtgagctgtatggagcagttgacacgtagtcactgggaaggatttgcctctgcattaaactatcaaaatggtgccagctatgaccttgtgaccacagaggatgggacctctcttagatgatgagagtaatgttgcagttaccagacccgattcagaaagttcctgtgtgctgagtgaactacatcctttggtgttaccgcgagtgccacagtctaaggtgctgtacattacctcaaatccgatgagtctctgtcaagcaagcagacatcagccaaatgtgaatgatctcttggttcatggaatgcctctacagccaagaaatctctccctaatggacaagctcctagatcttgatgacaagctacttatgaggcctgggtccagtaccatcctttcaactcgaaattggccaaatcgagctgtggagtttagtacatcatctctgtcatacacagtgcagtccaccaggagacgcaatccaccaccacgaactcttcatccgatcagcacgagccattcatgtgctgaaacaccaagatctgtggaagaaatcctcagaggagcccgagtcccagtggcacccgactcgctctcctctccctcaccgacgcccctgagtcgaaataatctgctaccacctattggcacagctgaagtggaacatgtgagcactgtggggccacaaagacagatgaaaccccatggcgactctagtcgagctcaaagtgcggtggtggatgaacctaactatcagcagccacaagaaaggctccttttgcccgactttttccccaggcccaacacaactcaatcatttttgctggatacacagtatcgtcgctcatgtgcagttgagtatcctcatcaggcccgacctggcaggggatctgcaggtcctcagttacatgggtctacaaaatctcaaagcggaggcagaccagtctctcgaaccaggcagggaccataaggcaaatgagaagaatctatcaggctgcaggaaacacgagatttcatgaagcagtattcagtcatcaagtgatgcagagcttgtatagaagatcgactagaaatcatcttcatgaagagtgattttggcacaagtgaccgaagaacaaaacaccatagcagccaaaaatgacatgagtgttgtttctatctccagttactgtctctttcagcagaaattaacctatcccattggaaaggcaagtttgtacccaaagatgcaacagtgaataatacccaaatcactgctcatgttatctcttaacaatgatcagttcaatcatataggatttgatgagctcacacatacacaaaaagcagcaaatcatcagtgacaatatcactggcttcagaatacttcagcctgtgttcatttctggagagttgtactcagttttaagtcattttgctgttgaaaatctgacctcatcaaatagatgtcattcctaaaactctctttagatgtcctaccctatcagcagattaaaatggaaggggtgtgtaactaaaaacataaatgttaagcattagtataaagtaacttctgtaataaattatatcgcatattttttcagataggacagctcaaccttacgatgcctacctgatgccaggtgatgcttattttcttcctaaagtaggttactggtcatatcttttttccaaatattaaatgcaccttgccagatattctcctgcagctctaaggaaaggaaatcaatttaaaaataatttgtagaatctactattgagccaccaaagtataattccctaaaagtttaagaaaccctggcaattaattcagcataaacatatcctataaacagcaggagaggttcagctttctgattttactgtggaccttttcctaagggcattcatgaatgcagcaacagttttaactatggcttacatttattttaaatttcactaaatacaaatcttgattgtcatgccagttttagatcttattaattttcagaatggataaattcaaataatcataaattacggtaactttttattataccaaggtgttctaatgccatcatatgaagacagatgcttcaaacaacctgcattaaattatatttttaataaaattaaaatctatttttaacctatttgtagtcacaaaccgaaaacgtgtcgtctttaccttagagctaaaggcttactttatgcatacggtatatttaatagtctacaaatcaaagatttaaacagtcccttaaaaattccatatattctcataccaactcatctacatagaaatgaaaatctctattgttctcacaaaccattaccatgagttcactataacaactggatcaatatggcttgcctttcaaagttaaagaatcagaaaggggcctgtaagaagtcatttagcccaattccctcaccctgtgtgttttccctcaaagccagtgcaatttttttttaaccaaaaaactggacatgtttaatacatacagtttgacaaatttggatttcactctttgttttgatgtagtaactcttttataaaagggaacagattcagacaagctcagtggcccaactgaagacattcagcaattaatggcaggacttcagtaatcagtggcaggactacaacatacatctcttcatgctagggaaaccaggctctctattataaagctgaccagggctattgttttccccttttctctcatcctaaacaccattcatatttttcctaggtcacattttagtgggatcatttacaaagcccccagaacttaatcatcatgttttaccttttttattgaattatatacacctcttacaaaaatgcttgaagtaatttaacacctgtacatcagtacaaaacctggctgagtaaaatgaagagaggatctattcaagatcattaagaccaaatgtaaactgggaagtatgtggaagatagctgtccagcaagtgtctggaaggtgttctagctgggtagagagcctattctaacagacacgcacatcgcagaaagcagcatgaacagaaccacatcctagataagagttctgtgtacagaagatccatggaggcaagtgctgtcaggaaggacactgcctccctccaccctcccaaatgtcaccaccaagttccttcaggtgagacctcacacaatgtcaagtgctttctaggaaatactaagatcaggttgagagattctgcttggtctagtcaatctgaaaaattcaggctggaaagacaccttttctcaagagctgaattgacttttgccttcaaatcctgcctgcaccttgcctacgatggcatcaatttacacctaaggacctttgaagagaaaaattccattatttcttttctttcttgagagcagattttttccctcctcctttggaagatttgcagtactttgcttccatctgagccagaaaattgtccatttccttttgccgatccttttgtctgctctgtttgagaagttaaaacacaagctttcacaacattatccatagacagaaagtacctagtggttgccaggggctggaaaagtggaataactactaatgggtatggagtttttttggaatggtgaaaatgtcctacaattggtgttaataattgtaaaactttgtaaatacacttaaaaccaccaaattgtacactttaaaaggacaaatagaaggtatgcggttatgtcttaaaagaagaaaacaaaatacaacattccaaagaaaatattagcagtaggaatcagatcattaaagatgtggcaacaaactgccaagtttacctgaatggctgccttcaggctatccacgccttcatcaagccccaactcctttctgctcatttctgcttctttggcctcttcctgagcctganacaggaactcacatgagactcagggccaccaggaaatgcttaaaatacatactctttcccaaaagcaaatctataattctgtttcaattttatgaatatatgaatagacaaaatgaatcgaattacataactatgtcattcattaaatggcaacaatgctgacagcaagcagtagatcctctgattccaattaccatttgttttttacccaattctatttgctagaggtagtaagtactctggcactcataaatcacatgatgataaaaaggaacatgaggccgggtatggtggctcacaactgtaatccccataccttgggaggccaaggtgggaggatcacttgaactcaggagttcaagacctgcctgggtaacatagtgagacctcagttctataaaaaagaaaagaaatgagcctggtgtggtggcatgtgcttgtagtcccagctactagggaggctgaggtgggaagatggcttcagtctgagagttcaggctgcaataagctgtgatcatgcctctgcactccagcctgggtgatggagatgccatctcttagaaaaaagagaaaaaaaaaaaaaaaaggcaaatgatgcaattgccaggatacaggtatttccaatttctctcctggaaacccaatttactccatgggactggtggtgccttgtgaacaaccccagtttaaaatgacttctccccagtagtcagaagaaccaacatcaataaactcagttttaacatct

SEQ ID NO: 292305 - DNA, 4954 bp, Homo sapiens
  misc_feature (4206)..(4206): n is a, c, g, or t
tgtttaggtgtggtattattttatttattggacgacttacagaaaagggttgtatttcagttatttatgcaaatagggctactgtggtcccaacagctctggctctgggcagcacaagaccctttgcccactcccagctttccaaagaacccaaacccaaatccctgccagctccaacttgctcagcactttaattgctacagtgggagccacactggtgccacaactgctcccaagcagcaatatttgtctttcagttgtctttctggtgacaatctttcagcacaaaagaatgcctcaaacagagtaggaatcagcccctgtggcaaatttttgggaagcactttggagtaggtgtccttcaggcttgccttcactggtgactaaaaaagtgactgtgatggcaggtggataatggacttgctttgccaaatgtccattctagtaaattatgtttatgattgaaataatgtcccacttttaagaacagattctcatgcctgagctagagtaccatctggaaactagtgttacttattgaaaggtttttatttttgctttatttccccctaaatgtagtttctagtctaaggctttttaccccgttagtcttgtcttccttgacatactgatctttacttcattgtgggtttctgatttggctactagagatcttgatgacaagctacttatgaggcctgggtccagtaccatcctttcaactcgaaattggccaaatcgagctgtggagtttagtacatcatctctgtcatacacagtgcagtccaccaggagacgcaatccaccaccacgaactcttcatccgatcagcacgagccattcatgtgctgaaacaccaagatctgtggaagaaatcctcagaggagcccgagtcccagtggcacccgactcgctctcctctccctcaccgacgcccctgagtcgaaataatctgctaccacctattggcacagctgaagtggaacatgtgagcactgtggggccacaaagacagatgaaaccccatggcgactctagtcgagctcaaagtgcggtggtggatgaacctaactatcagcagccacaagaaaggctccttttgcccgactttttccccaggcccaacacaactcaatcatttttgctggatacacagtatcgtcgctcatgtgcagttgagtatcctcatcaggcccgacctggcaggggatctgcaggtcctcagttacatgggtctacaaaatctcaaagcggaggcagaccagtctctcgaaccaggcagggaccataaggcaaatgagaagaatctatcaggctgcaggaaacacgagatttcatgaagcagtattcagtcatcaagtgatgcagagcttgtatagaagatcgactagaaatcatcttcatgaagagtgattttggcacaagtgaccgaagaacaaaacaccatagcagccaaaaatgacatgagtgttgtttctatctccagttactgtctctttcagcagaaattaacctatcccattggaaaggcaagtttgtacccaaagatgcaacagtgaataatacccaaatcactgctcatgttatctcttaacaatgatcagttcaatcatataggatttgatgagctcacacatacacaaaaagcagcaaatcatcagtgacaatatcactggcttcagaatacttcagcctgtgttcatttctggagagttgtactcagttttaagtcattttgctgttgaaaatctgacctcatcaaatagatgtcattcctaaaactctctttagatgtcctaccctatcagcagattaaaatggaaggggtgtgtaactaaaaacataaatgttaagcattagtataaagtaacttctgtaataaattatatcgcatattttttcagataggacagctcaaccttacgatgcctacctgatgccaggtgatgcttattttcttcctaaagtaggttactggtcatatcttttttccaaatattaaatgcaccttgccagatattctcctgcagctctaaggaaaggaaatcaatttaaaaataatttgtagaatctactattgagccaccaaagtataattccctaaaagtttaagaaaccctggcaattaattcagcataaacatatcctataaacagcaggagaggttcagctttctgattttactgtggaccttttcctaagggcattcatgaatgcagcaacagttttaactatggcttacatttattttaaatttcactaaatacaaatcttgattgtcatgccagttttagatcttattaattttcagaatggataaattcaaataatcataaattacggtaactttttattataccaaggtgttctaatgccatcatatgaagacagatgcttcaaacaacctgcattaaattatatttttaataaaattaaaatctatttttaacctatttgtagtcacaaaccgaaaacgtgtcgtctttaccttagagctaaaggcttactttatgcatacggtatatttaatagtctacaaatcaaagatttaaacagtcccttaaaaattccatatattctcataccaactcatctacatagaaatgaaaatctctattgttctcacaaaccattaccatgagttcactataacaactggatcaatatggcttgcctttcaaagttaaagaatcagaaaggggcctgtaagaagtcatttagcccaattccctcaccctgtgtgttttccctcaaagccagtgcaatttttttttaaccaaaaaactggacatgtttaatacatacagtttgacaaatttggatttcactctttgttttgatgtagtaactcttttataaaagggaacagattcagacaagctcagtggcccaactgaagacattcagcaattaatggcaggacttcagtaatcagtggcaggactacaacatacatctcttcatgctagggaaaccaggctctctattataaagctgaccagggctattgttttccccttttctctcatcctaaacaccattcatatttttcctaggtcacattttagtgggatcatttacaaagcccccagaacttaatcatcatgttttaccttttttattgaattatatacacctcttacaaaaatgcttgaagtaatttaacacctgtacatcagtacaaaacctggctgagtaaaatgaagagaggatctattcaagatcattaagaccaaatgtaaactgggaagtatgtggaagatagctgtccagcaagtgtctggaaggtgttctagctgggtagagagcctattctaacagacacgcacatcgcagaaagcagcatgaacagaaccacatcctagataagagttctgtgtacagaagatccatggaggcaagtgctgtcaggaaggacactgcctccctccaccctcccaaatgtcaccaccaagttccttcaggtgagacctcacacaatgtcaagtgctttctaggaaatactaagatcaggttgagagattctgcttggtctagtcaatctgaaaaattcaggctggaaagacaccttttctcaagagctgaattgacttttgccttcaaatcctgcctgcaccttgcctacgatggcatcaatttacacctaaggacctttgaagagaaaaattccattatttcttttctttcttgagagcagattttttccctcctcctttggaagatttgcagtactttgcttccatctgagccagaaaattgtccatttccttttgccgatccttttgtctgctctgtttgagaagttaaaacacaagctttcacaacattatccatagacagaaagtacctagtggttgccaggggctggaaaagtggaataactactaatgggtatggagtttttttggaatggtgaaaatgtcctacaattggtgttaataattgtaaaactttgtaaatacacttaaaaccaccaaattgtacactttaaaaggacaaatagaaggtatgcggttatgtcttaaaagaagaaaacaaaatacaacattccaaagaaaatattagcagtaggaatcagatcattaaagatgtggcaacaaactgccaagtttacctgaatggctgccttcaggctatccacgccttcatcaagccccaactcctttctgctcatttctgcttctttggcctcttcctgagcctganacaggaactcacatgagactcagggccaccaggaaatgcttaaaatacatactctttcccaaaagcaaatctataattctgtttcaattttatgaatatatgaatagacaaaatgaatcgaattacataactatgtcattcattaaatggcaacaatgctgacagcaagcagtagatcctctgattccaattaccatttgttttttacccaattctatttgctagaggtagtaagtactctggcactcataaatcacatgatgataaaaaggaacatgaggccgggtatggtggctcacaactgtaatccccataccttgggaggccaaggtgggaggatcacttgaactcaggagttcaagacctgcctgggtaacatagtgagacctcagttctataaaaaagaaaagaaatgagcctggtgtggtggcatgtgcttgtagtcccagctactagggaggctgaggtgggaagatggcttcagtctgagagttcaggctgcaataagctgtgatcatgcctctgcactccagcctgggtgatggagatgccatctcttagaaaaaagagaaaaaaaaaaaaaaaaggcaaatgatgcaattgccaggatacaggtatttccaatttctctcctggaaacccaatttactccatgggactggtggtgccttgtgaacaaccccagtttaaaatgacttctccccagtagtcagaagaaccaacatcaataaactcagttttaacatct

SEQ ID NO: 292306 - DNA, 5476 bp, Homo sapiens
  misc_feature (4728)..(4728): n is a, c, g, or t
ctaggtgacggggcgagacggggccggtaggtggcgggaggggccgggccggagccggcgggagggccaggcccggaggcccccaccctggcgtgcctgccccggccgcggctgaggaggaggaggaggaggaggaggaggaggatgatctccagatacactcggaaggcggtgccacagagcttggagctgaaaggaataacaaaacatgctcttaaccatcatccccctccagagaagctggaggaaatttcccccaccagtgacagtcatgagaaagacacaagttcccaaagcaagtctgacatcacaagagaatcatcttttacatcagccgacactgggaattcactgtctgcttttccaagttatacaggcgcagggatatctactgaaggaagctcggacttctcctggggatatggaactcgatcaaaatgccactgaaaaagtccagacaatgttcacagccattgatgaactcttgtatgagcagaagttgagtgtgcataccaagagtctacaagaagagtgccaacagtggacagctagctttcctcacctcaggattctaggtaggcagataatcactccaagtgaaggttatagattgtatcctagatccccttctgctgtttccgcttcatatgaaacaaccttgtctcaagaaagagattctactatcttttgttctatggaaagagatgaggaagactctataatcgtctcagaaggaataattgaggaatacctagcattcgatcacatagatatagaagagggatttcatgggaagaaatcagaagcagctacagagaaacagaaattagggtatcctcccattgctccattttactgcatgaaagaagatgtccttgcttatgtgtttgacagtgtatggtgcaaggttgtgagctgtatggagcagttgacacgtagtcactgggaaggatttgcctctgatgatgagagtaatgttgcagttaccagacccgattcagaaagttcctgtgtgctgagtgaactacatcctttggtgttaccgcgagtgccacagtctaaggtgctgtacattacctcaaatccgatgagtctctgtcaagcaagcagacatcagccaaatgtgaatgatctcttggttcatggaatgcctctacagccaagaaatctctccctaatggacaagctcctagatcttgatgacaagctacttatgaggcctgggtccagtaccatcctttcaactcgaaattggccaaatcgagctgtggagtttagtacatcatctctgtcatacacagtgcagtccaccaggagacgcaatccaccaccacgaactcttcatccgatcagcacgagccattcatgtgctgaaacaccaagatctgtggaagaaatcctcagaggagcccgagtcccagtggcacccgactcgctctcctctccctcaccgacgcccctgagtcgaaataatctgctaccacctattggcacagctgaagtggaacatgtgagcactgtggggccacaaagacagatgaaaccccatggcgactctagtcgagctcaaagtgcggtggtggatgaacctaactatcagcagccacaagaaaggctccttttgcccgactttttccccaggcccaacacaactcaatcatttttgctggatacacagtatcgtcgctcatgtgcagttgagtatcctcatcaggcccgacctggcaggggatctgcaggtcctcagttacatgggtctacaaaatctcaaagcggaggcagaccagtctctcgaaccaggcagggaccataaggcaaatgagaagaatctatcaggctgcaggaaacacgagatttcatgaagcagtattcagtcatcaagtgatgcagagcttgtatagaagatcgactagaaatcatcttcatgaagagtgattttggcacaagtgaccgaagaacaaaacaccatagcagccaaaaatgacatgagtgttgtttctatctccagttactgtctctttcagcagaaattaacctatcccattggaaaggcaagtttgtacccaaagatgcaacagtgaataatacccaaatcactgctcatgttatctcttaacaatgatcagttcaatcatataggatttgatgagctcacacatacacaaaaagcagcaaatcatcagtgacaatatcactggcttcagaatacttcagcctgtgttcatttctggagagttgtactcagttttaagtcattttgctgttgaaaatctgacctcatcaaatagatgtcattcctaaaactctctttagatgtcctaccctatcagcagattaaaatggaaggggtgtgtaactaaaaacataaatgttaagcattagtataaagtaacttctgtaataaattatatcgcatattttttcagataggacagctcaaccttacgatgcctacctgatgccaggtgatgcttattttcttcctaaagtaggttactggtcatatcttttttccaaatattaaatgcaccttgccagatattctcctgcagctctaaggaaaggaaatcaatttaaaaataatttgtagaatctactattgagccaccaaagtataattccctaaaagtttaagaaaccctggcaattaattcagcataaacatatcctataaacagcaggagaggttcagctttctgattttactgtggaccttttcctaagggcattcatgaatgcagcaacagttttaactatggcttacatttattttaaatttcactaaatacaaatcttgattgtcatgccagttttagatcttattaattttcagaatggataaattcaaataatcataaattacggtaactttttattataccaaggtgttctaatgccatcatatgaagacagatgcttcaaacaacctgcattaaattatatttttaataaaattaaaatctatttttaacctatttgtagtcacaaaccgaaaacgtgtcgtctttaccttagagctaaaggcttactttatgcatacggtatatttaatagtctacaaatcaaagatttaaacagtcccttaaaaattccatatattctcataccaactcatctacatagaaatgaaaatctctattgttctcacaaaccattaccatgagttcactataacaactggatcaatatggcttgcctttcaaagttaaagaatcagaaaggggcctgtaagaagtcatttagcccaattccctcaccctgtgtgttttccctcaaagccagtgcaatttttttttaaccaaaaaactggacatgtttaatacatacagtttgacaaatttggatttcactctttgttttgatgtagtaactcttttataaaagggaacagattcagacaagctcagtggcccaactgaagacattcagcaattaatggcaggacttcagtaatcagtggcaggactacaacatacatctcttcatgctagggaaaccaggctctctattataaagctgaccagggctattgttttccccttttctctcatcctaaacaccattcatatttttcctaggtcacattttagtgggatcatttacaaagcccccagaacttaatcatcatgttttaccttttttattgaattatatacacctcttacaaaaatgcttgaagtaatttaacacctgtacatcagtacaaaacctggctgagtaaaatgaagagaggatctattcaagatcattaagaccaaatgtaaactgggaagtatgtggaagatagctgtccagcaagtgtctggaaggtgttctagctgggtagagagcctattctaacagacacgcacatcgcagaaagcagcatgaacagaaccacatcctagataagagttctgtgtacagaagatccatggaggcaagtgctgtcaggaaggacactgcctccctccaccctcccaaatgtcaccaccaagttccttcaggtgagacctcacacaatgtcaagtgctttctaggaaatactaagatcaggttgagagattctgcttggtctagtcaatctgaaaaattcaggctggaaagacaccttttctcaagagctgaattgacttttgccttcaaatcctgcctgcaccttgcctacgatggcatcaatttacacctaaggacctttgaagagaaaaattccattatttcttttctttcttgagagcagattttttccctcctcctttggaagatttgcagtactttgcttccatctgagccagaaaattgtccatttccttttgccgatccttttgtctgctctgtttgagaagttaaaacacaagctttcacaacattatccatagacagaaagtacctagtggttgccaggggctggaaaagtggaataactactaatgggtatggagtttttttggaatggtgaaaatgtcctacaattggtgttaataattgtaaaactttgtaaatacacttaaaaccaccaaattgtacactttaaaaggacaaatagaaggtatgcggttatgtcttaaaagaagaaaacaaaatacaacattccaaagaaaatattagcagtaggaatcagatcattaaagatgtggcaacaaactgccaagtttacctgaatggctgccttcaggctatccacgccttcatcaagccccaactcctttctgctcatttctgcttctttggcctcttcctgagcctganacaggaactcacatgagactcagggccaccaggaaatgcttaaaatacatactctttcccaaaagcaaatctataattctgtttcaattttatgaatatatgaatagacaaaatgaatcgaattacataactatgtcattcattaaatggcaacaatgctgacagcaagcagtagatcctctgattccaattaccatttgttttttacccaattctatttgctagaggtagtaagtactctggcactcataaatcacatgatgataaaaaggaacatgaggccgggtatggtggctcacaactgtaatccccataccttgggaggccaaggtgggaggatcacttgaactcaggagttcaagacctgcctgggtaacatagtgagacctcagttctataaaaaagaaaagaaatgagcctggtgtggtggcatgtgcttgtagtcccagctactagggaggctgaggtgggaagatggcttcagtctgagagttcaggctgcaataagctgtgatcatgcctctgcactccagcctgggtgatggagatgccatctcttagaaaaaagagaaaaaaaaaaaaaaaaggcaaatgatgcaattgccaggatacaggtatttccaatttctctcctggaaacccaatttactccatgggactggtggtgccttgtgaacaaccccagtttaaaatgacttctccccagtagtcagaagaaccaacatcaataaactcagttttaacatct

SEQ ID NO: 292307 - DNA, 5100 bp, Homo sapiens
  misc_feature (4352)..(4352): n is a, c, g, or t
ctaggtgacggggcgagacggggccggtaggtggcgggaggggccgggccggagccggcgggagggccaggcccggaggcccccaccctggcgtgcctgccccggccgcggctgaggaggaggaggaggaggaggaggaggaggatgatctccagatacactcggaaggcggtgccacagagcttggagctgaaaggaataacaaaacatgctcttaaccatcatccccctccagagaagctggaggaaatttcccccaccagtgacagtcatgagaaagacacaagttcccaaagcaagtctgacatcacaagagaatcatcttttacatcagccgacactgggaattcactgtctgcttttccaagttatacaggcgcagggatatctactgaaggaagctcggacttctcctggggatatggaactcgatcaaaatgccactgaaaaagtccagacaatgttcacagccattgatgaactcttgtatgagcagaagttgagtgtgcataccaagagtctacaagaagagtgccaacagtggacagctagctttcctcacctcaggattctaggtaggcagataatcactccaagtgaaggttatagattgtatcctagatccccttctgctgtttccgcttcatatgaaacaaccttgtctcaagaaagagattctactatatttggtataaggggaaagaagttacatttttcatcttcttatgctcataaagcatcttccattgccaaatcctccagcttttgttctatggaaagagatgaggaagactctataatcgtctcagaaggaataattgaggaatacctagcattcgatcacatagatatagaagagggatttcatgggaagaaatcagaagcagctacagagaaacagaaattagggtatcctcccattgctccattttactgcatgaaagaagatgtccttgcttatgtgtttgacagtgtatggtgcaaggttgtgagctgtatggagcagttgacacgtagtcactgggaaggatttgcctctgcccagtggcacccgactcgctctcctctccctcaccgacgcccctgagtcgaaataatctgctaccacctattggcacagctgaagtggaacatgtgagcactgtggggccacaaagacagatgaaaccccatggcgactctagtcgagctcaaagtgcggtggtggatgaacctaactatcagcagccacaagaaaggctccttttgcccgactttttccccaggcccaacacaactcaatcatttttgctggatacacagtatcgtcgctcatgtgcagttgagtatcctcatcaggcccgacctggcaggggatctgcaggtcctcagttacatgggtctacaaaatctcaaagcggaggcagaccagtctctcgaaccaggcagggaccataaggcaaatgagaagaatctatcaggctgcaggaaacacgagatttcatgaagcagtattcagtcatcaagtgatgcagagcttgtatagaagatcgactagaaatcatcttcatgaagagtgattttggcacaagtgaccgaagaacaaaacaccatagcagccaaaaatgacatgagtgttgtttctatctccagttactgtctctttcagcagaaattaacctatcccattggaaaggcaagtttgtacccaaagatgcaacagtgaataatacccaaatcactgctcatgttatctcttaacaatgatcagttcaatcatataggatttgatgagctcacacatacacaaaaagcagcaaatcatcagtgacaatatcactggcttcagaatacttcagcctgtgttcatttctggagagttgtactcagttttaagtcattttgctgttgaaaatctgacctcatcaaatagatgtcattcctaaaactctctttagatgtcctaccctatcagcagattaaaatggaaggggtgtgtaactaaaaacataaatgttaagcattagtataaagtaacttctgtaataaattatatcgcatattttttcagataggacagctcaaccttacgatgcctacctgatgccaggtgatgcttattttcttcctaaagtaggttactggtcatatcttttttccaaatattaaatgcaccttgccagatattctcctgcagctctaaggaaaggaaatcaatttaaaaataatttgtagaatctactattgagccaccaaagtataattccctaaaagtttaagaaaccctggcaattaattcagcataaacatatcctataaacagcaggagaggttcagctttctgattttactgtggaccttttcctaagggcattcatgaatgcagcaacagttttaactatggcttacatttattttaaatttcactaaatacaaatcttgattgtcatgccagttttagatcttattaattttcagaatggataaattcaaataatcataaattacggtaactttttattataccaaggtgttctaatgccatcatatgaagacagatgcttcaaacaacctgcattaaattatatttttaataaaattaaaatctatttttaacctatttgtagtcacaaaccgaaaacgtgtcgtctttaccttagagctaaaggcttactttatgcatacggtatatttaatagtctacaaatcaaagatttaaacagtcccttaaaaattccatatattctcataccaactcatctacatagaaatgaaaatctctattgttctcacaaaccattaccatgagttcactataacaactggatcaatatggcttgcctttcaaagttaaagaatcagaaaggggcctgtaagaagtcatttagcccaattccctcaccctgtgtgttttccctcaaagccagtgcaatttttttttaaccaaaaaactggacatgtttaatacatacagtttgacaaatttggatttcactctttgttttgatgtagtaactcttttataaaagggaacagattcagacaagctcagtggcccaactgaagacattcagcaattaatggcaggacttcagtaatcagtggcaggactacaacatacatctcttcatgctagggaaaccaggctctctattataaagctgaccagggctattgttttccccttttctctcatcctaaacaccattcatatttttcctaggtcacattttagtgggatcatttacaaagcccccagaacttaatcatcatgttttaccttttttattgaattatatacacctcttacaaaaatgcttgaagtaatttaacacctgtacatcagtacaaaacctggctgagtaaaatgaagagaggatctattcaagatcattaagaccaaatgtaaactgggaagtatgtggaagatagctgtccagcaagtgtctggaaggtgttctagctgggtagagagcctattctaacagacacgcacatcgcagaaagcagcatgaacagaaccacatcctagataagagttctgtgtacagaagatccatggaggcaagtgctgtcaggaaggacactgcctccctccaccctcccaaatgtcaccaccaagttccttcaggtgagacctcacacaatgtcaagtgctttctaggaaatactaagatcaggttgagagattctgcttggtctagtcaatctgaaaaattcaggctggaaagacaccttttctcaagagctgaattgacttttgccttcaaatcctgcctgcaccttgcctacgatggcatcaatttacacctaaggacctttgaagagaaaaattccattatttcttttctttcttgagagcagattttttccctcctcctttggaagatttgcagtactttgcttccatctgagccagaaaattgtccatttccttttgccgatccttttgtctgctctgtttgagaagttaaaacacaagctttcacaacattatccatagacagaaagtacctagtggttgccaggggctggaaaagtggaataactactaatgggtatggagtttttttggaatggtgaaaatgtcctacaattggtgttaataattgtaaaactttgtaaatacacttaaaaccaccaaattgtacactttaaaaggacaaatagaaggtatgcggttatgtcttaaaagaagaaaacaaaatacaacattccaaagaaaatattagcagtaggaatcagatcattaaagatgtggcaacaaactgccaagtttacctgaatggctgccttcaggctatccacgccttcatcaagccccaactcctttctgctcatttctgcttctttggcctcttcctgagcctganacaggaactcacatgagactcagggccaccaggaaatgcttaaaatacatactctttcccaaaagcaaatctataattctgtttcaattttatgaatatatgaatagacaaaatgaatcgaattacataactatgtcattcattaaatggcaacaatgctgacagcaagcagtagatcctctgattccaattaccatttgttttttacccaattctatttgctagaggtagtaagtactctggcactcataaatcacatgatgataaaaaggaacatgaggccgggtatggtggctcacaactgtaatccccataccttgggaggccaaggtgggaggatcacttgaactcaggagttcaagacctgcctgggtaacatagtgagacctcagttctataaaaaagaaaagaaatgagcctggtgtggtggcatgtgcttgtagtcccagctactagggaggctgaggtgggaagatggcttcagtctgagagttcaggctgcaataagctgtgatcatgcctctgcactccagcctgggtgatggagatgccatctcttagaaaaaagagaaaaaaaaaaaaaaaaggcaaatgatgcaattgccaggatacaggtatttccaatttctctcctggaaacccaatttactccatgggactggtggtgccttgtgaacaaccccagtttaaaatgacttctccccagtagtcagaagaaccaacatcaataaactcagttttaacatct

SEQ ID NO: 292308 - DNA, 4881 bp, Homo sapiens
  misc_feature (4133)..(4133): n is a, c, g, or t
tgtttaggtgtggtattattttatttattggacgacttacagaaaagggttgtatttcagttatttatgcaaatagggctactgtggtcccaacagctctggctctgggcagcacaagaccctttgcccactcccagctttccaaagaacccaaacccaaatccctgccagctccaacttgctcagcactttaattgctacagtgggagccacactggtgccacaactgctcccaagcagcaatatttgtctttcagttgtctttctggtgacaatctttcagcacaaaagaatgcctcaaacagagtaggaatcagcccctgtggcaaatttttgggaagcactttggagtaggtgtccttcaggcttgccttcactggtgactaaaaaagtgactgtgatggcaggtggataatggacttgctttgccaaatgtccattctagtaaattatgtttatgattgaaataatgtcccacttttaagaacagattctcatgcctgagctagagtaccatctggaaactagtgttacttattgaaaggtttttatttttgctttatttccccctaaatgtagtttctagtctaaggctttttaccccgttagtcttgtcttccttgacatactgatctttacttcattgtgggtttctgatttggctactagagatcttgatgacaagctacttatgaggcctgggtccagtaccatcctttcaactcgaaattggccaaatcgagctgtggagtttagtacatcatctctgtcatacacagtgcagtccaccaggagacgcaatccaccaccacgaactcttccccagtggcacccgactcgctctcctctccctcaccgacgcccctgagtcgaaataatctgctaccacctattggcacagctgaagtggaacatgtgagcactgtggggccacaaagacagatgaaaccccatggcgactctagtcgagctcaaagtgcggtggtggatgaacctaactatcagcagccacaagaaaggctccttttgcccgactttttccccaggcccaacacaactcaatcatttttgctggatacacagtatcgtcgctcatgtgcagttgagtatcctcatcaggcccgacctggcaggggatctgcaggtcctcagttacatgggtctacaaaatctcaaagcggaggcagaccagtctctcgaaccaggcagggaccataaggcaaatgagaagaatctatcaggctgcaggaaacacgagatttcatgaagcagtattcagtcatcaagtgatgcagagcttgtatagaagatcgactagaaatcatcttcatgaagagtgattttggcacaagtgaccgaagaacaaaacaccatagcagccaaaaatgacatgagtgttgtttctatctccagttactgtctctttcagcagaaattaacctatcccattggaaaggcaagtttgtacccaaagatgcaacagtgaataatacccaaatcactgctcatgttatctcttaacaatgatcagttcaatcatataggatttgatgagctcacacatacacaaaaagcagcaaatcatcagtgacaatatcactggcttcagaatacttcagcctgtgttcatttctggagagttgtactcagttttaagtcattttgctgttgaaaatctgacctcatcaaatagatgtcattcctaaaactctctttagatgtcctaccctatcagcagattaaaatggaaggggtgtgtaactaaaaacataaatgttaagcattagtataaagtaacttctgtaataaattatatcgcatattttttcagataggacagctcaaccttacgatgcctacctgatgccaggtgatgcttattttcttcctaaagtaggttactggtcatatcttttttccaaatattaaatgcaccttgccagatattctcctgcagctctaaggaaaggaaatcaatttaaaaataatttgtagaatctactattgagccaccaaagtataattccctaaaagtttaagaaaccctggcaattaattcagcataaacatatcctataaacagcaggagaggttcagctttctgattttactgtggaccttttcctaagggcattcatgaatgcagcaacagttttaactatggcttacatttattttaaatttcactaaatacaaatcttgattgtcatgccagttttagatcttattaattttcagaatggataaattcaaataatcataaattacggtaactttttattataccaaggtgttctaatgccatcatatgaagacagatgcttcaaacaacctgcattaaattatatttttaataaaattaaaatctatttttaacctatttgtagtcacaaaccgaaaacgtgtcgtctttaccttagagctaaaggcttactttatgcatacggtatatttaatagtctacaaatcaaagatttaaacagtcccttaaaaattccatatattctcataccaactcatctacatagaaatgaaaatctctattgttctcacaaaccattaccatgagttcactataacaactggatcaatatggcttgcctttcaaagttaaagaatcagaaaggggcctgtaagaagtcatttagcccaattccctcaccctgtgtgttttccctcaaagccagtgcaatttttttttaaccaaaaaactggacatgtttaatacatacagtttgacaaatttggatttcactctttgttttgatgtagtaactcttttataaaagggaacagattcagacaagctcagtggcccaactgaagacattcagcaattaatggcaggacttcagtaatcagtggcaggactacaacatacatctcttcatgctagggaaaccaggctctctattataaagctgaccagggctattgttttccccttttctctcatcctaaacaccattcatatttttcctaggtcacattttagtgggatcatttacaaagcccccagaacttaatcatcatgttttaccttttttattgaattatatacacctcttacaaaaatgcttgaagtaatttaacacctgtacatcagtacaaaacctggctgagtaaaatgaagagaggatctattcaagatcattaagaccaaatgtaaactgggaagtatgtggaagatagctgtccagcaagtgtctggaaggtgttctagctgggtagagagcctattctaacagacacgcacatcgcagaaagcagcatgaacagaaccacatcctagataagagttctgtgtacagaagatccatggaggcaagtgctgtcaggaaggacactgcctccctccaccctcccaaatgtcaccaccaagttccttcaggtgagacctcacacaatgtcaagtgctttctaggaaatactaagatcaggttgagagattctgcttggtctagtcaatctgaaaaattcaggctggaaagacaccttttctcaagagctgaattgacttttgccttcaaatcctgcctgcaccttgcctacgatggcatcaatttacacctaaggacctttgaagagaaaaattccattatttcttttctttcttgagagcagattttttccctcctcctttggaagatttgcagtactttgcttccatctgagccagaaaattgtccatttccttttgccgatccttttgtctgctctgtttgagaagttaaaacacaagctttcacaacattatccatagacagaaagtacctagtggttgccaggggctggaaaagtggaataactactaatgggtatggagtttttttggaatggtgaaaatgtcctacaattggtgttaataattgtaaaactttgtaaatacacttaaaaccaccaaattgtacactttaaaaggacaaatagaaggtatgcggttatgtcttaaaagaagaaaacaaaatacaacattccaaagaaaatattagcagtaggaatcagatcattaaagatgtggcaacaaactgccaagtttacctgaatggctgccttcaggctatccacgccttcatcaagccccaactcctttctgctcatttctgcttctttggcctcttcctgagcctganacaggaactcacatgagactcagggccaccaggaaatgcttaaaatacatactctttcccaaaagcaaatctataattctgtttcaattttatgaatatatgaatagacaaaatgaatcgaattacataactatgtcattcattaaatggcaacaatgctgacagcaagcagtagatcctctgattccaattaccatttgttttttacccaattctatttgctagaggtagtaagtactctggcactcataaatcacatgatgataaaaaggaacatgaggccgggtatggtggctcacaactgtaatccccataccttgggaggccaaggtgggaggatcacttgaactcaggagttcaagacctgcctgggtaacatagtgagacctcagttctataaaaaagaaaagaaatgagcctggtgtggtggcatgtgcttgtagtcccagctactagggaggctgaggtgggaagatggcttcagtctgagagttcaggctgcaataagctgtgatcatgcctctgcactccagcctgggtgatggagatgccatctcttagaaaaaagagaaaaaaaaaaaaaaaaggcaaatgatgcaattgccaggatacaggtatttccaatttctctcctggaaacccaatttactccatgggactggtggtgccttgtgaacaaccccagtttaaaatgacttctccccagtagtcagaagaaccaacatcaataaactcagttttaacatct

SEQ ID NO: 292309 - DNA, 4456 bp, Homo sapiens
  misc_feature (3708)..(3708): n is a, c, g, or t
aaaaattaaagcatggggaaaaagtataaataaccaaattggaaatattaacttttggcaaagttggatgagtctctgtcaagcaagcagacatcagccaaatgtgaatgatctcttggttcatggaatgcctctacagccaagaaatctctccctaatggacaagctcctagatcttgatgacaagctacttatgaggcctgggtccagtaccatcctttcaactcgaaattggccaaatcgagctgtggagtttagtacatcatctctgtcatacacagtgcagtccaccaggagacgcaatccaccaccacgaactcttcatccgatcagcacgagccattcatgtgctgaaacaccaagatctgtggaagaaatcctcagaggagcccgagtcccagtggcacccgactcgctctcctctccctcaccgacgcccctgagtcgaaataatctgctaccacctattggcacagctgaagtggaacatgtgagcactgtggggccacaaagacagatgaaaccccatggcgactctagtcgagctcaaagtgcggtggtggatgaacctaactatcagcagccacaagaaaggctccttttgcccgactttttccccaggcccaacacaactcaatcatttttgctggatacacagtatcgtcgctcatgtgcagttgagtatcctcatcaggcccgacctggcaggggatctgcaggtcctcagttacatgggtctacaaaatctcaaagcggaggcagaccagtctctcgaaccaggcagggaccataaggcaaatgagaagaatctatcaggctgcaggaaacacgagatttcatgaagcagtattcagtcatcaagtgatgcagagcttgtatagaagatcgactagaaatcatcttcatgaagagtgattttggcacaagtgaccgaagaacaaaacaccatagcagccaaaaatgacatgagtgttgtttctatctccagttactgtctctttcagcagaaattaacctatcccattggaaaggcaagtttgtacccaaagatgcaacagtgaataatacccaaatcactgctcatgttatctcttaacaatgatcagttcaatcatataggatttgatgagctcacacatacacaaaaagcagcaaatcatcagtgacaatatcactggcttcagaatacttcagcctgtgttcatttctggagagttgtactcagttttaagtcattttgctgttgaaaatctgacctcatcaaatagatgtcattcctaaaactctctttagatgtcctaccctatcagcagattaaaatggaaggggtgtgtaactaaaaacataaatgttaagcattagtataaagtaacttctgtaataaattatatcgcatattttttcagataggacagctcaaccttacgatgcctacctgatgccaggtgatgcttattttcttcctaaagtaggttactggtcatatcttttttccaaatattaaatgcaccttgccagatattctcctgcagctctaaggaaaggaaatcaatttaaaaataatttgtagaatctactattgagccaccaaagtataattccctaaaagtttaagaaaccctggcaattaattcagcataaacatatcctataaacagcaggagaggttcagctttctgattttactgtggaccttttcctaagggcattcatgaatgcagcaacagttttaactatggcttacatttattttaaatttcactaaatacaaatcttgattgtcatgccagttttagatcttattaattttcagaatggataaattcaaataatcataaattacggtaactttttattataccaaggtgttctaatgccatcatatgaagacagatgcttcaaacaacctgcattaaattatatttttaataaaattaaaatctatttttaacctatttgtagtcacaaaccgaaaacgtgtcgtctttaccttagagctaaaggcttactttatgcatacggtatatttaatagtctacaaatcaaagatttaaacagtcccttaaaaattccatatattctcataccaactcatctacatagaaatgaaaatctctattgttctcacaaaccattaccatgagttcactataacaactggatcaatatggcttgcctttcaaagttaaagaatcagaaaggggcctgtaagaagtcatttagcccaattccctcaccctgtgtgttttccctcaaagccagtgcaatttttttttaaccaaaaaactggacatgtttaatacatacagtttgacaaatttggatttcactctttgttttgatgtagtaactcttttataaaagggaacagattcagacaagctcagtggcccaactgaagacattcagcaattaatggcaggacttcagtaatcagtggcaggactacaacatacatctcttcatgctagggaaaccaggctctctattataaagctgaccagggctattgttttccccttttctctcatcctaaacaccattcatatttttcctaggtcacattttagtgggatcatttacaaagcccccagaacttaatcatcatgttttaccttttttattgaattatatacacctcttacaaaaatgcttgaagtaatttaacacctgtacatcagtacaaaacctggctgagtaaaatgaagagaggatctattcaagatcattaagaccaaatgtaaactgggaagtatgtggaagatagctgtccagcaagtgtctggaaggtgttctagctgggtagagagcctattctaacagacacgcacatcgcagaaagcagcatgaacagaaccacatcctagataagagttctgtgtacagaagatccatggaggcaagtgctgtcaggaaggacactgcctccctccaccctcccaaatgtcaccaccaagttccttcaggtgagacctcacacaatgtcaagtgctttctaggaaatactaagatcaggttgagagattctgcttggtctagtcaatctgaaaaattcaggctggaaagacaccttttctcaagagctgaattgacttttgccttcaaatcctgcctgcaccttgcctacgatggcatcaatttacacctaaggacctttgaagagaaaaattccattatttcttttctttcttgagagcagattttttccctcctcctttggaagatttgcagtactttgcttccatctgagccagaaaattgtccatttccttttgccgatccttttgtctgctctgtttgagaagttaaaacacaagctttcacaacattatccatagacagaaagtacctagtggttgccaggggctggaaaagtggaataactactaatgggtatggagtttttttggaatggtgaaaatgtcctacaattggtgttaataattgtaaaactttgtaaatacacttaaaaccaccaaattgtacactttaaaaggacaaatagaaggtatgcggttatgtcttaaaagaagaaaacaaaatacaacattccaaagaaaatattagcagtaggaatcagatcattaaagatgtggcaacaaactgccaagtttacctgaatggctgccttcaggctatccacgccttcatcaagccccaactcctttctgctcatttctgcttctttggcctcttcctgagcctganacaggaactcacatgagactcagggccaccaggaaatgcttaaaatacatactctttcccaaaagcaaatctataattctgtttcaattttatgaatatatgaatagacaaaatgaatcgaattacataactatgtcattcattaaatggcaacaatgctgacagcaagcagtagatcctctgattccaattaccatttgttttttacccaattctatttgctagaggtagtaagtactctggcactcataaatcacatgatgataaaaaggaacatgaggccgggtatggtggctcacaactgtaatccccataccttgggaggccaaggtgggaggatcacttgaactcaggagttcaagacctgcctgggtaacatagtgagacctcagttctataaaaaagaaaagaaatgagcctggtgtggtggcatgtgcttgtagtcccagctactagggaggctgaggtgggaagatggcttcagtctgagagttcaggctgcaataagctgtgatcatgcctctgcactccagcctgggtgatggagatgccatctcttagaaaaaagagaaaaaaaaaaaaaaaaggcaaatgatgcaattgccaggatacaggtatttccaatttctctcctggaaacccaatttactccatgggactggtggtgccttgtgaacaaccccagtttaaaatgacttctccccagtagtcagaagaaccaacatcaataaactcagttttaacatct

SEQ ID NO: 292310 - DNA, 4514 bp, Homo sapiens
  misc_feature (3766)..(3766): n is a, c, g, or t
aaaaattaaagcatggggaaaaagtataaataaccaaattggaaatattaacttttggcaaagttggaaaaccaaacaggtatcttctccaaccgatcaagagtactgtcttctttcaacacgtaatgagtctctgtcaagcaagcagacatcagccaaatgtgaatgatctcttggttcatggaatgcctctacagccaagaaatctctccctaatggacaagctcctagatcttgatgacaagctacttatgaggcctgggtccagtaccatcctttcaactcgaaattggccaaatcgagctgtggagtttagtacatcatctctgtcatacacagtgcagtccaccaggagacgcaatccaccaccacgaactcttcatccgatcagcacgagccattcatgtgctgaaacaccaagatctgtggaagaaatcctcagaggagcccgagtcccagtggcacccgactcgctctcctctccctcaccgacgcccctgagtcgaaataatctgctaccacctattggcacagctgaagtggaacatgtgagcactgtggggccacaaagacagatgaaaccccatggcgactctagtcgagctcaaagtgcggtggtggatgaacctaactatcagcagccacaagaaaggctccttttgcccgactttttccccaggcccaacacaactcaatcatttttgctggatacacagtatcgtcgctcatgtgcagttgagtatcctcatcaggcccgacctggcaggggatctgcaggtcctcagttacatgggtctacaaaatctcaaagcggaggcagaccagtctctcgaaccaggcagggaccataaggcaaatgagaagaatctatcaggctgcaggaaacacgagatttcatgaagcagtattcagtcatcaagtgatgcagagcttgtatagaagatcgactagaaatcatcttcatgaagagtgattttggcacaagtgaccgaagaacaaaacaccatagcagccaaaaatgacatgagtgttgtttctatctccagttactgtctctttcagcagaaattaacctatcccattggaaaggcaagtttgtacccaaagatgcaacagtgaataatacccaaatcactgctcatgttatctcttaacaatgatcagttcaatcatataggatttgatgagctcacacatacacaaaaagcagcaaatcatcagtgacaatatcactggcttcagaatacttcagcctgtgttcatttctggagagttgtactcagttttaagtcattttgctgttgaaaatctgacctcatcaaatagatgtcattcctaaaactctctttagatgtcctaccctatcagcagattaaaatggaaggggtgtgtaactaaaaacataaatgttaagcattagtataaagtaacttctgtaataaattatatcgcatattttttcagataggacagctcaaccttacgatgcctacctgatgccaggtgatgcttattttcttcctaaagtaggttactggtcatatcttttttccaaatattaaatgcaccttgccagatattctcctgcagctctaaggaaaggaaatcaatttaaaaataatttgtagaatctactattgagccaccaaagtataattccctaaaagtttaagaaaccctggcaattaattcagcataaacatatcctataaacagcaggagaggttcagctttctgattttactgtggaccttttcctaagggcattcatgaatgcagcaacagttttaactatggcttacatttattttaaatttcactaaatacaaatcttgattgtcatgccagttttagatcttattaattttcagaatggataaattcaaataatcataaattacggtaactttttattataccaaggtgttctaatgccatcatatgaagacagatgcttcaaacaacctgcattaaattatatttttaataaaattaaaatctatttttaacctatttgtagtcacaaaccgaaaacgtgtcgtctttaccttagagctaaaggcttactttatgcatacggtatatttaatagtctacaaatcaaagatttaaacagtcccttaaaaattccatatattctcataccaactcatctacatagaaatgaaaatctctattgttctcacaaaccattaccatgagttcactataacaactggatcaatatggcttgcctttcaaagttaaagaatcagaaaggggcctgtaagaagtcatttagcccaattccctcaccctgtgtgttttccctcaaagccagtgcaatttttttttaaccaaaaaactggacatgtttaatacatacagtttgacaaatttggatttcactctttgttttgatgtagtaactcttttataaaagggaacagattcagacaagctcagtggcccaactgaagacattcagcaattaatggcaggacttcagtaatcagtggcaggactacaacatacatctcttcatgctagggaaaccaggctctctattataaagctgaccagggctattgttttccccttttctctcatcctaaacaccattcatatttttcctaggtcacattttagtgggatcatttacaaagcccccagaacttaatcatcatgttttaccttttttattgaattatatacacctcttacaaaaatgcttgaagtaatttaacacctgtacatcagtacaaaacctggctgagtaaaatgaagagaggatctattcaagatcattaagaccaaatgtaaactgggaagtatgtggaagatagctgtccagcaagtgtctggaaggtgttctagctgggtagagagcctattctaacagacacgcacatcgcagaaagcagcatgaacagaaccacatcctagataagagttctgtgtacagaagatccatggaggcaagtgctgtcaggaaggacactgcctccctccaccctcccaaatgtcaccaccaagttccttcaggtgagacctcacacaatgtcaagtgctttctaggaaatactaagatcaggttgagagattctgcttggtctagtcaatctgaaaaattcaggctggaaagacaccttttctcaagagctgaattgacttttgccttcaaatcctgcctgcaccttgcctacgatggcatcaatttacacctaaggacctttgaagagaaaaattccattatttcttttctttcttgagagcagattttttccctcctcctttggaagatttgcagtactttgcttccatctgagccagaaaattgtccatttccttttgccgatccttttgtctgctctgtttgagaagttaaaacacaagctttcacaacattatccatagacagaaagtacctagtggttgccaggggctggaaaagtggaataactactaatgggtatggagtttttttggaatggtgaaaatgtcctacaattggtgttaataattgtaaaactttgtaaatacacttaaaaccaccaaattgtacactttaaaaggacaaatagaaggtatgcggttatgtcttaaaagaagaaaacaaaatacaacattccaaagaaaatattagcagtaggaatcagatcattaaagatgtggcaacaaactgccaagtttacctgaatggctgccttcaggctatccacgccttcatcaagccccaactcctttctgctcatttctgcttctttggcctcttcctgagcctganacaggaactcacatgagactcagggccaccaggaaatgcttaaaatacatactctttcccaaaagcaaatctataattctgtttcaattttatgaatatatgaatagacaaaatgaatcgaattacataactatgtcattcattaaatggcaacaatgctgacagcaagcagtagatcctctgattccaattaccatttgttttttacccaattctatttgctagaggtagtaagtactctggcactcataaatcacatgatgataaaaaggaacatgaggccgggtatggtggctcacaactgtaatccccataccttgggaggccaaggtgggaggatcacttgaactcaggagttcaagacctgcctgggtaacatagtgagacctcagttctataaaaaagaaaagaaatgagcctggtgtggtggcatgtgcttgtagtcccagctactagggaggctgaggtgggaagatggcttcagtctgagagttcaggctgcaataagctgtgatcatgcctctgcactccagcctgggtgatggagatgccatctcttagaaaaaagagaaaaaaaaaaaaaaaaggcaaatgatgcaattgccaggatacaggtatttccaatttctctcctggaaacccaatttactccatgggactggtggtgccttgtgaacaaccccagtttaaaatgacttctccccagtagtcagaagaaccaacatcaataaactcagttttaacatct

SEQ ID NO: 292311 - DNA, 4548 bp, Homo sapiens
  misc_feature (3800)..(3800): n is a, c, g, or t
aaaaattaaagcatggggaaaaagtataaataaccaaattggaaatattaacttttggcaaagttggaaaaccaaacaggtatcttctccaaccgatcaagagtactgtcttctttcaacacgtaatgagtctctgtcaagcaagcagacatcagccaaatgtgaatgatctcttggttcatggaatgcctctacagccaagaaatctctccctaatggacaagctcctagatcttgatgacaagctacttatgaggcctgggtccagtaccatcctttcaactcgaaattggccaaatcgagctgtggagtttagtacatcatctctgtcatacacagtgcagtccaccaggagacgcaatccaccaccacgaactcttcatccgatcagcacgagccattcatgtgctgaaacaccaagatctgtggaagaaatcctcagaggagcccgagtgtaggtttcaaaagcagaacttctggaaaccgtgcccagtggcacccgactcgctctcctctccctcaccgacgcccctgagtcgaaataatctgctaccacctattggcacagctgaagtggaacatgtgagcactgtggggccacaaagacagatgaaaccccatggcgactctagtcgagctcaaagtgcggtggtggatgaacctaactatcagcagccacaagaaaggctccttttgcccgactttttccccaggcccaacacaactcaatcatttttgctggatacacagtatcgtcgctcatgtgcagttgagtatcctcatcaggcccgacctggcaggggatctgcaggtcctcagttacatgggtctacaaaatctcaaagcggaggcagaccagtctctcgaaccaggcagggaccataaggcaaatgagaagaatctatcaggctgcaggaaacacgagatttcatgaagcagtattcagtcatcaagtgatgcagagcttgtatagaagatcgactagaaatcatcttcatgaagagtgattttggcacaagtgaccgaagaacaaaacaccatagcagccaaaaatgacatgagtgttgtttctatctccagttactgtctctttcagcagaaattaacctatcccattggaaaggcaagtttgtacccaaagatgcaacagtgaataatacccaaatcactgctcatgttatctcttaacaatgatcagttcaatcatataggatttgatgagctcacacatacacaaaaagcagcaaatcatcagtgacaatatcactggcttcagaatacttcagcctgtgttcatttctggagagttgtactcagttttaagtcattttgctgttgaaaatctgacctcatcaaatagatgtcattcctaaaactctctttagatgtcctaccctatcagcagattaaaatggaaggggtgtgtaactaaaaacataaatgttaagcattagtataaagtaacttctgtaataaattatatcgcatattttttcagataggacagctcaaccttacgatgcctacctgatgccaggtgatgcttattttcttcctaaagtaggttactggtcatatcttttttccaaatattaaatgcaccttgccagatattctcctgcagctctaaggaaaggaaatcaatttaaaaataatttgtagaatctactattgagccaccaaagtataattccctaaaagtttaagaaaccctggcaattaattcagcataaacatatcctataaacagcaggagaggttcagctttctgattttactgtggaccttttcctaagggcattcatgaatgcagcaacagttttaactatggcttacatttattttaaatttcactaaatacaaatcttgattgtcatgccagttttagatcttattaattttcagaatggataaattcaaataatcataaattacggtaactttttattataccaaggtgttctaatgccatcatatgaagacagatgcttcaaacaacctgcattaaattatatttttaataaaattaaaatctatttttaacctatttgtagtcacaaaccgaaaacgtgtcgtctttaccttagagctaaaggcttactttatgcatacggtatatttaatagtctacaaatcaaagatttaaacagtcccttaaaaattccatatattctcataccaactcatctacatagaaatgaaaatctctattgttctcacaaaccattaccatgagttcactataacaactggatcaatatggcttgcctttcaaagttaaagaatcagaaaggggcctgtaagaagtcatttagcccaattccctcaccctgtgtgttttccctcaaagccagtgcaatttttttttaaccaaaaaactggacatgtttaatacatacagtttgacaaatttggatttcactctttgttttgatgtagtaactcttttataaaagggaacagattcagacaagctcagtggcccaactgaagacattcagcaattaatggcaggacttcagtaatcagtggcaggactacaacatacatctcttcatgctagggaaaccaggctctctattataaagctgaccagggctattgttttccccttttctctcatcctaaacaccattcatatttttcctaggtcacattttagtgggatcatttacaaagcccccagaacttaatcatcatgttttaccttttttattgaattatatacacctcttacaaaaatgcttgaagtaatttaacacctgtacatcagtacaaaacctggctgagtaaaatgaagagaggatctattcaagatcattaagaccaaatgtaaactgggaagtatgtggaagatagctgtccagcaagtgtctggaaggtgttctagctgggtagagagcctattctaacagacacgcacatcgcagaaagcagcatgaacagaaccacatcctagataagagttctgtgtacagaagatccatggaggcaagtgctgtcaggaaggacactgcctccctccaccctcccaaatgtcaccaccaagttccttcaggtgagacctcacacaatgtcaagtgctttctaggaaatactaagatcaggttgagagattctgcttggtctagtcaatctgaaaaattcaggctggaaagacaccttttctcaagagctgaattgacttttgccttcaaatcctgcctgcaccttgcctacgatggcatcaatttacacctaaggacctttgaagagaaaaattccattatttcttttctttcttgagagcagattttttccctcctcctttggaagatttgcagtactttgcttccatctgagccagaaaattgtccatttccttttgccgatccttttgtctgctctgtttgagaagttaaaacacaagctttcacaacattatccatagacagaaagtacctagtggttgccaggggctggaaaagtggaataactactaatgggtatggagtttttttggaatggtgaaaatgtcctacaattggtgttaataattgtaaaactttgtaaatacacttaaaaccaccaaattgtacactttaaaaggacaaatagaaggtatgcggttatgtcttaaaagaagaaaacaaaatacaacattccaaagaaaatattagcagtaggaatcagatcattaaagatgtggcaacaaactgccaagtttacctgaatggctgccttcaggctatccacgccttcatcaagccccaactcctttctgctcatttctgcttctttggcctcttcctgagcctganacaggaactcacatgagactcagggccaccaggaaatgcttaaaatacatactctttcccaaaagcaaatctataattctgtttcaattttatgaatatatgaatagacaaaatgaatcgaattacataactatgtcattcattaaatggcaacaatgctgacagcaagcagtagatcctctgattccaattaccatttgttttttacccaattctatttgctagaggtagtaagtactctggcactcataaatcacatgatgataaaaaggaacatgaggccgggtatggtggctcacaactgtaatccccataccttgggaggccaaggtgggaggatcacttgaactcaggagttcaagacctgcctgggtaacatagtgagacctcagttctataaaaaagaaaagaaatgagcctggtgtggtggcatgtgcttgtagtcccagctactagggaggctgaggtgggaagatggcttcagtctgagagttcaggctgcaataagctgtgatcatgcctctgcactccagcctgggtgatggagatgccatctcttagaaaaaagagaaaaaaaaaaaaaaaaggcaaatgatgcaattgccaggatacaggtatttccaatttctctcctggaaacccaatttactccatgggactggtggtgccttgtgaacaaccccagtttaaaatgacttctccccagtagtcagaagaaccaacatcaataaactcagttttaacatct

SEQ ID NO: 292312 - DNA, 4831 bp, Homo sapiens
  misc_feature (4083)..(4083): n is a, c, g, or t
cttcattcactacacactctgagcctcatcatgcaaaaatacctaggagccaattttaaacatagaattcttttagctgttgattcacaaaatgtcttaggatgattaatttctaaaaatatcctcaaaggtatgagataataaggccacagcagtgttttcaatgcggcttccaagttaagcattattatgtggatgtagctatatctataccaacagagctataaatgcattcatttggggatgagtagtcttgatgtataattaatctctcattccttctgacagtactttttttcaaagttgaaaatgtcttaaggataaggaatactgcaagctgctccagatcctactgaagggaatgaaggtttaggaactttacccgagaactatagttattagggaaaacgataaccagaaggtccagaactgtcaagaattccatcatcagctgggaatttacaaatccaaatcagcagagaagtgcaataccagatagggacaaatgttttattccagttctgtgggagagaaaaggccagcttctgttgtgtacccagagtatagagcttcaaaacaaaatcagaaaacactattttaaaaactaattttccaaaaatcctgagatctctacttgaaaacataggtagcctaaagctttctgtgcacattaaactcatctgcttcatttatctgatttctaatcaatttgctggtattgttataacttcatgctttcataccttcgtgtttgttggtgggatctgcagccccagtggcacccgactcgctctcctctccctcaccgacgcccctgagtcgaaataatctgctaccacctattggcacagctgaagtggaacatgtgagcactgtggggccacaaagacagatgaaaccccatggcgactctagtcgagctcaaagtgcggtggtggatgaacctaactatcagcagccacaagaaaggctccttttgcccgactttttccccaggcccaacacaactcaatcatttttgctggatacacagtatcgtcgctcatgtgcagttgagtatcctcatcaggcccgacctggcaggggatctgcaggtcctcagttacatgggtctacaaaatctcaaagcggaggcagaccagtctctcgaaccaggcagggaccataaggcaaatgagaagaatctatcaggctgcaggaaacacgagatttcatgaagcagtattcagtcatcaagtgatgcagagcttgtatagaagatcgactagaaatcatcttcatgaagagtgattttggcacaagtgaccgaagaacaaaacaccatagcagccaaaaatgacatgagtgttgtttctatctccagttactgtctctttcagcagaaattaacctatcccattggaaaggcaagtttgtacccaaagatgcaacagtgaataatacccaaatcactgctcatgttatctcttaacaatgatcagttcaatcatataggatttgatgagctcacacatacacaaaaagcagcaaatcatcagtgacaatatcactggcttcagaatacttcagcctgtgttcatttctggagagttgtactcagttttaagtcattttgctgttgaaaatctgacctcatcaaatagatgtcattcctaaaactctctttagatgtcctaccctatcagcagattaaaatggaaggggtgtgtaactaaaaacataaatgttaagcattagtataaagtaacttctgtaataaattatatcgcatattttttcagataggacagctcaaccttacgatgcctacctgatgccaggtgatgcttattttcttcctaaagtaggttactggtcatatcttttttccaaatattaaatgcaccttgccagatattctcctgcagctctaaggaaaggaaatcaatttaaaaataatttgtagaatctactattgagccaccaaagtataattccctaaaagtttaagaaaccctggcaattaattcagcataaacatatcctataaacagcaggagaggttcagctttctgattttactgtggaccttttcctaagggcattcatgaatgcagcaacagttttaactatggcttacatttattttaaatttcactaaatacaaatcttgattgtcatgccagttttagatcttattaattttcagaatggataaattcaaataatcataaattacggtaactttttattataccaaggtgttctaatgccatcatatgaagacagatgcttcaaacaacctgcattaaattatatttttaataaaattaaaatctatttttaacctatttgtagtcacaaaccgaaaacgtgtcgtctttaccttagagctaaaggcttactttatgcatacggtatatttaatagtctacaaatcaaagatttaaacagtcccttaaaaattccatatattctcataccaactcatctacatagaaatgaaaatctctattgttctcacaaaccattaccatgagttcactataacaactggatcaatatggcttgcctttcaaagttaaagaatcagaaaggggcctgtaagaagtcatttagcccaattccctcaccctgtgtgttttccctcaaagccagtgcaatttttttttaaccaaaaaactggacatgtttaatacatacagtttgacaaatttggatttcactctttgttttgatgtagtaactcttttataaaagggaacagattcagacaagctcagtggcccaactgaagacattcagcaattaatggcaggacttcagtaatcagtggcaggactacaacatacatctcttcatgctagggaaaccaggctctctattataaagctgaccagggctattgttttccccttttctctcatcctaaacaccattcatatttttcctaggtcacattttagtgggatcatttacaaagcccccagaacttaatcatcatgttttaccttttttattgaattatatacacctcttacaaaaatgcttgaagtaatttaacacctgtacatcagtacaaaacctggctgagtaaaatgaagagaggatctattcaagatcattaagaccaaatgtaaactgggaagtatgtggaagatagctgtccagcaagtgtctggaaggtgttctagctgggtagagagcctattctaacagacacgcacatcgcagaaagcagcatgaacagaaccacatcctagataagagttctgtgtacagaagatccatggaggcaagtgctgtcaggaaggacactgcctccctccaccctcccaaatgtcaccaccaagttccttcaggtgagacctcacacaatgtcaagtgctttctaggaaatactaagatcaggttgagagattctgcttggtctagtcaatctgaaaaattcaggctggaaagacaccttttctcaagagctgaattgacttttgccttcaaatcctgcctgcaccttgcctacgatggcatcaatttacacctaaggacctttgaagagaaaaattccattatttcttttctttcttgagagcagattttttccctcctcctttggaagatttgcagtactttgcttccatctgagccagaaaattgtccatttccttttgccgatccttttgtctgctctgtttgagaagttaaaacacaagctttcacaacattatccatagacagaaagtacctagtggttgccaggggctggaaaagtggaataactactaatgggtatggagtttttttggaatggtgaaaatgtcctacaattggtgttaataattgtaaaactttgtaaatacacttaaaaccaccaaattgtacactttaaaaggacaaatagaaggtatgcggttatgtcttaaaagaagaaaacaaaatacaacattccaaagaaaatattagcagtaggaatcagatcattaaagatgtggcaacaaactgccaagtttacctgaatggctgccttcaggctatccacgccttcatcaagccccaactcctttctgctcatttctgcttctttggcctcttcctgagcctganacaggaactcacatgagactcagggccaccaggaaatgcttaaaatacatactctttcccaaaagcaaatctataattctgtttcaattttatgaatatatgaatagacaaaatgaatcgaattacataactatgtcattcattaaatggcaacaatgctgacagcaagcagtagatcctctgattccaattaccatttgttttttacccaattctatttgctagaggtagtaagtactctggcactcataaatcacatgatgataaaaaggaacatgaggccgggtatggtggctcacaactgtaatccccataccttgggaggccaaggtgggaggatcacttgaactcaggagttcaagacctgcctgggtaacatagtgagacctcagttctataaaaaagaaaagaaatgagcctggtgtggtggcatgtgcttgtagtcccagctactagggaggctgaggtgggaagatggcttcagtctgagagttcaggctgcaataagctgtgatcatgcctctgcactccagcctgggtgatggagatgccatctcttagaaaaaagagaaaaaaaaaaaaaaaaggcaaatgatgcaattgccaggatacaggtatttccaatttctctcctggaaacccaatttactccatgggactggtggtgccttgtgaacaaccccagtttaaaatgacttctccccagtagtcagaagaaccaacatcaataaactcagttttaacatct

SEQ ID NO: 292313 - DNA, 1855 bp, Homo sapiens
ctaggtgacggggcgagacggggccggtaggtggcgggaggggccgggccggagccggcgggagggccaggcccggaggcccccaccctggcgtgcctgccccggccgcggctgaggaggaggaggaggaggaggaggaggaggatgatctccagatacactcggaaggcggtgccacagagcttggagctgaaaggaataacaaaacatgctcttaaccatcatccccctccagagaagctggaggaaatttcccccaccagtgacagtcatgagaaagacacaagttcccaaagcaagtctgacatcacaagagaatcatcttttacatcagccgacactgggaattcactgtctgcttttccaagttatacaggcgcagggatatctactgaaggaagctcggacttctcctggggatatggaactcgatcaaaatgccactgaaaaagtccagacaatgttcacagccattgatgaactcttgtatgagcagaagttgagtgtgcataccaagagtctacaagaagagtgccaacagtggacagctagctttcctcacctcaggattctaggtaggcagataatcactccaagtgaaggttatagattgtatcctagatccccttctgctgtttccgcttcatatgaaacaaccttgtctcaagaaagagattctactatatttggtataaggggaaagaagttacatttttcatcttcttatgctcataaagcatcttccattgccaaatcctccagcttttgttctatggaaagagatgaggaagactctataatcgtctcagaaggaataattgaggaatacctagcattcgatcacatagatatagaagagggatttcatgggaagaaatcagaagcagctacagagaaacagaaattagggtatcctcccattgctccattttactgcatgaaagaagatgtccttgcttatgtgtttgacagtgtatggtgcaaggttgtgagctgtatggagcagttgacacgtagtcactgggaaggatttgcctctgatgatgagagtaatgttgcagttaccagacccgattcagaaagttcctgtgtgctgagtgaactacatcctttggtgttaccgcgagtgccacagtctaagatgagtctctgtcaagcaagcagacatcagccaaatgtgaatgatctcttggttcatggaatgcctctacagccaagaaatctctccctaatggacaagctcctagatcttgatgacaagctacttatgaggcctgggtccagtaccatcctttcaactcgaaattggccaaatcgagctgtggagtttagtacatcatctctgtcatacacagtgcagtccaccaggagacgcaatccaccaccacgaactcttcatccgatcagcacgagccattcatgtgctgaaacaccaagatctgtggaagaaatcctcagaggagcccgagtcccagtggcacccgactcgctctcctctccctcaccgacgcccctgagtcgaaataatctgctaccacctattggcacagctgaagtggaacatgtgagcactgtggggccacaaagacagatgaaaccccatggcgactctagtcgagctcaaagtgcggtggtggatgaacctaactatcagcagccacaagaaaggctccttttgcccgactttttccccaggcccaacacaactcaatcatttttggtagagtgacgtacttcctagaatggtcttgatagttggggaaagaaaaggtggggggaataatagtttggcagacttaagattttatctagaggcttaacccagaataaaagttgagtttccaacaataaaaag

SEQ ID NO: 292314 - DNA, 1879 bp, Homo sapiens
ctaggtgacggggcgagacggggccggtaggtggcgggaggggccgggccggagccggcgggagggccaggcccggaggcccccaccctggcgtgcctgccccggccgcggctgaggaggaggaggaggaggaggaggaggaggatgatctccagatacactcggaaggcggtgccacagagcttggagctgaaaggaataacaaaacatgctcttaaccatcatccccctccagagaagctggaggaaatttcccccaccagtgacagtcatgagaaagacacaagttcccaaagcaagtctgacatcacaagagaatcatcttttacatcagccgacactgggaattcactgtctgcttttccaagttatacaggcgcagggatatctactgaaggaagctcggacttctcctggggatatggaactcgatcaaaatgccactgaaaaagtccagacaatgttcacagccattgatgaactcttgtatgagcagaagttgagtgtgcataccaagagtctacaagaagagtgccaacagtggacagctagctttcctcacctcaggattctaggtaggcagataatcactccaagtgaaggttatagattgtatcctagatccccttctgctgtttccgcttcatatgaaacaaccttgtctcaagaaagagattctactatatttggtataaggggaaagaagttacatttttcatcttcttatgctcataaagcatcttccattgccaaatcctccagcttttgttctatggaaagagatgaggaagactctataatcgtctcagaaggaataattgaggaatacctagcattcgatcacatagatatagaagagggatttcatgggaagaaatcagaagcagctacagagaaacagaaattagggtatcctcccattgctccattttactgcatgaaagaagatgtccttgcttatgtgtttgacagtgtatggtgcaaggttgtgagctgtatggagcagttgacacgtagtcactgggaaggatttgcctctgatgatgagagtaatgttgcagttaccagacccgattcagaaagttcctgtgtgctgagtgaactacatcctttggtgttaccgcgagtgccacagtctaaggtgctgtacattacctcaaatccgatgagtctctgtcaagcaagcagacatcagccaaatgtgaatgatctcttggttcatggaatgcctctacagccaagaaatctctccctaatggacaagctcctagatcttgatgacaagctacttatgaggcctgggtccagtaccatcctttcaactcgaaattggccaaatcgagctgtggagtttagtacatcatctctgtcatacacagtgcagtccaccaggagacgcaatccaccaccacgaactcttcatccgatcagcacgagccattcatgtgctgaaacaccaagatctgtggaagaaatcctcagaggagcccgagtcccagtggcacccgactcgctctcctctccctcaccgacgcccctgagtcgaaataatctgctaccacctattggcacagctgaagtggaacatgtgagcactgtggggccacaaagacagatgaaaccccatggcgactctagtcgagctcaaagtgcggtggtggatgaacctaactatcagcagccacaagaaaggctccttttgcccgactttttccccaggcccaacacaactcaatcatttttggtagagtgacgtacttcctagaatggtcttgatagttggggaaagaaaaggtggggggaataatagtttggcagacttaagattttatctagaggcttaacccagaataaaagttgagtttccaacaataaaaag

SEQ ID NO: 292315 - DNA, 2075 bp, Homo sapiens
  misc_feature (2065)..(2065): n is a, c, g, or t
  misc_feature (2067)..(2071): n is a, c, g, or t
  misc_feature (2073)..(2073): n is a, c, g, or t
ctaggtgacggggcgagacggggccggtaggtggcgggaggggccgggccggagccggcgggagggccaggcccggaggcccccaccctggcgtgcctgccccggccgcggctgaggaggaggaggaggaggaggaggaggaggatgatctccagatacactcggaaggcggtgccacagagcttggagctgaaaggaataacaaaacatgctcttaaccatcatccccctccagagaagctggaggaaatttcccccaccagtgacagtcatgagaaagacacaagttcccaaagcaagtctgacatcacaagagaatcatcttttacatcagccgacactgggaattcactgtctgcttttccaagttatacaggcgcagggatatctactgaaggaagctcggacttctcctggggatatggaactcgatcaaaatgccactgaaaaagtccagacaatgttcacagccattgatgaactcttgtatgagcagaagttgagtgtgcataccaagagtctacaagaagagtgccaacagtggacagctagctttcctcacctcaggattctaggtaggcagataatcactccaagtgaaggttatagattgtatcctagatccccttctgctgtttccgcttcatatgaaacaaccttgtctcaagaaagagattctactatatttggtataaggggaaagaagttacatttttcatcttcttatgctcataaagcatcttccattgccaaatcctccagcttttgttctatggaaagagatgaggaagactctataatcgtctcagaaggaataattgaggaatacctagcattcgatcacatagatatagaagagggatttcatgggaagaaatcagaagcagctacagagaaacagaaattagggtatcctcccattgctccattttactgcatgaaagaagatgtccttgcttatgtgtttgacagtgtatggtgcaaggttgtgagctgtatggagcagttgacacgtagtcactgggaaggatttgcctctgatgatgagagtaatgttgcagttaccagacccgattcagaaagttcctgtgtgctgagtgaactacatcctttggtgttaccgcgagtgccacagtctaaggtgctgtacattacctcaaatccgatgagtctctgtcaagcaagcagacatcagccaaatgtgaatgatctcttggttcatggaatgcctctacagccaagaaatctctccctaatggacaagctcctagatcttgatgacaagctacttatgaggcctgggtccagtaccatcctttcaactcgaaattggccaaatcgagctgtggagtttagtacatcatctctgtcatacacagtgcagtccaccaggagacgcaatccaccaccacgaactcttcatccgatcagcacgagccattcatgtgctgaaacaccaagatctgtggaagaaatcctcagaggagcccgagtcccagtggcacccgactcgctctcctctccctcaccgacgcccctgagtcgaaataatctgctaccacctattggcacagctgaagtggaacatgtgagcactgtggggccacaaagacagatgaaaccccatggcgactctagtcgagctcaaagtgcggtggtggatgaacctaactatcagcagccacaagaaaggctccttttgcccgactttttccccaggcccaacacaactcaatcatttttggtagagtgacgtacttcctagaatggtcttgatagttggggaaagaaaaggtggggggaataatagtttggcagacttaagattttatctagaggcttaacccagaataaaagttgagtttccaacaataaaaagtgttataaatacattttgttcaaattctaactagtccctgatgcctattctttaatgccttatacagaaatcacaaatattctaagcaatttaacacttaagatatgtctgaccacaagcaagaatattaaatcccagtacacatcagataagcataactttattatgtaatcctgttcttctggntnnnnncnaa

SEQ ID NO: 292316 - DNA, 1942 bp, Homo sapiens
ctaggtgacggggcgagacggggccggtaggtggcgggaggggccgggccggagccggcgggagggccaggcccggaggcccccaccctggcgtgcctgccccggccgcggctgaggaggaggaggaggaggaggaggaggaggatgatctccagatacactcggaaggcggtgccacagagcttggagctgaaaggaataacaaaacatgctcttaaccatcatccccctccagagaagctggaggaaatttcccccaccagtgacagtcatgagaaagacacaagttcccaaagcaagtctgacatcacaagagaatcatcttttacatcagccgacactgggaattcactgtctgcttttccaagttatacaggcgcagggatatctactgaaggaagctcggacttctcctggggatatggaactcgatcaaaatgccactgaaaaagtccagacaatgttcacagccattgatgaactcttgtatgagcagaagttgagtgtgcataccaagagtctacaagaagagtgccaacagtggacagctagctttcctcacctcaggattctaggtaggcagataatcactccaagtgaaggttatagattgtatcctagatccccttctgctgtttccgcttcatatgaaacaaccttgtctcaagaaagagattctactatatttggtataaggggaaagaagttacatttttcatcttcttatgctcataaagcatcttccattgccaaatcctccagcttttgttctatggaaagagatgaggaagactctataatcgtctcagaaggaataattgaggaatacctagcattcgatcacatagatatagaagagggatttcatgggaagaaatcagaagcagctacagagaaacagaaattagggtatcctcccattgctccattttactgcatgaaagaagatgtccttgcttatgtgtttgacagtgtatggtgcaaggttgtgagctgtatggagcagttgacacgtagtcactgggaaggatttgcctctgatgatgagagtaatgttgcagttaccagacccgattcagaaagttcctgtgtgctgagtgaactacatcctttggtgttaccgcgagtgccacagtctaaggtgctgtacattacctcaaatccgatgagtctctgtcaagcaagcagacatcagccaaatgtgaatgatctcttggttcatggaatgcctctacagccaagaaatctctccctaatggacaagctcctagatcttgatgacaagctacttatgaggcctgggtccagtaccatcctttcaactcgaaattggccaaatcgagctgtggagtttagtacatcatctctgtcatacacagtgcagtccaccaggagacgcaatccaccaccacgaactcttcatccgatcagcacgagccattcatgtgctgaaacaccaagatctgtggaagaaatcctcagaggagcccgagtcccagtggcacccgactcgctctcctctccctcaccgacgcccctgagtcgaaataatctgctaccacctattggcacagctgaagtggaacatgtgagcactgtggggccacaaagacagatgaaaccccatggcgactctagtcgagctcaaagtgcggtggtggatgaacctaactatcagcagccacaagaaaggctccttttgcccgactttttccccaggcccaacacaactcaatcatttttggtagagtgacgtacttcctagaatggtcttgatagttggggaaagaaaaggtggggggaataatagtttggcagacttaagattttatctagaggcttaacccagaataaaagttgagtttccaacaataaaaagatagatgtaaatgaaaaaactcgagggggggcccgggacccaattcaccctataatgaattgg

SEQ ID NO: 292317 - DNA, 1932 bp, Homo sapiens
ctaggtgacggggcgagacggggccggtaggtggcgggaggggccgggccggagccggcgggagggccaggcccggaggcccccaccctggcgtgcctgccccggccgcggctgaggaggaggaggaggaggaggaggaggaggatgatctccagatacactcggaaggcggtgccacagagcttggagctgaaaggaataacaaaacatgctcttaaccatcatccccctccagagaagctggaggaaatttcccccaccagtgacagtcatgagaaagacacaagttcccaaagcaagtctgacatcacaagagaatcatcttttacatcagccgacactgggaattcactgtctgcttttccaagttatacaggcgcagggatatctactgaaggaagctcggacttctcctggggatatggaactcgatcaaaatgccactgaaaaagtccagacaatgttcacagccattgatgaactcttgtatgagcagaagttgagtgtgcataccaagagtctacaagaagagtgccaacagtggacagctagctttcctcacctcaggattctaggtaggcagataatcactccaagtgaaggttatagattgtatcctagatccccttctgctgtttccgcttcatatgaaacaaccttgtctcaagaaagagattctactatatttggtataaggggaaagaagttacatttttcatcttcttatgctcataaagcatcttccattgccaaatcctccagcttttgttctatggaaagagatgaggaagactctataatcgtctcagaaggaataattgaggaatacctagcattcgatcacatagatatagaagagggatttcatgggaagaaatcagaagcagctacagagaaacagaaattagggtatcctcccattgctccattttactgcatgaaagaagatgtccttgcttatgtgtttgacagtgtatggtgcaaggttgtgagctgtatggagcagttgacacgtagtcactgggaaggatttgcctctgatgatgagagtaatgttgcagttaccagacccgattcagaaagttcctgtgtgctgagtgaactacatcctttggtgttaccgcgagtgccacagtctaaggtgctgtacattacctcaaatccgatgagtctctgtcaagcaagcagacatcagccaaatgtgaatgatctcttggttcatggaatgcctctacagccaagaaatctctccctaatggacaagctcctagatcttgatgacaagctacttatgaggcctgggtccagtaccatcctttcaactcgaaattggccaaatcgagctgtggagtttagtacatcatctctgtcatacacagtgcagtccaccaggagacgcaatccaccaccacgaactcttcatccgatcagcacgagccattcatgtgctgaaacaccaagatctgtggaagaaatcctcagaggagcccgagtcccagtggcacccgactcgctctcctctccctcaccgacgcccctgagtcgaaataatctgctaccacctattggcacagctgaagtggaacatgtgagcactgtggggccacaaagacagatgaaaccccatggcgactctagtcgagctcaaagtgcggtggtggatgaacctaactatcagcagccacaagaaaggctccttttgcccgactttttccccaggcccaacacaactcaatcatttttggtagagtgacgtacttcctagaatggtcttgatagttggggaaagaaaaggtggggggaataatagtttggcagacttaagattttatctagaggcttaacccagaataaaagttgagtttccaacaataaaaagatgcggccgtcgccaccacttaaacaaacaaatcataaaaaaaaaggactctt

SEQ ID NO: 292318 - DNA, 1913 bp, Homo sapiens
ctaggtgacggggcgagacggggccggtaggtggcgggaggggccgggccggagccggcgggagggccaggcccggaggcccccaccctggcgtgcctgccccggccgcggctgaggaggaggaggaggaggaggaggaggaggatgatctccagatacactcggaaggcggtgccacagagcttggagctgaaaggaataacaaaacatgctcttaaccatcatccccctccagagaagctggaggaaatttcccccaccagtgacagtcatgagaaagacacaagttcccaaagcaagtctgacatcacaagagaatcatcttttacatcagccgacactgggaattcactgtctgcttttccaagttatacaggcgcagggatatctactgaaggaagctcggacttctcctggggatatggaactcgatcaaaatgccactgaaaaagtccagacaatgttcacagccattgatgaactcttgtatgagcagaagttgagtgtgcataccaagagtctacaagaagagtgccaacagtggacagctagctttcctcacctcaggattctaggtaggcagataatcactccaagtgaaggttatagattgtatcctagatccccttctgctgtttccgcttcatatgaaacaaccttgtctcaagaaagagattctactatatttggtataaggggaaagaagttacatttttcatcttcttatgctcataaagcatcttccattgccaaatcctccagcttttgttctatggaaagagatgaggaagactctataatcgtctcagaaggaataattgaggaatacctagcattcgatcacatagatatagaagagggatttcatgggaagaaatcagaagcagctacagagaaacagaaattagggtatcctcccattgctccattttactgcatgaaagaagatgtccttgcttatgtgtttgacagtgtatggtgcaaggttgtgagctgtatggagcagttgacacgtagtcactgggaaggatttgcctctgatgatgagagtaatgttgcagttaccagacccgattcagaaagttcctgtgtgctgagtgaactacatcctttggtgttaccgcgagtgccacagtctaaggtgctgtacattacctcaaatccgatgagtctctgtcaagcaagcagacatcagccaaatgtgaatgatctcttggttcatggaatgcctctacagccaagaaatctctccctaatggacaagctcctagatcttgatgacaagctacttatgaggcctgggtccagtaccatcctttcaactcgaaattggccaaatcgagctgtggagtttagtacatcatctctgtcatacacagtgcagtccaccaggagacgcaatccaccaccacgaactcttcatccgatcagcacgagccattcatgtgctgaaacaccaagatctgtggaagaaatcctcagaggagcccgagtgtaggtttcaaaagcagaacttctggaaaccgtgcccagtggcacccgactcgctctcctctccctcaccgacgcccctgagtcgaaataatctgctaccacctattggcacagctgaagtggaacatgtgagcactgtggggccacaaagacagatgaaaccccatggcgactctagtcgagctcaaagtgcggtggtggatgaacctaactatcagcagccacaagaaaggctccttttgcccgactttttccccaggcccaacacaactcaatcatttttggtagagtgacgtacttcctagaatggtcttgatagttggggaaagaaaaggtggggggaataatagtttggcagacttaagattttatctagaggcttaacccagaataaaagttgagtttccaacaataaaaag

SEQ ID NO: 292319 - DNA, 2327 bp, Homo sapiens
  misc_feature (2317)..(2317): n is a, c, g, or t
  misc_feature (2319)..(2323): n is a, c, g, or t
  misc_feature (2325)..(2325): n is a, c, g, or t
ctaggtgacggggcgagacggggccggtaggtggcgggaggggccgggccggagccggcgggagggccaggcccggaggcccccaccctggcgtgcctgccccggccgcggctgaggaggaggaggaggaggaggaggaggaggatgatctccagatacactcggaaggcggtgccacagagcttggagctgaaaggaataacaaaacatgctcttaaccatcatccccctccagagaagctggaggaaatttcccccaccagtgacagtcatgagaaagacacaagttcccaaagcaagtctgacatcacaagagaatcatcttttacatcagccgacactgggaattcactgtctgcttttccaagttatacaggcgcagggatatctactgaaggaagctcggacttctcctggggatatggaactcgatcaaaatgccactgaaaaagtccagacaatgttcacagccattgatgaactcttgtatgagcagaagttgagtgtgcataccaagagtctacaagaagagtgccaacagtggacagctagctttcctcacctcaggattctaggtaggcagataatcactccaagtgaaggttatagattgtatcctagatccccttctgctgtttccgcttcatatgaaacaaccttgtctcaagaaagagattctactatatttggtataaggggaaagaagttacatttttcatcttcttatgctcataaagcatcttccattgccaaatcctccagcttttgttctatggaaagagatgaggaagactctataatcgtctcagaaggaataattgaggaatacctagcattcgatcacatagatatagaagagggatttcatgggaagaaatcagaagcagctacagagaaacagaaattagggtatcctcccattgctccattttactgcatgaaagaagatgtccttgcttatgtgtttgacagtgtatggtgcaaggttgtgagctgtatggagcagttgacacgtagtcactgggaaggatttgcctctgatgatgagagtaatgttgcagttaccagacccgattcagaaagttcctgtgtgctgagtgaactacatcctttggtgttaccgcgagtgccacagtctaaggtgctgtacattacctcaaatccgatgagtctctgtcaagcaagcagacatcagccaaatgtgaatgatctcttggttcatggaatgcctctacagccaagaaatctctccctaatggacaagctcctagatcttgatgacaagctacttatgaggcctgggtccagtaccatcctttcaactcgaaattggccaaatcgagctgtggagtttagtacatcatctctgtcatacacagtgcagtccaccaggagacgcaatccaccaccacgaactcttcatccgatcagcacgagccattcatgtgctgaaacaccaagatctgtggaagaaatcctcagaggagcccgagtcccagtggcacccgactcgctctcctctccctcaccgacgcccctgagtcgaaataatctgctaccacctattggcacagctgaagtggaacatgtgagcactgtggggccacaaagacagatggtatgtttctttcatattgcctctccatgtacttaccatacaacctaatgggcagtaattctgcaggatctgtgccctgatcttgatttatactgtgttttgtcaaaagtacaaacacagtgctaatttatgacgtggaattggagctgtttggcctgcacttaccatatctgccatggtcgatagggttttaactacataccacattacagatagttttcactgtttctgtaacttttgtctcctctgcagaaaccccatggcgactctagtcgagctcaaagtgcggtggtggatgaacctaactatcagcagccacaagaaaggctccttttgcccgactttttccccaggcccaacacaactcaatcatttttggtagagtgacgtacttcctagaatggtcttgatagttggggaaagaaaaggtggggggaataatagtttggcagacttaagattttatctagaggcttaacccagaataaaagttgagtttccaacaataaaaagtgttataaatacattttgttcaaattctaactagtccctgatgcctattctttaatgccttatacagaaatcacaaatattctaagcaatttaacacttaagatatgtctgaccacaagcaagaatattaaatcccagtacacatcagataagcataactttattatgtaatcctgttcttctggntnnnnncnaa

SEQ ID NO: 292320 - DNA, 1604 bp, Homo sapiens
  misc_feature (1594)..(1594): n is a, c, g, or t
  misc_feature (1596)..(1600): n is a, c, g, or t
  misc_feature (1602)..(1602): n is a, c, g, or t
cttcattcactacacactctgagcctcatcatgcaaaaatacctaggagccaattttaaacatagaattcttttagctgttgattcacaaaatgtcttaggatgattaatttctaaaaatatcctcaaaggtatgagataataaggccacagcagtgttttcaatgcggcttccaagttaagcattattatgtggatgtagctatatctataccaacagagctataaatgcattcatttggggatgagtagtcttgatgtataattaatctctcattccttctgacagtactttttttcaaagttgaaaatgtcttaaggataaggaatactgcaagctgctccagatcctactgaagggaatgaaggtttaggaactttacccgagaactatagttattagggaaaacgataaccagaaggtccagaactgtcaagaattccatcatcagctgggaatttacaaatccaaatcagcagagaagtgcaataccagatagggacaaatgttttattccagttctgtgggagagaaaaggccagcttctgttgtgtacccagagtatagagcttcaaaacaaaatcagaaaacactattttaaaaactaattttccaaaaatcctgagatctctacttgaaaacataggtagcctaaagctttctgtgcacattaaactcatctgcttcatttatctgatttctaatcaatttgctggtattgttataacttcatgctttcataccttcgtgtttgttggtgggatctgcagccccagtggcacccgactcgctctcctctccctcaccgacgcccctgagtcgaaataatctgctaccacctattggcacagctgaagtggaacatgtgagcactgtggggccacaaagacagatggtatgtttctttcatattgcctctccatgtacttaccatacaacctaatgggcagtaattctgcaggatctgtgccctgatcttgatttatactgtgttttgtcaaaagtacaaacacagtgctaatttatgacgtggaattggagctgtttggcctgcacttaccatatctgccatggtcgatagggttttaactacataccacattacagatagttttcactgtttctgtaacttttgtctcctctgcagaaaccccatggcgactctagtcgagctcaaagtgcggtggtggatgaacctaactatcagcagccacaagaaaggctccttttgcccgactttttccccaggcccaacacaactcaatcatttttggtagagtgacgtacttcctagaatggtcttgatagttggggaaagaaaaggtggggggaataatagtttggcagacttaagattttatctagaggcttaacccagaataaaagttgagtttccaacaataaaaagtgttataaatacattttgttcaaattctaactagtccctgatgcctattctttaatgccttatacagaaatcacaaatattctaagcaatttaacacttaagatatgtctgaccacaagcaagaatattaaatcccagtacacatcagataagcataactttattatgtaatcctgttcttctggntnnnnncnaa

SEQ ID NO: 292321 - DNA, 2002 bp, Homo sapiens
  misc_feature (1992)..(1992): n is a, c, g, or t
  misc_feature (1994)..(1998): n is a, c, g, or t
  misc_feature (2000)..(2000): n is a, c, g, or t
ctaggtgacggggcgagacggggccggtaggtggcgggaggggccgggccggagccggcgggagggccaggcccggaggcccccaccctggcgtgcctgccccggccgcggctgaggaggaggaggaggaggaggaggaggaggatgatctccagatacactcggaaggcggtgccacagagcttggagctgaaaggaataacaaaacatgctcttaaccatcatccccctccagagaagctggaggaaatttcccccaccagtgacagtcatgagaaagacacaagttcccaaagcaagtctgacatcacaagagaatcatcttttacatcagccgacactgggaattcactgtctgcttttccaagttatacaggcgcagggatatctactgaaggaagctcggacttctcctggggatatggaactcgatcaaaatgccactgaaaaagtccagacaatgttcacagccattgatgaactcttgtatgagcagaagttgagtgtgcataccaagagtctacaagaagagtgccaacagtggacagctagctttcctcacctcaggattctaggtaggcagataatcactccaagtgaaggttatagattgtatcctagatccccttctgctgtttccgcttcatatgaaacaaccttgtctcaagaaagagattctactatatttggtataaggggaaagaagttacatttttcatcttcttatgctcataaagcatcttccattgccaaatcctccagcttttgttctatggaaagagatgaggaagactctataatcgtctcagaaggaataattgaggaatacctagcattcgatcacatagatatagaagagggatttcatgggaagaaatcagaagcagctacagagaaacagaaattagggtatcctcccattgctccattttactgcatgaaagaagatgtccttgcttatgtgtttgacagtgtatggtgcaaggttgtgagctgtatggagcagttgacacgtagtcactgggaaggatttgcctctgatgatgagagtaatgttgcagttaccagacccgattcagaaagttcctgtgtgctgagtgaactacatcctttggtgttaccgcgagtgccacagtctaaggtgctgtacattacctcaaatccgatgagtctctgtcaagcaagcagacatcagccaaatgtgaatgatctcttggttcatggaatgcctctacagccaagaaatctctccctaatggacaagctcctagatcttgatgacaagctacttatgaggcctgggtccagtaccatcctttcaactcgaaattggccaaatcgagctgtggagtttagtacatcatctctgtcatacacagtgcagtccaccaggagacgcaatccaccaccacgaactcttccccagtggcacccgactcgctctcctctccctcaccgacgcccctgagtcgaaataatctgctaccacctattggcacagctgaagtggaacatgtgagcactgtggggccacaaagacagatgaaaccccatggcgactctagtcgagctcaaagtgcggtggtggatgaacctaactatcagcagccacaagaaaggctccttttgcccgactttttccccaggcccaacacaactcaatcatttttggtagagtgacgtacttcctagaatggtcttgatagttggggaaagaaaaggtggggggaataatagtttggcagacttaagattttatctagaggcttaacccagaataaaagttgagtttccaacaataaaaagtgttataaatacattttgttcaaattctaactagtccctgatgcctattctttaatgccttatacagaaatcacaaatattctaagcaatttaacacttaagatatgtctgaccacaagcaagaatattaaatcccagtacacatcagataagcataactttattatgtaatcctgttcttctggntnnnnncnaa

SEQ ID NO: 292322 - DNA, 1746 bp, Homo sapiens
  misc_feature (1736)..(1736): n is a, c, g, or t
  misc_feature (1738)..(1742): n is a, c, g, or t
  misc_feature (1744)..(1744): n is a, c, g, or t
ctaggtgacggggcgagacggggccggtaggtggcgggaggggccgggccggagccggcgggagggccaggcccggaggcccccaccctggcgtgcctgccccggccgcggctgaggaggaggaggaggaggaggaggaggaggatgatctccagatacactcggaaggcggtgccacagagcttggagctgaaaggaataacaaaacatgctcttaaccatcatccccctccagagaagctggaggaaatttcccccaccagtgacagtcatgagaaagacacaagttcccaaagcaagtctgacatcacaagagaatcatcttttacatcagccgacactgggaattcactgtctgcttttccaagttatacaggcgcagggatatctactgaaggaagctcggacttctcctggggatatggaactcgatcaaaatgccactgaaaaagtccagacaatgttcacagccattgatgaactcttgtatgagcagaagttgagtgtgcataccaagagtctacaagaagagtgccaacagtggacagctagctttcctcacctcaggattctaggtaggcagataatcactccaagtgaaggttatagattgtatcctagatccccttctgctgtttccgcttcatatgaaacaaccttgtctcaagaaagagattctactatatttggtataaggggaaagaagttacatttttcatcttcttatgctcataaagcatcttccattgccaaatcctccagcttttgttctatggaaagagatgaggaagactctataatcgtctcagaaggaataattgaggaatacctagcattcgatcacatagatatagaagagggatttcatgggaagaaatcagaagcagctacagagaaacagaaattagggtatcctcccattgctccattttactgcatgaaagaagatgtccttgcttatgtgtttgacagtgtatggtgcaaggttgtgagctgtatggagcagttgacacgtagtcactgggaaggatttgcctctgatgatgagagtaatgttgcagttaccagacccgattcagaaagttcctgtgtgctgagtgaactacatcctttggtgttaccgcgagtgccacagtctaaggtgctgtacattacctcaaatccgcccagtggcacccgactcgctctcctctccctcaccgacgcccctgagtcgaaataatctgctaccacctattggcacagctgaagtggaacatgtgagcactgtggggccacaaagacagatgaaaccccatggcgactctagtcgagctcaaagtgcggtggtggatgaacctaactatcagcagccacaagaaaggctccttttgcccgactttttccccaggcccaacacaactcaatcatttttggtagagtgacgtacttcctagaatggtcttgatagttggggaaagaaaaggtggggggaataatagtttggcagacttaagattttatctagaggcttaacccagaataaaagttgagtttccaacaataaaaagtgttataaatacattttgttcaaattctaactagtccctgatgcctattctttaatgccttatacagaaatcacaaatattctaagcaatttaacacttaagatatgtctgaccacaagcaagaatattaaatcccagtacacatcagataagcataactttattatgtaatcctgttcttctggntnnnnncnaa

SEQ ID NO: 292323 - DNA, 460 bp, Homo sapiens
ccattgcatttttttcccattgtatttcctgctgagccatgttcactcacgtatcactcatgtgcacacagccctagggccagctaaatataagccaggcttctatacataataccactgagctagaactggaagcagattcttttggttttccaaagattgcctccttccctttcacttctcctgtgtcaaattacttctattttctatttattacttctatttggcctttgtcaaattaattctattttccatttttcctcaaatcaaagtgaattttcaggtaatacacagacaattttagaaaggcagccttcccttcagcatcatgaagtctttccttcttgcttctgttacagagaagagggatttcatgggaagaaatcagaagcagctacagagaaacagaaattagggtatcctcccattgctccattttactgcatgaaagaagatgtcc

SEQ ID NO: 292324 - DNA, 364 bp, Homo sapiens
aacagctgggctataggtttatcttttccatctccattctatggaagagatatacctgtagtaaggctctggattcacattttctcattcttaatcagtatcagactgtatactggacttttatgttgagccatcaaatgtgtccaaaatatatctagattttgtatgtatgccagtgaaggtacttaattgtgtctgtgtttcttcattttgaaggattctaggtaggcagataatcactccaagtgaaggttatagattgtatcctagatccccttctgctgtttccgcttcatatgaaacaaccttgtctcaagaaagagattctactatgtgagtattccattatgtaagtacttcaatg

SEQ ID NO: 292325 - DNA, 196 bp, Homo sapiens
acgcttatgatctgtggaggggacaaatcaagcacatgtgaatgcaacacactcaaaaacatgcccgcacgaagggtgatctgtgtgcatgttgtgtgtctgtatagtgttgtgggcattgtgtgcctacatcatgttgtatgcctataccgccttgttgtacacctatggctcagcctcctgttggagactgagg

SEQ ID NO: 292326 - DNA, 964 bp, Homo sapiens
aggcgcggcccggcggacgtgggcaggagggctggaaaagccggcgctggagcgggaacgggagtagctgcctgggcgccaaaggccgcggcactcccacgcggaccccgaagtccgcaacccggggatgggcccgcggctgcgaggggatcttctctggatcaagcaatggtggtgaaaaatgtttcgcaagggcaaaaaacgacacagtagtagcagttcccaaagtagcgaaatcagtactaagagcaagtctgtggattctagccttgggggtctttcacgatccagcactgtggccagcctcgacacagattccaccaaaagctcaggacaaagcaacaataattcagatacctgtgcagaatttcgaataaaatatgttggtgccattgagaaactgaaactctccgagggaaaaggccttgaagggccattagacctgataaattatatagacgttgcccagcaagatggaaagttgccttttgttcctccggaggaagaatttattatgggagtttccaagtatggcataaaagtatcaacatcagatcaatatgatgttttgcacaggcatgctctctacttaataatccggatggtgtgttacgatgacggtctgggggcgggaaaaagcttactggctctgaagaccacagatgcaagcaatgaggaatacagcctgtgggtttatcagtgcaacagcctggaacaagcacaagccatttgcaaggttttatccaccgcttttgactctgtattaacatctgagaaaccctgaatcctgcaatcaagtagaagtcaacttcatctgaaagttcagctgttttcaaactgcaatgctgaaatgttatgcaaataatgaagttatcccttgctctagattttctgaagaaaatggattgtgtaaaatgctgatcatttgtttattaaaatgtgtcctattacacagtgagttaac

SEQ ID NO: 292327 - DNA, 763 bp, Homo sapiens
gaagacagggctgcttcagtggaggttttttacttgtttttctgtttctcagtctgtggattctagccttgggggtctttcacgatccagcactgtggccagcctcgacacagattccaccaaaagctcaggacaaagcaacaataattcagatacctgtgcagaatttcgaataaaatatgttggtgccattgagaaactgaaactctccgagggaaaaggccttgaagggccattagacctgataaattatatagacgttgcccagcaagatggaaagttgccttttgttcctccggaggaagaatttattatgggagtttccaagtatggcataaaagtatcaacatcagatcaatatgatgttttgcacaggcatgctctctacttaataatccggatggtgtgttacgatgacggtctgggggcgggaaaaagcttactggctctgaagaccacagatgcaagcaatgaggaatacagcctgtgggtttatcagtgcaacagcctggaacaagcacaagccatttgcaaggttttatccaccgcttttgactctgtattaacatctgagaaaccctgaatcctgcaatcaagtagaagtcaacttcatctgaaagttcagctgttttcaaactgcaatgctgaaatgttatgcaaataatgaagttatcccttgctctagattttctgaagaaaatggattgtgtaaaatgctgatcatttgtttattaaaatgtgtcctattacacagtgagttaac

SEQ ID NO: 292328 - DNA, 1297 bp, Homo sapiens
aggcgcggcccggcggacgtgggcaggagggctggaaaagccggcgctggagcgggaacgggagtagctgcctgggcgccaaaggccgcggcactcccacgcggaccccgaagtccgcaacccggggatgggcccgcggctgcgaggggatcttctctggatcaagcaatggtggtgaaaaatgtttcgcaagggcaaaaaacgacacagtagtagcagttcccaaagtagcgaaatcagtactaagagcaagtctgtggattctagccttgggggtctttcacgatccagcactgtggccagcctcgacacagattccaccaaaagctcaggacaaagcaacaataattcagatacctgtgcagaatttcgaataaaatatgttggtgccattgagaaactgaaactctccgagggaaaaggccttgaagggccattagacctgataaattatatagacgttgcccagcaagatggaaagttgccttttgttcctccggaggaagaatttattatgggagtttccaagtatggcataaaagtatcaacatcagatcaatatgaacaagcacaagccatttgcaaggttttatccaccgcttttgactctgtattaacatctgagaaaccctgaatcctgcaatcaagtagaagtcaacttcatctgaaagttcagctgttttcaaactgcaatgctgaaatgttatgcaaataatgaagttatcccttgctctagattttctgaagaaaatggattgtgtaaaatgctgatcatttgtttattaaaatgtgtcctattacacagtgagttaactctcaatgaagtcatctattttctgggctaaaaaacttcatttgtctttttcaacttctaataagcttaacctaagtgtcacgaagacgagatgtcacagaggtccactcagtgacacacactgaaggcctgaggaagactgaggacatgggctcagtggtggcttcccagtcatggtatcactggcatggacctctgtccggcagaggtgtggactggagaccaggattcatgctggtctggaacaatgacattgccaacttaagacacacaaagcagattttcagaagtgtctggtcaagataacatgctggccaaccacaattcctagagttaagagaaccttaaaagattaccgctcatgctaaaagtatgtaaagatcccatgtacagtatgatagtgtactttttttaaaggactgtcaatatacaaaactttaaagattaaaaacattaaaaataaaaccatgtccatttaaaagt

SEQ ID NO: 292329 - DNA, 814 bp, Homo sapiens
aggcgcggcccggcggacgtgggcaggagggctggaaaagccggcgctggagcgggaacgggagtagctgcctgggcgccaaaggccgcggcactcccacgcggaccccgaagtccgcaacccggggatgggcccgcggctgcgaggggatcttctctggatcaagcaatggtggtgaaaaatgtttcgcaagggcaaaaaacgacacagtagtagcagttcccaaagtagcgaaatcagtactaagagcaagtctgtggattctagccttgggggtctttcacgatccagcactgtggccagcctcgacacagattccaccaaaagctcaggacaaagcaacaataattcagatacctgtgcagaatttcgaataaaatatgttggtgccattgagaaactgaaactctccgagggaaaaggccttgaagggccattagacctgataaattatatagacgttgcccagcaagatggaaagttgccttttgttcctccggaggaagaatttattatgggagtttccaagtatggcataaaagtatcaacatcagatcaatatgaacaagcacaagccatttgcaaggttttatccaccgcttttgactctgtattaacatctgagaaaccctgaatcctgcaatcaagtagaagtcaacttcatctgaaagttcagctgttttcaaactgcaatgctgaaatgttatgcaaataatgaagttatcccttgctctagattttctgaagaaaatggattgtgtaaaatgctgatcatttgtttattaaaatgtgtcctattacacagtgagttaac

SEQ ID NO: 292330 - DNA, 475 bp, Homo sapiens
ctttgcaggctgcagtcgctgtttgctttcctctgaaggagggcagaaagggcccacgtgcagggaagctcatagtatgggttccattgacccaggcaggcatgtgtggtcggcttgcttaggagaggtcttaagagggtcaggtgtgtgcctctgctagccaaattaagttcacgaagagacagatgaatgttgctcttactctatctttcatgtaatgtaggaacaagcacaagccatttgcaaggttttatccaccgcttttgactctgtattaacatctgagaaaccctgaatcctgcaatcaagtagaagtcaacttcatctgaaagttcagctgttttcaaactgcaatgctgaaatgttatgcaaataatgaagttatcccttgctctagattttctgaagaaaatggattgtgtaaaatgctgatcatttgtttattaaaatgtgtcctattacacagtgagttaac

SEQ ID NO: 292331 - DNA, 1001 bp, Homo sapiens
aggcgcggcccggcggacgtgggcaggagggctggaaaagccggcgctggagcgggaacgggagtagctgcctgggcgccaaaggccgcggcactcccacgcggaccccgaagtccgcaacccggggatgggcccgcggctgcgaggacaaagcaacaataattcagatacctgtgcagaatttcgaataaaatatgttggtgccattgagaaactgaaactctccgagggaaaaggccttgaagggccattagacctgataaattatatagacgttgcccagcaagatggaaagttgccttttgttcctccggaggaagaatttattatgggagtttccaagtatggcataaaagtatcaacatcagatcaatatgaacaagcacaagccatttgcaaggttttatccaccgcttttgactctgtattaacatctgagaaaccctgaatcctgcaatcaagtagaagtcaacttcatctgaaagttcagctgttttcaaactgcaatgctgaaatgttatgcaaataatgaagttatcccttgctctagattttctgaagaaaatggattgtgtaaaatgctgatcatttgtttattaaaatgtgtcctattacacagtgagttaacaaaaaaaaaaaaaaaaaaaaaagaaagaaaaaaaaaagagggggggggggaaaaaaaagaacggaagggggacaaaggtataacgctacaccaggtcttgggtacacgggggggcccaaaagaggagagctgcaataaaaaagcaaggaaggagacgcggataaaaacgcgcgagagtggggacacaagtgtcgaagggggaaacttgacggaagggcaaccatacatccgggggggcgacacatatgtgggacaatgtccgcaaggaattataaagcgctaaggaaatttacaaccttaacggcgtatacgtgtaaccacaaggataatacgctaaacacaattgtgcccagcagtcactacgtaacatact

SEQ ID NO: 292332 - DNA, 523 bp, Homo sapiens
ctttgcaggctgcagtcgctgtttgctttcctctgaaggagggcagaaagggcccacgtgcagggaagctcatagtatgggttccattgacccaggcaggcatgtgtcaatggaacccatactatgagcttccattgacccaggcaggcatgtgtggtcggcttgcttaggagaggtcttaagagggtcaggtgtgtgcctctgctagccaaattaagttcacgaagagacagatgaatgttgctcttactctatctttcatgtaatgtaggaacaagcacaagccatttgcaaggttttatccaccgcttttgactctgtattaacatctgagaaaccctgaatcctgcaatcaagtagaagtcaacttcatctgaaagttcagctgttttcaaactgcaatgctgaaatgttatgcaaataatgaagttatcccttgctctagattttctgaagaaaatggattgtgtaaaatgctgatcatttgtttattaaaatgtgtcctattacacagtgagttaac

SEQ ID NO: 292333 - DNA, 603 bp, Homo sapiens
agttcgacggagactctccagtatgaattatcttatgttcagtaagagttgaagatttcctaaaagcttgccacattcttcacatttgtagggtttctctccagtatgaattatcttatgtgtagtaagggttgaggattggctaaaagctttgccacattcttcacatttgtagggtttctctccagtgtgcatcctcttatgtgtagtaaggtgtgaaggctggctaaatgctttgccacattcttcacatttgtaggttgggatcttctctggatcaagcaatggtggtgaaaaatgtttcgcaagggcaaaaaacgacacagtagtagcagttcccaaagtagcgaaatcagtactaagagcaaggacaaagcaacaataattcagatacctgtgcagaatttcgaataaaatatgttggtgccattgagaaactgaaactctccgagggaaaaggccttgaagggccattagacctgataaattatatagacgttgcccagcaagatggaaagttgctttttggtgctccgggggaagaatttttatgagagtctccgtcgaactgggtacgagctcgatcgtagatggccaaacaaa

SEQ ID NO: 292334 - DNA, 203 bp, Homo sapiens
ggctcgggcttggttccgggcggggccgcgctcccggggcgcgggtggaggagcttggaaccgcagatcgggcgtgggcttgcggactgcagcttcccgagccgctgtcgccccggaggggcggcaaggcgggcggccgcaatgctttttttttttttttttttttttttttttttttttttttttttttttttttttttttt

SEQ ID NO: 292335 - DNA, 1691 bp, Homo sapiens
ggctcgggcttggttccgggcggggccgcgctcccggggcgcgggtggaggagcttggaaccgcagatcgggcgtgggcttgcggactgcagcttcccgagccgctgtcgccccggaggggcggcaaggcgggcggccgcgggccgtttccttgcctcttcctctgccccgcttcggccgcctcccgcctctcagggtcggggttgtctgtccccttcgctgtcacatcctccgcacccagcgcttggaaggtgctccatcacggtgacagacaggtgccaagcaggctggcgtctgggaggaacttcggagccggctctccctaggccccgagcttggccgcatccgtccttactctggtgaccctgggcaggtcactgactcttcgggcgctttggcatcctcgtttgaaaggggctgttatcctgcagccttgctggtcggtgagggtgagggtgagagggatctgtgcacctagcaccgtgcatggcacgtggtaggcgtttggtacatgggaatcgctgttggggtgtcacctccccagaaagttctcggcttcagtaagcgcgtcccctgccaggcgccctggcaatgcagaggagtcaccgagctccgcctttgaccagcgtgcagctgggagagtgagatcagagaccacagcagatcgtggcgctgtgatcagggggtacactcaagctgtgggtcccttaccccagccttgagatcccaggaaggcctgcagcctgaaacgggccttgaaaggtgcgtagtttctctgaaaagcatcacccaggtcagaatgaaaggaaactctctgtgcagaccgctgtatgtgggacctttgaagacagtcaaatagtgttcaattctatagggatcttctctggatcaagcaatggtggtgaaaaatgtttcgcaagggcaaaaaacgacacagtagtagcagttcccaaagtagcgaaatcagtactaagagcaagtctgtggattctagccttgggggtctttcacgatccagcactgtggccagcctcgacacagattccaccaaaagctcaggacaaagcaacaataattcagatacctgtgcagaatttcgaataaaatatgttggtgccattgagaaactgaaactctccgagggaaaaggccttgaagggccattagacctgataaattatatagacgttgcccagcaagatggaaagttgccttttgttcctccggaggaagaatttattatgggagtttccaagtatggcataaaagtatcaacatcagatcaatatgatgttttgcacaggcatgctctctacttaataatccggatggtgtgttacgatgacggtctgggggcgggaaaaagcttactggctctgaagaccacagatgcaagcaatgaggaatacagcctgtgggtttatcagtgcaacagcctggaacaagcacaagccatttgcaaggttttatccaccgcttttgactctgtattaacatctgagaaaccctgaatcctgcaatcaagtagaagtcaacttcatctgaaagttcagctgttttcaaactgcaatgctgaaatgttatgcaaataatgaagttatcccttgctctagattttctgaagaaaatggattgtgtaaaatgctgatcatttgtttattaaaatgtgtcctattacacagtgagttaac

SEQ ID NO: 292336 - DNA, 1580 bp, Homo sapiens
ggctcgggcttggttccgggcggggccgcgctcccggggcgcgggtggaggagcttggaaccgcagatcgggcgtgggcttgcggactgcagcttcccgagccgctgtcgccccggaggggcggcaaggcgggcggccgcgggccgtttccttgcctcttcctctgccccgcttcggccgcctcccgcctctcagggtcggggttgtctgtccccttcgctgtcacatcctccgcacccagcgcttggaaggtgctccatcacggtgacagacaggtgccaagcaggctggcgtctgggaggaacttcggagccggctctccctaggccccgagcttggccgcatccgtccttactctggtgaccctgggcaggtcactgactcttcgggcgctttggcatcctcgtttgaaaggggctgttatcctgcagccttgctggtcggtgagggtgagggtgagagggatctgtgcacctagcaccgtgcatggcacgtggtaggcgtttggtacatgggaatcgctgttggggtgtcacctccccagaaagttctcggcttcagtaagcgcgtcccctgccaggcgccctggcaatgcagaggagtcaccgagctccgcctttgaccagcgtgcagctgggagagtgagatcagagaccacagcagatcgtggcgctgtgatcagggggtacactcaagctgtgggtcccttaccccagccttgagatcccaggaaggcctgcagcctgaaacgggccttgaaaggggatcttctctggatcaagcaatggtggtgaaaaatgtttcgcaagggcaaaaaacgacacagtagtagcagttcccaaagtagcgaaatcagtactaagagcaagtctgtggattctagccttgggggtctttcacgatccagcactgtggccagcctcgacacagattccaccaaaagctcaggacaaagcaacaataattcagatacctgtgcagaatttcgaataaaatatgttggtgccattgagaaactgaaactctccgagggaaaaggccttgaagggccattagacctgataaattatatagacgttgcccagcaagatggaaagttgccttttgttcctccggaggaagaatttattatgggagtttccaagtatggcataaaagtatcaacatcagatcaatatgatgttttgcacaggcatgctctctacttaataatccggatggtgtgttacgatgacggtctgggggcgggaaaaagcttactggctctgaagaccacagatgcaagcaatgaggaatacagcctgtgggtttatcagtgcaacagcctggaacaagcacaagccatttgcaaggttttatccaccgcttttgactctgtattaacatctgagaaaccctgaatcctgcaatcaagtagaagtcaacttcatctgaaagttcagctgttttcaaactgcaatgctgaaatgttatgcaaataatgaagttatcccttgctctagattttctgaagaaaatggattgtgtaaaatgctgatcatttgtttattaaaatgtgtcctattacacagtgagttaac

SEQ ID NO: 292337 - DNA, 1612 bp, Homo sapiens
ggctcgggcttggttccgggcggggccgcgctcccggggcgcgggtggaggagcttggaaccgcagatcgggcgtgggcttgcggactgcagcttcccgagccgctgtcgccccggaggggcggcaaggcgggcggccgcgggccgtttccttgcctcttcctctgccccgcttcggccgcctcccgcctctcagggtcggggttgtctgtccccttcgctgtcacatcctccgcacccagcgcttggaaggtgctccatcacggtgacagacaggtgccaagcaggctggcgtctgggaggaacttcggagccggctctccctaggccccgagcttggccgcatccgtccttactctggtgaccctgggcaggtcactgactcttcgggcgctttggcatcctcgtttgaaaggggctgttatcctgcagccttgctggtcggtgagggtgagggtgagagggatctgtgcacctagcaccgtgcatggcacgtggtaggcgtttggtacatgggaatcgctgttggggtgtcacctccccagaaagttctcggcttcagtaagcgcgtcccctgccaggcgccctggcaatgcagaggagtcaccgagctccgcctttgaccagcgtgcagctgggagagtgagatcagagaccacagcagatcgtggcgctgtgatcagggggtacactcaagctgtgggtcccttaccccagccttgagatcccaggaaggcctgcagcctgaaacgggccttgaaaggtgcgtagtttctctgaaaagcatcacccaggtcagaatgaaaggaaactctctgtgcagaccgctgtatgtgggacctttgaagacagtcaaatagtgttcaattctatagggatcttctctggatcaagcaatggtggtgaaaaatgtttcgcaagggcaaaaaacgacacagtagtagcagttcccaaagtagcgaaatcagtactaagagcaaggacaaagcaacaataattcagatacctgtgcagaatttcgaataaaatatgttggtgccattgagaaactgaaactctccgagggaaaaggccttgaagggccattagacctgataaattatatagacgttgcccagcaagatggaaagttgccttttgttcctccggaggaagaatttattatgggagtttccaagtatggcataaaagtatcaacatcagatcaatatgatgttttgcacaggcatgctctctacttaataatccggatggtgtgttacgatgacggtctgggggcgggaaaaagcttactggctctgaagaccacagatgcaagcaatgaggaatacagcctgtgggtttatcagtgcaacagcctggaacaagcacaagccatttgcaaggttttatccaccgcttttgactctgtattaacatctgagaaaccctgaatcctgcaatcaagtagaagtcaacttcatctgaaagttcagctgttttcaaactgcaatgctgaaatgttatgcaaataatgaagttatcccttgctctagattttctgaagaaaatggattgtgtaaaatgctgatcatttgtttattaaaatgtgtcctattacacagtgagttaac

SEQ ID NO: 292338 - DNA, 1093 bp, Homo sapiens
ggctcgggcttggttccgggcggggccgcgctcccggggcgcgggtggaggagcttggaaccgcagatcgggcgtgggcttgcggactgcagcttcccgagccgctgtcgccccggaggggcggcaaggcgggcggccgcgggccgtttccttgcctcttcctctgccccgcttcggccgcctcccgcctctcagggtcggggttgtctgtccccttcgctgtcacatcctccgcacccagcgcttggaaggtgctccatcacggtgacagacaggggatcttctctggatcaagcaatggtggtgaaaaatgtttcgcaagggcaaaaaacgacacagtagtagcagttcccaaagtagcgaaatcagtactaagagcaagtctgtggattctagccttgggggtctttcacgatccagcactgtggccagcctcgacacagattccaccaaaagctcaggacaaagcaacaataattcagatacctgtgcagaatttcgaataaaatatgttggtgccattgagaaactgaaactctccgagggaaaaggccttgaagggccattagacctgataaattatatagacgttgcccagcaagatggaaagttgccttttgttcctccggaggaagaatttattatgggagtttccaagtatggcataaaagtatcaacatcagatcaatatgatgttttgcacaggcatgctctctacttaataatccggatggtgtgttacgatgacggtctgggggcgggaaaaagcttactggctctgaagaccacagatgcaagcaatgaggaatacagcctgtgggtttatcagtgcaacagcctggaacaagcacaagccatttgcaaggttttatccaccgcttttgactctgtattaacatctgagaaaccctgaatcctgcaatcaagtagaagtcaacttcatctgaaagttcagctgttttcaaactgcaatgctgaaatgttatgcaaataatgaagttatcccttgctctagattttctgaagaaaatggattgtgtaaaatgctgatcatttgtttattaaaatgtgtcctattacacagtgagttaac

SEQ ID NO: 292339 - DNA, 2343 bp, Homo sapiens
ggctcgggcttggttccgggcggggccgcgctcccggggcgcgggtggaggagcttggaaccgcagatcgggcgtgggcttgcggactgcagcttcccgagccgctgtcgccccggaggggcggcaaggcgggcggccgcgggccgtttccttgcctcttcctctgccccgcttcggccgcctcccgcctctcagggtcggggttgtctgtccccttcgctgtcacatcctccgcacccagcgcttggaaggtgctccatcacggtgacagacaggtgccaagcaggctggcgtctgggaggaacttcggagccggctctccctaggccccgagcttggccgcatccgtccttactctggtgaccctgggcaggtcactgactcttcgggcgctttggcatcctcgtttgaaaggggctgttatcctgcagccttgctggtcggtgagggtgagggtgagagggatctgtgcacctagcaccgtgcatggcacgtggtaggcgtttggtacatgggaatcgctgttggggtgtcacctccccagaaagttctcggcttcagtaagcgcgtcccctgccaggcgccctggcaatgcagaggagtcaccgagctccgcctttgaccagcgtgcagctgggagagtgagatcagagaccacagcagatcgtggcgctgtgatcagggggtacactcaagctgtgggtcccttaccccagccttgagatcccaggaaggcctgcagcctgaaacgggccttgaaaggtgcgtagtttctctgaaaagcatcacccaggtcagaatgaaaggaaactctctgtgcagaccgctgtatgtgggacctttgaagacagtcaaatagtgttcaattctatagggatcttctctggatcaagcaatggtggtgaaaaatgtttcgcaagggcaaaaaacgacacagtagtagcagttcccaaagtagcgaaatcagtactaagagcaagtctgtggattctagccttgggggtctttcacgatccagcactgtggccagcctcgacacagattccaccaaaagctcaggacaaagcaacaataattcagatacctgtgcagaatttcgaataaaatatgttggtgccattgagaaactgaaactctccgagggaaaaggccttgaagggccattagacctgataaattatatagacgttgcccagcaagatggaaagttgccttttgttcctccggaggaagaatttattatgggagtttccaagtatggcataaaagtatcaacatcagatcaatatgatgttttgcacaggcatgctctctacttaataatccggatggtgtgttacgatgacggtctgggggcgggaaaaagcttactggctctgaagaccacagatgcaagcaatgaggaatacagcctgtgggtttatcagtgcaacagcctggaacaagcacaagccatttgcaaggttttatccaccgcttttgactctgtattaacatctgagaaaccctgaatcctgcaatcaagtagaagtcaacttcatctgaaagttcagctgttttcaaactgcaatgctgaaatgttatgcaaataatgaagttatcccttgctctagattttctgaagaaaatggattgtgtaaaatgctgatcatttgtttattaaaatgtgtcctattacacagtgagttaactctcaatgaagtcatctattttctgggctaaaaaacttcatttgtctttttcaacttctaataagcttaacctaagtgtcacagaagcctaggtgtcacagaggtccactcagtgacaaacacacactgaaggcctgaggaagacgagatgtcacagaggtccactcagtgacaaacacacactgaaggcctgaggaagacgagatgtcacagaggtccactcagtgacaaacacacactgaaggcctgaggaagacgagatgtcacagaggtccactcagtgacacacactgaaggcctgaggaagactgaggacatgggctcagtggtggcttcccagtcatggtatcactggcatggacctctgtccggcagaggtgtggactggagaccaggattcatgctggtctggaacaatgacattgccaacttaagacacacaaagcagattttcagaagtgtctggtcaagataacatgctggccaaccacaattcctagagttaagagaaccttaaaagattaccgctcatgctaaaagtatgtaaagatcccatgtacagtatgatagtgtactttttttaaaggactgtcaatatacaaaactttaaagattaaaaacattaaaaataaaaccatgtccatttaaaagt

SEQ ID NO: 292340 - DNA, 1262 bp, Homo sapiens
ggctcgggcttggttccgggcggggccgcgctcccggggcgcgggtggaggagcttggaaccgcagatcgggcgtgggcttgcggactgcagcttcccgagccgctgtcgccccggaggggcggcaaggcgggcggccgcgggccgtttccttgcctcttcctctgccccgcttcggccgcctcccgcctctcagggtcggggttgtctgtccccttcgctgtcacatcctccgcacccagcgcttggaaggtgctccatcacggtgacagacaggtgccaagcaggctggcgtctgggaggaacttcggagccggctctccctaggccccgagcttggccgcatccgtccttactctggtgaccctgggcaggtcactgactcttcgggcgctttggcatcctcgtttgaaaggggctgttatcctgcagccttgctggtcgggggatcttctctggatcaagcaatggtggtgaaaaatgtttcgcaagggcaaaaaacgacacagtagtagcagttcccaaagtagcgaaatcagtactaagagcaagtctgtggattctagccttgggggtctttcacgatccagcactgtggccagcctcgacacagattccaccaaaagctcaggacaaagcaacaataattcagatacctgtgcagaatttcgaataaaatatgttggtgccattgagaaactgaaactctccgagggaaaaggccttgaagggccattagacctgataaattatatagacgttgcccagcaagatggaaagttgccttttgttcctccggaggaagaatttattatgggagtttccaagtatggcataaaagtatcaacatcagatcaatatgatgttttgcacaggcatgctctctacttaataatccggatggtgtgttacgatgacggtctgggggcgggaaaaagcttactggctctgaagaccacagatgcaagcaatgaggaatacagcctgtgggtttatcagtgcaacagcctggaacaagcacaagccatttgcaaggttttatccaccgcttttgactctgtattaacatctgagaaaccctgaatcctgcaatcaagtagaagtcaacttcatctgaaagttcagctgttttcaaactgcaatgctgaaatgttatgcaaataatgaagttatcccttgctctagattttctgaagaaaatggattgtgtaaaatgctgatcatttgtttattaaaatgtgtcctattacacagtgagttaac

SEQ ID NO: 292341 - DNA, 1204 bp, Homo sapiens
ggctcgggcttggttccgggcggggccgcgctcccggggcgcgggtggaggagcttggaaccgcagatcgggcgtgggcttgcggactgcagcttcccgagccgctgtcgccccggaggggcggcaaggcgggcggccgcgggccgtttccttgcctcttcctctgccccgcttcggccgcctcccgcctctcagggtcggggttgtctgtccccttcgctgtcacatcctccgcacccagcgcttggaaggtgctccatcacggtgacagacaggtgcgtagtttctctgaaaagcatcacccaggtcagaatgaaaggaaactctctgtgcagaccgctgtatgtgggacctttgaagacagtcaaatagtgttcaattctatagggatcttctctggatcaagcaatggtggtgaaaaatgtttcgcaagggcaaaaaacgacacagtagtagcagttcccaaagtagcgaaatcagtactaagagcaagtctgtggattctagccttgggggtctttcacgatccagcactgtggccagcctcgacacagattccaccaaaagctcaggacaaagcaacaataattcagatacctgtgcagaatttcgaataaaatatgttggtgccattgagaaactgaaactctccgagggaaaaggccttgaagggccattagacctgataaattatatagacgttgcccagcaagatggaaagttgccttttgttcctccggaggaagaatttattatgggagtttccaagtatggcataaaagtatcaacatcagatcaatatgatgttttgcacaggcatgctctctacttaataatccggatggtgtgttacgatgacggtctgggggcgggaaaaagcttactggctctgaagaccacagatgcaagcaatgaggaatacagcctgtgggtttatcagtgcaacagcctggaacaagcacaagccatttgcaaggttttatccaccgcttttgactctgtattaacatctgagaaaccctgaatcctgcaatcaagtagaagtcaacttcatctgaaagttcagctgttttcaaactgcaatgctgaaatgttatgcaaataatgaagttatcccttgctctagattttctgaagaaaatggattgtgtaaaatgctgatcatttgtttattaaaatgtgtcctattacacagtgagttaac

SEQ ID NO: 292342 - DNA, 1191 bp, Homo sapiens
ggctcgggcttggttccgggcggggccgcgctcccggggcgcgggtggaggagcttggaaccgcagatcgggcgtgggcttgcggactgcagcttcccgagccgctgtcgccccggaggggcggcaaggcgggcggccgcgggccgtttccttgcctcttcctctgccccgcttcggccgcctcccgcctctcagggtcggggttgtctgtccccttcgctgtcacatcctccgcacccagcgcttggaaggtgctccatcacggtgacagacaggtgccaagcaggctggcgtctgggaggaacttcggagccggctctccctaggccccgagcttggccgcatccgtccttactctggtgaccctgggcaggggatcttctctggatcaagcaatggtggtgaaaaatgtttcgcaagggcaaaaaacgacacagtagtagcagttcccaaagtagcgaaatcagtactaagagcaagtctgtggattctagccttgggggtctttcacgatccagcactgtggccagcctcgacacagattccaccaaaagctcaggacaaagcaacaataattcagatacctgtgcagaatttcgaataaaatatgttggtgccattgagaaactgaaactctccgagggaaaaggccttgaagggccattagacctgataaattatatagacgttgcccagcaagatggaaagttgccttttgttcctccggaggaagaatttattatgggagtttccaagtatggcataaaagtatcaacatcagatcaatatgatgttttgcacaggcatgctctctacttaataatccggatggtgtgttacgatgacggtctgggggcgggaaaaagcttactggctctgaagaccacagatgcaagcaatgaggaatacagcctgtgggtttatcagtgcaacagcctggaacaagcacaagccatttgcaaggttttatccaccgcttttgactctgtattaacatctgagaaaccctgaatcctgcaatcaagtagaagtcaacttcatctgaaagttcagctgttttcaaactgcaatgctgaaatgttatgcaaataatgaagttatcccttgctctagattttctgaagaaaatggattgtgtaaaatgctgatcatttgtttattaaaatgtgtcctattacacagtgagttaac

SEQ ID NO: 292343 - DNA, 2682 bp, Homo sapiens
ggctcgggcttggttccgggcggggccgcgctcccggggcgcgggtggaggagcttggaaccgcagatcgggcgtgggcttgcggactgcagcttcccgagccgctgtcgccccggaggggcggcaaggcgggcggccgcgggccgtttccttgcctcttcctctgccccgcttcggccgcctcccgcctctcagggtcggggttgtctgtccccttcgctgtcacatcctccgcacccagcgcttggaaggtgctccatcacggtgacagacaggtgccaagcaggctggcgtctgggaggaacttcggagccggctctccctaggccccgagcttggccgcatccgtccttactctggtgaccctgggcaggtcactgactcttcgggcgctttggcatcctcgtttgaaaggggctgttatcctgcagccttgctggtcggtgagggtgagggtgagagggatctgtgcacctagcaccgtgcatggcacgtggtaggcgtttggtacatgggaatcgctgttggggtgtcacctccccagaaagttctcggcttcagtaagcgcgtcccctgccaggcgccctggcaatgcagaggagtcaccgagctccgcctttgaccagcgtgcagctgggagagtgagatcagagaccacagcagatcgtggcgctgtgatcagggggtacactcaagctgtgggtcccttaccccagccttgagatcccaggaaggcctgcagcctgaaacgggccttgaaaggtgcgtagtttctctgaaaagcatcacccaggtcagaatgaaaggaaactctctgtgcagaccgctgtatgtgggacctttgaagacagtcaaatagtgttcaattctatagggatcttctctggatcaagcaatggtggtgaaaaatgtttcgcaagggcaaaaaacgacacagtagtagcagttcccaaagtagcgaaatcagtactaagagcaagtctgtggattctagccttgggggtctttcacgatccagcactgtggccagcctcgacacagattccaccaaaagctcaggacaaagcaacaataattcagatacctgtgcagaatttcgaataaaatatgttggtgccattgagaaactgaaactctccgagggaaaaggccttgaagggccattagacctgataaattatatagacgttgcccagcaagatggaaagttgccttttgttcctccggaggaagaatttattatgggagtttccaagtatggcataaaagtatcaacatcagatcaatatgatgttttgcacaggcatgctctctacttaataatccggatggtgtgttacgatgacggtctgggggcgggaaaaagcttactggctctgaagaccacagatgcaagcaatgaggaatacagcctgtgggtttatcagtgcaacagcctggaacaagcacaagccatttgcaaggttttatccaccgcttttgactctgtattaacatctgagaaaccctgaatcctgcaatcaagtagaagtcaacttcatctgaaagttcagctgttttcaaactgcaatgctgaaatgttatgcaaataatgaagttatcccttgctctagattttctgaagaaaatggattgtgtaaaatgctgatcatttgtttattaaaatgtgtcctattacacagtgagttaactctcaatgaagtcatctattttctgggctaaaaaacttcatttgtctttttcaacttctaataagcttaacctaagtgtcacagaagcctaggtgtcacagaggtccactcagtgacaaacacacactgaaggcctgaggaagacgagatgtcacagaggtccactcagtgacaaacacacactgaaggcctgaggaagacgagatgtcacagaggtccactcagtgacaaacacacactgaaggcctgaggaagacgagatgtcacagaggtccactcagtgacaaacacacactgaaggcctgaggaagacgagatgtcacagaggtccactcagtgacaaacacacactgagaggcctgaggaagacgagatgtacacagaggtccactcagtgacaaacacagactgagaggcctgaggaagacgagatgtcacagaggtccactcagtgacaaacacacactgaaggcctgaggaagacgagatgtcacagaggtccactcagtgacaaacacacactgaaggcctgaggaagacgagatgtcacagaggtccactcagtgacaaacacacactgaaggcctgaggaagacgagatgtcacagaggtccactcagtgacacacactgaaggcctgaggaagactgaggacatgggctcagtggtggcttcccagtcatggtatcactggcatggacctctgtccggcagaggtgtggactggagaccaggattcatgctggtctggaacaatgacattgccaacttaagacacacaaagcagattttcagaagtgtctggtcaagataacatgctggccaaccacaattcctagagttaagagaaccttaaaagattaccgctcatgctaaaagtatgtaaagatcccatgtacagtatgatagtgtactttttttaaaggactgtcaatatacaaaactttaaagattaaaaacattaaaaataaaaccatgtccatttaaaagt

SEQ ID NO: 292344 - DNA, 2853 bp, Homo sapiens
ggctcgggcttggttccgggcggggccgcgctcccggggcgcgggtggaggagcttggaaccgcagatcgggcgtgggcttgcggactgcagcttcccgagccgctgtcgccccggaggggcggcaaggcgggcggccgcgggccgtttccttgcctcttcctctgccccgcttcggccgcctcccgcctctcagggtcggggttgtctgtccccttcgctgtcacatcctccgcacccagcgcttggaaggtgctccatcacggtgacagacaggtgccaagcaggctggcgtctgggaggaacttcggagccggctctccctaggccccgagcttggccgcatccgtccttactctggtgaccctgggcaggtcactgactcttcgggcgctttggcatcctcgtttgaaaggggctgttatcctgcagccttgctggtcggtgagggtgagggtgagagggatctgtgcacctagcaccgtgcatggcacgtggtaggcgtttggtacatgggaatcgctgttggggtgtcacctccccagaaagttctcggcttcagtaagcgcgtcccctgccaggcgccctggcaatgcagaggagtcaccgagctccgcctttgaccagcgtgcagctgggagagtgagatcagagaccacagcagatcgtggcgctgtgatcagggggtacactcaagctgtgggtcccttaccccagccttgagatcccaggaaggcctgcagcctgaaacgggccttgaaaggtgcgtagtttctctgaaaagcatcacccaggtcagaatgaaaggaaactctctgtgcagaccgctgtatgtgggacctttgaagacagtcaaatagtgttcaattctatagggatcttctctggatcaagcaatggtggtgaaaaatgtttcgcaagggcaaaaaacgacacagtagtagcagttcccaaagtagcgaaatcagtactaagagcaagtctgtggattctagccttgggggtctttcacgatccagcactgtggccagcctcgacacagattccaccaaaagctcaggacaaagcaacaataattcagatacctgtgcagaatttcgaataaaatatgttggtgccattgagaaactgaaactctccgagggaaaaggccttgaagggccattagacctgataaattatatagacgttgcccagcaagatggaaagttgccttttgttcctccggaggaagaatttattatgggagtttccaagtatggcataaaagtatcaacatcagatcaatatgatgttttgcacaggcatgctctctacttaataatccggatggtgtgttacgatgacggtctgggggcgggaaaaagcttactggctctgaagaccacagatgcaagcaatgaggaatacagcctgtgggtttatcagtgcaacagcctggaacaagcacaagccatttgcaaggttttatccaccgcttttgactctgtattaacatctgagaaaccctgaatcctgcaatcaagtagaagtcaacttcatctgaaagttcagctgttttcaaactgcaatgctgaaatgttatgcaaataatgaagttatcccttgctctagattttctgaagaaaatggattgtgtaaaatgctgatcatttgtttattaaaatgtgtcctattacacagtgagttaactctcaatgaagtcatctattttctgggctaaaaaacttcatttgtctttttcaacttctaataagcttaacctaagtgtcacagaagcctaggtgtcacagaggtccactcagtgacaaacacacactgaaggcctgaggaagacgagatgtcacagaggtccactcagtgacaaacacacactgaaggcctgaggaagacgagatgtcacagaggtccactcagtgacaaacacacactgaaggcctgaggaagacgagatgtcacagaggtccactcagtgacacacactgaaggcctgaggaagactgaggacatgggctcagtggtggcttcccagtcatggtatcactggcatggacctctgtccggcagaggtgtggactggagaccaggattcatgctggtctggaacaatgacattgccaacttaagacacacaaagcagattttcagaagtgtctggtcaagataacatgctggccaaccacaattcctagagttaagagaaccttaaaagattaccgctcatgctaaaacaattcagtcagcgataaagtgcacaaatgacaccgggaatgcgcctttgcgaccaggatctccatcaatgtggccaatctgaaatggagaaaagtgtaggttgttattaaaattccaaatgttggtggaaactttgaagagcattacatagagcgtttggtgaagaaaagcaagattggttcagaagactcttccgacaaggaattacttaggtaaaacatccaaatgatttttgtccgtttttcctcaccacatttcaaatagtgcaggcctctcccgtgtaaggagctcttcccagccatgtcccagatgttcgctcgtggggatggccacccccacctgttcttgggaggcacacaggtcagctgtctgaccactacttcccacttgccatttttcaatgaatgaatgaatgaatgaactgagtgtcacaagtttgtgagctgcaacgtcacctaaagtggcaaaggtataagttggccccatttcaatgagttaagtacttgtggaaggcttcactctatccacttatgttccctcttgggtagatacataaattatatccaaatatgatctcaagagtgtaaatgatgtaggcaaataaaaggctaaaaacagcaaa

SEQ ID NO: 292345 - DNA, 2354 bp, Homo sapiens
ggctcgggcttggttccgggcggggccgcgctcccggggcgcgggtggaggagcttggaaccgcagatcgggcgtgggcttgcggactgcagcttcccgagccgctgtcgccccggaggggcggcaaggcgggcggccgcgggccgtttccttgcctcttcctctgccccgcttcggccgcctcccgcctctcagggtcggggttgtctgtccccttcgctgtcacatcctccgcacccagcgcttggaaggtgctccatcacggtgacagacaggtgccaagcaggctggcgtctgggaggaacttcggagccggctctccctaggccccgagcttggccgcatccgtccttactctggtgaccctgggcaggtcactgactcttcgggcgctttggcatcctcgtttgaaaggggctgttatcctgcagccttgctggtcggtgagggtgagggtgagagggatctgtgcacctagcaccgtgcatggcacgtggtaggcgtttggtacatgggaatcgctgttggggtgtcacctccccagaaagttctcggcttcagtaagcgcgtcccctgccaggcgccctggcaatgcagaggagtcaccgagctccgcctttgaccagcgtgcagctgggagagtgagatcagagaccacagcagatcgtggcgctgtgatcagggggtacactcaagctgtgggtcccttaccccagccttgagatcccaggaaggcctgcagcctgaaacgggccttgaaaggtgcgtagtttctctgaaaagcatcacccaggtcagaatgaaaggaaactctctgtgcagaccgctgtatgtgggacctttgaagacagtcaaatagtgttcaattctatagggatcttctctggatcaagcaatggtggtgaaaaatgtttcgcaagggcaaaaaacgacacagtagtagcagttcccaaagtagcgaaatcagtactaagagcaagtctgtggattctagccttgggggtctttcacgatccagcactgtggccagcctcgacacagattccaccaaaagctcaggacaaagcaacaataattcagatacctgtgcagaatttcgaataaaatatgttggtgccattgagaaactgaaactctccgagggaaaaggccttgaagggccattagacctgataaattatatagacgttgcccagcaagatggaaagttgccttttgttcctccggaggaagaatttattatgggagtttccaagtatggcataaaagtatcaacatcagatcaatatgatgttttgcacaggcatgctctctacttaataatccggatggtgtgttacgatgacggtctgggggcgggaaaaagcttactggctctgaagaccacagatgcaagcaatgaggaatacagcctgtgggtttatcagtgcaacagcctggaacaagcacaagccatttgcaaggttttatccaccgcttttgactctgtattaacatctgagaaaccctgaatcctgcaatcaagtagaagtcaacttcatctgaaagttcagctgttttcaaactgcaatgctgaaatgttatgcaaataatgaagttatcccttgctctagattttctgaagaaaatggattgtgtaaaatgctgatcatttgtttattaaaatgtgtcctattacacagtgagttaactctcaatgaagtcatctattttctgggctaaaaaacttcatttgtctttttcaacttctaataagcttaacctaagtgtcacagaagcctaggtgtcacagaggtccactcagtgacaaacacacactgaaggcctgaggaagacgagatgtcacagaggtccactcagtgacaaacacacactgaaggcctgaggaagacgagatgtcacagaggtccactcagtgacaaacacacactgaaggcctgaggaagacgagatgtcacagaggtccactcagtgacaaacacacactgaaggcctgaggaagacgagatgtcacagaggtccactcagtgacaaacacacactgagaggcctgaggaagacgagatgtacacagaggtccactcagtgacaaacacagactgagaggcctgaggaagacgagatgtcacagaggtccactcagtgacaaacacacactgaaggcctgaggaagacgagatgtcacagaggtccactcagtgacaaacacacactgaaggcctgaggaagacgagatgtcacagaggtccactcagtgacaaacacacactgaaggcctgaggaagccaaagcatgccacagaaggtacaactgcacgagcaaaacaaagcaagaatgacggaggaagagcagag

SEQ ID NO: 292346 - DNA, 1616 bp, Homo sapiens
aggcgcggcccggcggacgtgggcaggagggctggaaaagccggcgctggagcgggaacgggagtagctgcctgggcgccaaaggccgcggcactcccacgcggaccccgaagtccgcaacccggggatgggcccgcggctgcgaggggatcttctctggatcaagcaatggtggtgaaaaatgtttcgcaagggcaaaaaacgacacagtagtagcagttcccaaagtagcgaaatcagtactaagagcaagtctgtggattctagccttgggggtctttcacgatccagcactgtggccagcctcgacacagattccaccaaaagctcaggacaaagcaacaataattcagatacctgtgcagaatttcgaataaaatatgttggtgccattgagaaactgaaactctccgagggaaaaggccttgaagggccattagacctgataaattatatagacgttgcccagcaagatggaaagttgccttttgttcctccggaggaagaatttattatgggagtttccaagtatggcataaaagtatcaacatcagatcaatatgatgttttgcacaggcatgctctctacttaataatccggatggtgtgttacgatgacggtctgggggcgggaaaaagcttactggctctgaagaccacagatgcaagcaatgaggaatacagcctgtgggtttatcagtgcaacagcctggaacaagcacaagccatttgcaaggttttatccaccgcttttgactctgtattaacatctgagaaaccctgaatcctgcaatcaagtagaagtcaacttcatctgaaagttcagctgttttcaaactgcaatgctgaaatgttatgcaaataatgaagttatcccttgctctagattttctgaagaaaatggattgtgtaaaatgctgatcatttgtttattaaaatgtgtcctattacacagtgagttaactctcaatgaagtcatctattttctgggctaaaaaacttcatttgtctttttcaacttctaataagcttaacctaagtgtcacagaagcctaggtgtcacagaggtccactcagtgacaaacacacactgaaggcctgaggaagacgagatgtcacagaggtccactcagtgacaaacacacactgaaggcctgaggaagacgagatgtcacagaggtccactcagtgacaaacacacactgaaggcctgaggaagacgagatgtcacagaggtccactcagtgacacacactgaaggcctgaggaagactgaggacatgggctcagtggtggcttcccagtcatggtatcactggcatggacctctgtccggcagaggtgtggactggagaccaggattcatgctggtctggaacaatgacattgccaacttaagacacacaaagcagattttcagaagtgtctggtcaagataacatgctggccaaccacaattcctagagttaagagaaccttaaaagattaccgctcatgctaaaagtatgtaaagatcccatgtacagtatgatagtgtactttttttaaaggactgtcaatatacaaaactttaaagattaaaaacattaaaaataaaaccatgtccatttaaaagt

SEQ ID NO: 292347 - DNA, 2193 bp, Homo sapiens
ggctcgggcttggttccgggcggggccgcgctcccggggcgcgggtggaggagcttggaaccgcagatcgggcgtgggcttgcggactgcagcttcccgagccgctgtcgccccggaggggcggcaaggcgggcggccgcgggccgtttccttgcctcttcctctgccccgcttcggccgcctcccgcctctcagggtcggggttgtctgtccccttcgctgtcacatcctccgcacccagcgcttggaaggtgctccatcacggtgacagacaggtgccaagcaggctggcgtctgggaggaacttcggagccggctctccctaggccccgagcttggccgcatccgtccttactctggtgaccctgggcaggtcactgactcttcgggcgctttggcatcctcgtttgaaaggggctgttatcctgcagccttgctggtcggtgagggtgagggtgagagggatctgtgcacctagcaccgtgcatggcacgtggtaggcgtttggtacatgggaatcgctgttggggtgtcacctccccagaaagttctcggcttcagtaagcgcgtcccctgccaggcgccctggcaatgcagaggagtcaccgagctccgcctttgaccagcgtgcagctgggagagtgagatcagagaccacagcagatcgtggcgctgtgatcagggggtacactcaagctgtgggtcccttaccccagccttgagatcccaggaaggcctgcagcctgaaacgggccttgaaaggtgcgtagtttctctgaaaagcatcacccaggtcagaatgaaaggaaactctctgtgcagaccgctgtatgtgggacctttgaagacagtcaaatagtgttcaattctatagggatcttctctggatcaagcaatggtggtgaaaaatgtttcgcaagggcaaaaaacgacacagtagtagcagttcccaaagtagcgaaatcagtactaagagcaagtctgtggattctagccttgggggtctttcacgatccagcactgtggccagcctcgacacagattccaccaaaagctcaggacaaagcaacaataattcagatacctgtgcagaatttcgaataaaatatgttggtgccattgagaaactgaaactctccgagggaaaaggccttgaagggccattagacctgataaattatatagacgttgcccagcaagatggaaagttgccttttgttcctccggaggaagaatttattatgggagtttccaagtatggcataaaagtatcaacatcagatcaatatgaacaagcacaagccatttgcaaggttttatccaccgcttttgactctgtattaacatctgagaaaccctgaatcctgcaatcaagtagaagtcaacttcatctgaaagttcagctgttttcaaactgcaatgctgaaatgttatgcaaataatgaagttatcccttgctctagattttctgaagaaaatggattgtgtaaaatgctgatcatttgtttattaaaatgtgtcctattacacagtgagttaactctcaatgaagtcatctattttctgggctaaaaaacttcatttgtctttttcaacttctaataagcttaacctaagtgtcacagaagcctaggtgtcacagaggtccactcagtgacaaacacacactgaaggcctgaggaagacgagatgtcacagaggtccactcagtgacaaacacacactgaaggcctgaggaagacgagatgtcacagaggtccactcagtgacaaacacacactgaaggcctgaggaagacgagatgtcacagaggtccactcagtgacacacactgaaggcctgaggaagactgaggacatgggctcagtggtggcttcccagtcatggtatcactggcatggacctctgtccggcagaggtgtggactggagaccaggattcatgctggtctggaacaatgacattgccaacttaagacacacaaagcagattttcagaagtgtctggtcaagataacatgctggccaaccacaattcctagagttaagagaaccttaaaagattaccgctcatgctaaaagtatgtaaagatcccatgtacagtatgatagtgtactttttttaaaggactgtcaatatacaaaactttaaagattaaaaacattaaaaataaaaccatgtccatttaaaagt

SEQ ID NO: 292348 - DNA, 658 bp, Homo sapiens
  misc_feature (21)..(22): n is a, c, g, or t
ccatcgagctcggcccacgtnnaagtgacaaagcaacaataattcagatacctgtgcagaatttcgaataaaatatgttggtgccattgagaaactgaaactctccgagggaaaaggccttgaagggccattagacctgataaattatatagacgttgcccagcaagatggaaagttgccttttgttcctccggaggaagaatttattatgggagtttccaagtatggcataaaagtatcaacatcagatcaatatgatgttttgcacaggcatgctctctacttaataatccggatggtgtgttacgatgacggtctgggggcgggaaaaagcttactggctctgaagaccacagatgcaagcaatgaggaatacagcctgtgggtttatcagtgcaacagcctggaacaagcacaagccatttgcaaggttttatccaccgcttttgactctgtattaacatctgagaaaccctgaatcctgcaatcaagtagaagtcaacttcatctgaaagttcagctgttttcaaactgcaatgctgaaatgttatgcaaataatgaagttatcccttgctctagattttctgaagaaaatggattgtgtaaaatgctgatcatttgtttattaaaatgtgtcctattacacagtgagttaac

SEQ ID NO: 292349 - DNA, 1541 bp, Homo sapiens
ggctcgggcttggttccgggcggggccgcgctcccggggcgcgggtggaggagcttggaaccgcagatcgggcgtgggcttgcggactgcagcttcccgagccgctgtcgccccggaggggcggcaaggcgggcggccgcgggccgtttccttgcctcttcctctgccccgcttcggccgcctcccgcctctcagggtcggggttgtctgtccccttcgctgtcacatcctccgcacccagcgcttggaaggtgctccatcacggtgacagacaggtgccaagcaggctggcgtctgggaggaacttcggagccggctctccctaggccccgagcttggccgcatccgtccttactctggtgaccctgggcaggtcactgactcttcgggcgctttggcatcctcgtttgaaaggggctgttatcctgcagccttgctggtcggtgagggtgagggtgagagggatctgtgcacctagcaccgtgcatggcacgtggtaggcgtttggtacatgggaatcgctgttggggtgtcacctccccagaaagttctcggcttcagtaagcgcgtcccctgccaggcgccctggcaatgcagaggagtcaccgagctccgcctttgaccagcgtgcagctgggagagtgagatcagagaccacagcagatcgtggcgctgtgatcagggggtacactcaagctgtgggtcccttaccccagccttgagatcccaggaaggcctgcagcctgaaacgggccttgaaaggtgcgtagtttctctgaaaagcatcacccaggtcagaatgaaaggaaactctctgtgcagaccgctgtatgtgggacctttgaagacagtcaaatagtgttcaattctatagggatcttctctggatcaagcaatggtggtgaaaaatgtttcgcaagggcaaaaaacgacacagtagtagcagttcccaaagtagcgaaatcagtactaagagcaagtctgtggattctagccttgggggtctttcacgatccagcactgtggccagcctcgacacagattccaccaaaagctcaggacaaagcaacaataattcagatacctgtgcagaatttcgaataaaatatgttggtgccattgagaaactgaaactctccgagggaaaaggccttgaagggccattagacctgataaattatatagacgttgcccagcaagatggaaagttgccttttgttcctccggaggaagaatttattatgggagtttccaagtatggcataaaagtatcaacatcagatcaatatgaacaagcacaagccatttgcaaggttttatccaccgcttttgactctgtattaacatctgagaaaccctgaatcctgcaatcaagtagaagtcaacttcatctgaaagttcagctgttttcaaactgcaatgctgaaatgttatgcaaataatgaagttatcccttgctctagattttctgaagaaaatggattgtgtaaaatgctgatcatttgtttattaaaatgtgtcctattacacagtgagttaac

SEQ ID NO: 292350 - DNA, 1337 bp, Homo sapiens
ggctcgggcttggttccgggcggggccgcgctcccggggcgcgggtggaggagcttggaaccgcagatcgggcgtgggcttgcggactgcagcttcccgagccgctgtcgccccggaggggcggcaaggcgggcggccgcgggccgtttccttgcctcttcctctgccccgcttcggccgcctcccgcctctcagggtcggggttgtctgtccccttcgctgtcacatcctccgcacccagcgcttggaaggtgctccatcacggtgacagacaggtgccaagcaggctggcgtctgggaggaacttcggagccggctctccctaggccccgagcttggccgcatccgtccttactctggtgaccctgggcaggtcactgactcttcgggcgctttggcatcctcgtttgaaaggggctgttatcctgcagccttgctggtcggtgagggtgagggtgagagggatctgtgcacctagcaccgtgcatggcacgtggtaggcgtttggtacatgggaatcgctgttggggtgtcacctccccagaaagttctcggcttcagtaagcgcgtcccctgccaggcgccctggcaatgcagaggagtcaccgagctccgcctttgaccagcgtgcagctgggagagtgagatcagagaccacagcagatcgtggcgctgtgatcagggggtacactcaagctgtgggtcccttaccccagccttgagatcccaggaaggcctgcagcctgaaacgggccttgaaaggtgcgtagtttctctgaaaagcatcacccaggtcagaatgaaaggaaactctctgtgcagaccgctgtatgtgggacctttgaagacagtcaaatagtgttcaattctatagggatcttctctggatcaagcaatggtggtgaaaaatgtttcgcaagggcaaaaaacgacacagtagtagcagttcccaaagtagcgaaatcagtactaagagcaagtctgtggattctagccttgggggtctttcacgatccagcactgtggccagcctcgacacagattccaccaaaagctcaggacaaagcaacaataattcagatacctgtgcagaatttcgaataaaatatgttggtgccattgagaaactgaaactctccgagggaaaaggccttgaagggccattagacctgataaattatatagacgttgcccagcaagatggaaagttgccttttgttcctccggaggaagaatttattatgggagtttccaagtatggcataaaagtatcaacatcagatcaatatatgttttgcacaggcatgctctctacttaatttaaaaaaaaaaatttt

SEQ ID NO: 292351 - DNA, 985 bp, Homo sapiens
ggctcgggcttggttccgggcggggccgcgctcccggggcgcgggtggaggagcttggaaccgcagatcgggcgtgggcttgcggactgcagcttcccgagccgctgtcgccccggaggggcggcaaggcgggcggccgcgggccgtttccttgcctcttcctctgccccgcttcggccgcctcccgcctctcagggtcggggttgtctgtccccttcgctgtcacatcctccgcacccagcgcttggaaggtgctccatcacggtgacagacaggtgccaagcaggctggcgtctgggaggaacttcggagccggctctccctaggccccgagcttggccgcatccgtccttactctggtgaccctgggcaggtcactgactcttcgggcgctttggcatcctcgtttgaaaggggctgttatcctgcagccttgctggtcggtgagggtgagggtgagagggatctgtgcacctagcaccgtgcatggcacgtggtaggcgtttggtacatgggaatcgctgttggggtgtcacctccccagaaagttctcggcttcagtaagcgcgtcccctgccaggcgccctggcaatgcagaggagtcaccgagctccgcctttgaccagcgtgcagctgggagagtgagatcagagaccacagcagatcgtggcgctgtgatcagggggtacactcaagctgtgggtcccttaccccagccttgagatcccaggaaggcctgcagcctgaaacgggccttgaaaggggatcttctctggatcaagcaatggtggtgaaaaatgtttcgcaagggcaaaaaacgacacagtagtagcagttcccaaagtagcgaaatcagtactaagagcaagtctgtggattctagccttgggggtctttcacgatccagcactgtggccagcctcgacacagattccaccaaaagctcagacgcgccatcgtgcgcctcgggatcctctagatcaac

SEQ ID NO: 292352 - DNA, 694 bp, Homo sapiens
aaaataaaaataacctttttgtaaatggggggaaatgtttcttctgcctctgggagagagactcttgcctggctaatgtgtaccccacattctttaaagggtttgggcttgcgatggccagatactcaaagtgactagtcagacttaagactattatgtaattttaatctttatcatggaatttatttttactttaaagcaagatggaaagttgccttttgttcctccggaggaagaatttattatgggagtttccaagtatggcataaaagtatcaacatcagatcaatatgatgttttgcacaggcatgctctctacttaataatccggatggtgtgttacgatgacggtctgggggcgggaaaaagcttactggctctgaagaccacagatgcaagcaatgaggaatacagcctgtgggtttatcagtgcaacagcctggaacaagcacaagccatttgcaaggttttatccaccgcttttgactctgtattaacatctgagaaaccctgaatcctgcaatcaagtagaagtcaacttcatctgaaagttcagctgttttcaaactgcaatgctgaaatgttatgcaaataatgaagttatcccttgctctagattttctgaagaaaatggattgtgtaaaatgctgatcatttgtttattaaaatgtgtcctattacacagtgagttaac

SEQ ID NO: 292353 - DNA, 1577 bp, Homo sapiens
aggcgcggcccggcggacgtgggcaggagggctggaaaagccggcgctggagcgggaacgggagtagctgcctgggcgccaaaggccgcggcactcccacgcggaccccgaagtccgcaacccggggatgggcccgcggctgcgaggtgcgtagtttctctgaaaagcatcacccaggtcagaatgaaaggaaactctctgtgcagaccgctgtatgtgggacctttgaagacagtcaaatagtgttcaattctatagggatcttctctggatcaagcaatggtggtgaaaaatgtttcgcaagggcaaaaaacgacacagtagtagcagttcccaaagtagcgaaatcagtactaagagcaagtctgtggattctagccttgggggtctttcacgatccagcactgtggccagcctcgacacagattccaccaaaagctcaggacaaagcaacaataattcagatacctgtgcagaatttcgaataaaatatgttggtgccattgagaaactgaaactctccgagggaaaaggccttgaagggccattagacctgataaattatatagacgttgcccagcaagatggaaagttgccttttgttcctccggaggaagaatttattatgggagtttccaagtatggcataaaagtatcaacatcagatcaatatgaacaagcacaagccatttgcaaggttttatccaccgcttttgactctgtattaacatctgagaaaccctgaatcctgcaatcaagtagaagtcaacttcatctgaaagttcagctgttttcaaactgcaatgctgaaatgttatgcaaataatgaagttatcccttgctctagattttctgaagaaaatggattgtgtaaaatgctgatcatttgtttattaaaatgtgtcctattacacagtgagttaactctcaatgaagtcatctattttctgggctaaaaaacttcatttgtctttttcaacttctaataagcttaacctaagtgtcacagaagcctaggtgtcacagaggtccactcagtgacaaacacacactgaaggcctgaggaagacgagatgtcacagaggtccactcagtgacaaacacacactgaaggcctgaggaagacgagatgtcacagaggtccactcagtgacaaacacacactgaaggcctgaggaagacgagatgtcacagaggtccactcagtgacacacactgaaggcctgaggaagactgaggacatgggctcagtggtggcttcccagtcatggtatcactggcatggacctctgtccggcagaggtgtggactggagaccaggattcatgctggtctggaacaatgacattgccaacttaagacacacaaagcagattttcagaagtgtctggtcaagataacatgctggccaaccacaattcctagagttaagagaaccttaaaagattaccgctcatgctaaaagtatgtaaagatcccatgtacagtatgatagtgtactttttttaaaggactgtcaatatacaaaactttaaagattaaaaacattaaaaataaaaccatgtccatttaaaagt

SEQ ID NO: 292354 - DNA, 1280 bp, Homo sapiens
aggcgcggcccggcggacgtgggcaggagggctggaaaagccggcgctggagcgggaacgggagtagctgcctgggcgccaaaggccgcggcactcccacgcggaccccgaagtccgcaacccggggatgggcccgcggctgcgaggacaaagcaacaataattcagatacctgtgcagaatttcgaataaaatatgttggtgccattgagaaactgaaactctccgagggaaaaggccttgaagggccattagacctgataaattatatagacgttgcccagcaagatggaaagttgccttttgttcctccggaggaagaatttattatgggagtttccaagtatggcataaaagtatcaacatcagatcaatatgaacaagcacaagccatttgcaaggttttatccaccgcttttgactctgtattaacatctgagaaaccctgaatcctgcaatcaagtagaagtcaacttcatctgaaagttcagctgttttcaaactgcaatgctgaaatgttatgcaaataatgaagttatcccttgctctagattttctgaagaaaatggattgtgtaaaatgctgatcatttgtttattaaaatgtgtcctattacacagtgagttaactctcaatgaagtcatctattttctgggctaaaaaacttcatttgtctttttcaacttctaataagcttaacctaagtgtcacagaagcctaggtgtcacagaggtccactcagtgacaaacacacactgaaggcctgaggaagacgagatgtcacagaggtccactcagtgacaaacacacactgaaggcctgaggaagacgagatgtcacagaggtccactcagtgacaaacacacactgaaggcctgaggaagacgagatgtcacagaggtccactcagtgacacacactgaaggcctgaggaagactgaggacatgggctcagtggtggcttcccagtcatggtatcactggcatggacctctgtccggcagaggtgtggactggagaccaggattcatgctggtctggaacaatgacattgccaacttaagacacacaaagcagattttcagaagtgtctggtcaagataacatgctggccaaccacaattcctagagttaagagaaccttaaaagattaccgctcatgctaaaagtatgtaaagatcccatgtacagtatgatagtgtactttttttaaaggactgtcaatatacaaaactttaaagattaaaaacattaaaaataaaaccatgtccatttaaaagt

SEQ ID NO: 292355 - DNA, 1196 bp, Homo sapiens
aaaataaaaataacctttttgtaaatggggggaaatgtttcttctgcctctgggagagagactcttgcctggctaatgtgtaccccacattctttaaagggtttgggcttgcgatggccagatactcaaagtgactagtcagacttaagactattatgtaattttaatctttatcatggaatttatttttactttaaagcaagatggaaagttgccttttgttcctccggaggaagaatttattatgggagtttccaagtatggcataaaagtatcaacatcagatcaatatgaacaagcacaagccatttgcaaggttttatccaccgcttttgactctgtattaacatctgagaaaccctgaatcctgcaatcaagtagaagtcaacttcatctgaaagttcagctgttttcaaactgcaatgctgaaatgttatgcaaataatgaagttatcccttgctctagattttctgaagaaaatggattgtgtaaaatgctgatcatttgtttattaaaatgtgtcctattacacagtgagttaactctcaatgaagtcatctattttctgggctaaaaaacttcatttgtctttttcaacttctaataagcttaacctaagtgtcacagaagcctaggtgtcacagaggtccactcagtgacaaacacacactgaaggcctgaggaagacgagatgtcacagaggtccactcagtgacaaacacacactgaaggcctgaggaagacgagatgtcacagaggtccactcagtgacaaacacacactgaaggcctgaggaagacgagatgtcacagaggtccactcagtgacacacactgaaggcctgaggaagactgaggacatgggctcagtggtggcttcccagtcatggtatcactggcatggacctctgtccggcagaggtgtggactggagaccaggattcatgctggtctggaacaatgacattgccaacttaagacacacaaagcagattttcagaagtgtctggtcaagataacatgctggccaaccacaattcctagagttaagagaaccttaaaagattaccgctcatgctaaaagtatgtaaagatcccatgtacagtatgatagtgtactttttttaaaggactgtcaatatacaaaactttaaagattaaaaacattaaaaataaaaccatgtccatttaaaagt

SEQ ID NO: 292356 - DNA, 581 bp, Homo sapiens
ggctcgggcttggttccgggcggggccgcgctcccggggcgcgggtggaggagcttggaaccgcagatcgggcgtgggcttgcggactgcagcttcccgagccgctgtcgccccggaggggcggcaaggcgggcggccgcgggccgtttccttgcctcttcctctgccccgcttcggccgcctcccgcctctcagggtcggggttgtctgtccccttcgctgtcacatcctccgcacccagcgcttggaaggtgctccatcacggtgacagacaggtgccaagcaggctggcgtctgggaggaacttcggagccggctctccctaggccccgagcttggccgcatccgtccttactctggtgaccctgggcaggtcactgactcttcgggcgctttggcatcctcgtttgaaaggggctgttatcctgcagccttgctggtcgggtgcgtagtttctctgaaaagcatcacccaggtcagaatgaaaggaaactctctgtgcagaccgctgtatgtgggacctttgaagacagtcaaatagtgttcaattctatagtaagcagattttcttgttctctctg

SEQ ID NO: 292357 - DNA, 475 bp, Homo sapiens
gaggccaagatggtaggatcgcttgagcccaggagttcaagaccagcctgggcaacgtagtgagaccctctctctaaggggaaaaaaaatggtgaagagggagaaagaaccaaaagtaaataccatgcgtcataaaggtaatcattatgtagtaaccttttctttactgtttgttttgaagggaaggttaatatatttattcctattattgagacctttgtatactatatttagtataccatgagtcactgaggaaaaggttagtgaaattttaagttcttccccattacataaaaatattgtgtattataaaatttgtaattagtggttatgttctaatgacagtctggtttttatttgggaagggactgaggatactctgtaatgcagatatttcttcttaagtcttaccacttttctttcatcttcaggacaaagcaacaataattcagatacctgtgcagaatttcgaata

SEQ ID NO: 292358 - DNA, 205 bp, Homo sapiens
gtcaccgagctccgcctttgaccagcgtgcagctgggagagtgagatcagagaccacagcagatcgtggcgctgtgatcagggggtacactcaagctgtgggtcccttaccccagccttgagatcccaggaaggcctgcagcctgaaacgggccttgaaaggtaagaagtagccaagtgcctgacaggtgaaggacgtcccgggc

SEQ ID NO: 292359 - DNA, 1172 bp, Homo sapiens
tttttctgtgtgtagcaattatgaatgggattatgttcttcatttgactctctgctttactgctaggaatttttgcacattgattttgtatgctaagactttgctaaagtttatcagcagaaggagctttggggctaagactatggggttttctagatatagaatcatgtcatctgtaaacagagacagtttgacttcctgtctattcctctcttccctcctctatttggatgcccttccagttttgcacattcagtgtaatgttggctgtgggtttgccatggctagctctcatcattttggcacttccgactagaagtgcgagaggggccagtgttgttgttacctgaaaggtaagtgcagcccacaaaaatgcagtgaagaagaagatatatgcatatgtttaagttaatacaattgagatacatttagcagacagaatcaatagagttgatgagtgactgactggatgtgtggggagtttatatcactcccaggtttttgacttgggcaaccgggcactcaagaaggaaaaagaggatccagggagaggaacttttctgaggactggggtagggctgaacagctgcattcgagactggtggagggtgggctgggcatgggatgcacaaatggaaattccactgggtctgcagctcacacataggcatgaccagcatagagatagagaggccccagtgctgctgagtaactgtgattccccaggtgatggcatcagctgagaagggaaggaagcccatgtgaggacactgaagaaggagtgagcagacaataagaagcccacagaagacagagaaggaacaactagagggagaagccaaggcagacactacccaaagcagtccttcactacagtggcagacagacctgaaaattttcatctgaagcagcagagtgaactgcagagtcagagatagaatctcactatgttgaccaggctggtcttgaactcttggcacccaagcgatccttttgcctggaatcccaaagtgtcagatttactgaagaatatttcattgtaattactttttatactttataggtcaagagctctgttttaaagacaaaatttattgaatatactttttcaaacaaagtttcatgttctaatcattgtctgatttcagcattaaatgaaacacagtaaagaa

SEQ ID NO: 292360 - DNA, 1118 bp, Homo sapiens
tttttctgtgtgtagcaattatgaatgggattatgttcttcatttgactctctgctttactgctaggaatttttgcacattgattttgtatgctaagactttgctaaagtttatcagcagaaggagctttggggctaagactatggggttttctagatatagaatcatgtcatctgtaaacagagacagtttgacttcctgtctattcctctcttccctcctctatttggatgcccttccagttttgcacattcagtgtaatgttggctgtgggtttgccatggctagctctcatcattttggcacttccgactagaagtgcgagaggggccagtgttgttgttacctgaaaggtaagtgcagcccacaaaaatgcagtgaagaagaagatatatgcatatgtttaagttaatacaattgagatacatttagcagacagaatcaatagagttgatgagtgactgactggatgtgtggggagtttatatcactcccaggtttttgacttgggcaaccgggcactcaagaaggaaaaagaggatccagggagaggaacttttctgaggactggggtagggctgaacagctgcattcgagactggtggagggtgggctgggcatgggatgcacaaatggaaattccactgggtctgcagctcacacataggcatgaccagcatagagatagagaggccccagtgctgctgagtaactgtgattccccaggtgatggcatcagctgagaagggaaggaagcccatgtgaggacactgaagaaggagtgagcagacaataagaagcccacagaagacagagaaggaacaactagagggagaagccaaggcagacactacccaaagcagtccttcactacagtggcagacagacctgaaaattttcatctgaagcagcagagtgaactgcagagtcagagatagaatctcactatgttgaccaggctggtcttgaactcttggcacccaagcgatccttttgcctggaatcccaaagtgtcagatttactgaagaatatttcattgtaattactttttatactttataggtcaagagctctgttttaaagacaaaatttattgaatatactttttcaaacaaag

SEQ ID NO: 292361 - DNA, 676 bp, Homo sapiens
ctttacaaaatcatttaacctttatgacaggagctactatggtgctcattccacagatgaggtgctgaggtttagtgaactgaatagcttgttcacagacagttggagacagagactcagtttgcccatacaaagataattttaaccaatagcattttacaatagaatatcataatacctatgaattctaaaaacattttattcaaatctctcttttaatattagcacctcttcaacctcttcttgactctaccaccaaatttatcttcctaatttctcttaccctgtaaatttctgtgtgtgtgtgtgtgtgtgtgtgtgtgtgtgtgtgtggagagagagagagagagatagagacagggaaagagtgagtttaccaaaaaaataagataggaaggttgtcgtaacatcttccatttctcaattctgaagtccccattttcatccctgggagagttgttctaggatagggtagctaaaggaacagagaaaatcagagtaatggaatcccaaagtgtcagatttactgaagaatatttcattgtaattactttttatactttataggtcaagagctctgttttaaagacaaaatttattgaatatactttttcaaacaaagtttcatgttctaatcattgtctgatttcagcattaaatgaaacacagtaaagaa

SEQ ID NO: 292362 - DNA, 1708 bp, Homo sapiens
tttttctgtgtgtagcaattatgaatgggattatgttcttcatttgactctctgctttactgctaggaatttttgcacattgattttgtatgctaagactttgctaaagtttatcagcagaaggagctttggggctaagactatggggttttctagatatagaatcatgtcatctgtaaacagagacagtttgacttcctgtctattcctctcttccctcctctatttggatgcccttccagttttgcacattcagtgtaatgttggctgtgggtttgccatggctagctctcatcattttggcacttccgactagaagtgcgagaggggccagtgttgttgttacctgaaaggtaagtgcagcccacaaaaatgcagtgaagaagaagatatatgcatatgtttaagttaatacaattgagatacatttagcagacagaatcaatagagttgatgagtgactgactggatgtgtggggagtttatatcactcccaggtttttgacttgggcaaccgggcactcaagaaggaaaaagaggatccagggagaggaacttttctgaggactggggtagggctgaacagctgcattcgagactggtggagggtgggctgggcatgggatgcacaaatggaaattccactgggtctgcagctcacacataggcatgaccagcatagagatagagaggccccagtgctgctgagtaactgtgattccccaggtgatggcatcagctgagaagggaaggaagcccatgtgaggacactgaagaaggagtgagcagacaataagaagcccacagaagacagagaaggaacaactagagggagaagccaaggcaggcatgtgtgataacatataggaactgagggagaggacatttcaagatggaggggatgccatacaacaggactatgtgatggtttttggctgtgtccataggaagtcacaacaggcaagggaaagaaaccagaacccagtcatggagttaagaagtgagtcagagaggagatgggtagggacagtgaggtaaggcctctttctaaggaagtttggctgaaggatagactagctggacacatgctggctgtgtggggtagagggaggaatgatggagggtaggagagccttgagcctgcgagaagagtctcctagaatagagaagctgaggttaaagttgtggaagacagtggggataactgagtgacagataatcaggagaagaaaaggagatccagaatcatgacagagagatgacctttgccaagagcacagccatctttcactgtcacagagaggtaggacaaaacgattggtgttcaagaattggtttgtagcacaatattttaactatgtcctttaaaaagtttctccacagacactacccaaagcagtccttcactacagtggcagacagacctgaaaattttcatctgaagcagcagagtgaactgcagagtcagagatagaatctcactatgttgaccaggctggtcttgaactcttggcacccaagcgatccttttgcctggaatcccaaagtgtcagatttactgaagaatatttcattgtaattactttttatactttataggtcaagagctctgttttaaagacaaaatttattgaatatactttttcaaacaaagtttcatgttctaatcattgtctgatttcagcattaaatgaaacacagtaaagaa

SEQ ID NO: 292363 - DNA, 1654 bp, Homo sapiens
tttttctgtgtgtagcaattatgaatgggattatgttcttcatttgactctctgctttactgctaggaatttttgcacattgattttgtatgctaagactttgctaaagtttatcagcagaaggagctttggggctaagactatggggttttctagatatagaatcatgtcatctgtaaacagagacagtttgacttcctgtctattcctctcttccctcctctatttggatgcccttccagttttgcacattcagtgtaatgttggctgtgggtttgccatggctagctctcatcattttggcacttccgactagaagtgcgagaggggccagtgttgttgttacctgaaaggtaagtgcagcccacaaaaatgcagtgaagaagaagatatatgcatatgtttaagttaatacaattgagatacatttagcagacagaatcaatagagttgatgagtgactgactggatgtgtggggagtttatatcactcccaggtttttgacttgggcaaccgggcactcaagaaggaaaaagaggatccagggagaggaacttttctgaggactggggtagggctgaacagctgcattcgagactggtggagggtgggctgggcatgggatgcacaaatggaaattccactgggtctgcagctcacacataggcatgaccagcatagagatagagaggccccagtgctgctgagtaactgtgattccccaggtgatggcatcagctgagaagggaaggaagcccatgtgaggacactgaagaaggagtgagcagacaataagaagcccacagaagacagagaaggaacaactagagggagaagccaaggcaggcatgtgtgataacatataggaactgagggagaggacatttcaagatggaggggatgccatacaacaggactatgtgatggtttttggctgtgtccataggaagtcacaacaggcaagggaaagaaaccagaacccagtcatggagttaagaagtgagtcagagaggagatgggtagggacagtgaggtaaggcctctttctaaggaagtttggctgaaggatagactagctggacacatgctggctgtgtggggtagagggaggaatgatggagggtaggagagccttgagcctgcgagaagagtctcctagaatagagaagctgaggttaaagttgtggaagacagtggggataactgagtgacagataatcaggagaagaaaaggagatccagaatcatgacagagagatgacctttgccaagagcacagccatctttcactgtcacagagaggtaggacaaaacgattggtgttcaagaattggtttgtagcacaatattttaactatgtcctttaaaaagtttctccacagacactacccaaagcagtccttcactacagtggcagacagacctgaaaattttcatctgaagcagcagagtgaactgcagagtcagagatagaatctcactatgttgaccaggctggtcttgaactcttggcacccaagcgatccttttgcctggaatcccaaagtgtcagatttactgaagaatatttcattgtaattactttttatactttataggtcaagagctctgttttaaagacaaaatttattgaatatactttttcaaacaaag

SEQ ID NO: 292364 - DNA, 2169 bp, Homo sapiens
tttttctgtgtgtagcaattatgaatgggattatgttcttcatttgactctctgctttactgctaggaatttttgcacattgattttgtatgctaagactttgctaaagtttatcagcagaaggagctttggggctaagactatggggttttctagatatagaatcatgtcatctgtaaacagagacagtttgacttcctgtctattcctctcttccctcctctatttggatgcccttccagttttgcacattcagtgtaatgttggctgtgggtttgccatggctagctctcatcattttggcacttccgactagaagtgcgagaggggccagtgttgttgttacctgaaaggtaagtgcagcccacaaaaatgcagtgaagaagaagatatatgcatatgtttaagttaatacaattgagatacatttagcagacagaatcaatagagttgatgagtgactgactggatgtgtggggagtttatatcactcccaggtttttgacttgggcaaccgggcactcaagaaggaaaaagaggatccagggagaggaacttttctgaggactggggtagggctgaacagctgcattcgagactggtggagggtgggctgggcatgggatgcacaaatggaaattccactgggtctgcagctcacacataggcatgaccagcatagagatagagaggccccagtgctgctgagtaactgtgattccccaggtgatggcatcagctgagaagggaaggaagcccatgtgaggacactgaagaaggagtgagcagacaataagaagcccacagaagacagagaaggaacaactagagggagaagccaaggcaggcatgtgtgataacatataggaactgagggagaggacatttcaagatggaggggatgccatacaacaggactatgtgatggtttttggctgtgtccataggaagtcacaacaggcaagggaaagaaaccagaacccagtcatggagttaagaagtgagtcagagaggagatgggtagggacagtgaggtaaggcctctttctaaggaagtttggctgaaggatagactagctggacacatgctggctgtgtggggtagagggaggaatgatggagggtaggagagccttgagcctgcgagaagagtctcctagaatagagaagctgaggttaaagttgtggaagacagtggggataactgagtgacagataatcaggagaagaaaaggagatccagaatcatgacagagagatgacctttgccaagagcacagccatctttcactgtcacagagaggtaggacaaaacgattggtgttcaagaattggtttgtagcacaatattttaactatgtcctttaaaaagtttctccacagacactacccaaagcagtccttcactacagtggcagacagacctgaaaattttcatctgaagcagcagagtgaactgcagagtcaggtaatttctagaaggcttgctttgttccattgatactgaagattattcatgaggccagtcttctgagatttctgtcatttctctcatgccaggtcaccaaccagtgtggaggctaaaagcgggcctctttggggattccaggtggaagtgttggacatctgtagtattcctggtctcaaatcatcctgatattcttcattttgttattcacattggactagggcaaggaaatgagttctgcaggaacaaagatcaccacaactggctccccttcaactatgttagatggcaacttgccttcagtatggtgaaacacatcagttaagactggggttgtgcatggcaggactttctacaaggacacccagtctccttaataaacatgagatgctctctttccagaagttctcttgcctgacacagcataggaagatgctgaacggccacacagtgacccattgagatagaatctcactatgttgaccaggctggtcttgaactcttggcacccaagcgatccttttgcctggaatcccaaagtgtcagatttactgaagaatatttcattgtaattactttttatactttataggtcaagagctctgttttaaagacaaaatttattgaatatactttttcaaacaaagtttcatgttctaatcattgtctgatttcagcattaaatgaaacacagtaaagaa

SEQ ID NO: 292365 - DNA, 1366 bp, Homo sapiens
ctttacaaaatcatttaacctttatgacaggagctactatggtgctcattccacagatgaggtgctgaggtttagtgaactgaatagcttgttcacagacagttggagacagagactcagtttgcccatacaaagataattttaaccaatagcattttacaatagaatatcataatacctatgaattctaaaaacattttattcaaatctctcttttaatattagcacctcttcaacctcttcttgactctaccaccaaatttatcttcctaatttctcttaccctgtaaatttctgtgtgtgtgtgtgtgtgtgtgtgtgtgtgtgtgtgtggagagagagagagagagatagagacagggaaagagtgagtttaccaaaaaaataagataggaaggttgtcgtaacatcttccatttctcaattctgaagtccccattttcatccctgggagagttgttctaggatagggtagctaaaggaacagagaaaatcagagtaatggaattagctaaaagggaaagtggtgacctgaagaccaaacactaaagaaggggccagtgaatggcaaagaaagtgcagagcaaaaaacatgcaggtagatggggtcctagttagtgaaggcccacaggctggagggtaaacccatgcaagggtcaagtttaatacagtgaaaatataagatgggagacctaccacagagaaccaacacttggcatgtttctgatgacagtgtttagattgcagtggttctaaaaattaagtgattttggaattggcattccatgtcattttaaaagataaatgataaagtaaatgttttattcagatctctctctccctccccacccacctttttccctccattcttctgtttttaatggggacgtttaaaatccaatctcacattaattttttcttaagtgtaaataatgggaaaacttcacttcgagagggggctcctcagtagacctccataatttcctggcttttactgccagttagtcatcaggaatagccatggctaagagagtaccaactgggcaagccagtgaattataccagtgcatctcagatttattgatttgtttaacttttgttttttgttcttttttttttttcagagagatagaatctcactatgttgaccaggctggtcttgaactcttggcacccaagcgatccttttgcctggaatcccaaagtgtcagatttactgaagaatatttcattgtaattactttttatactttataggtcaagagctctgttttaaagacaaaatttattgaatatactttttcaaacaaagtttcatgttctaatcattgtctgatttcagcattaaatgaaacacagtaaagaa

SEQ ID NO: 292366 - DNA, 2115 bp, Homo sapiens
tttttctgtgtgtagcaattatgaatgggattatgttcttcatttgactctctgctttactgctaggaatttttgcacattgattttgtatgctaagactttgctaaagtttatcagcagaaggagctttggggctaagactatggggttttctagatatagaatcatgtcatctgtaaacagagacagtttgacttcctgtctattcctctcttccctcctctatttggatgcccttccagttttgcacattcagtgtaatgttggctgtgggtttgccatggctagctctcatcattttggcacttccgactagaagtgcgagaggggccagtgttgttgttacctgaaaggtaagtgcagcccacaaaaatgcagtgaagaagaagatatatgcatatgtttaagttaatacaattgagatacatttagcagacagaatcaatagagttgatgagtgactgactggatgtgtggggagtttatatcactcccaggtttttgacttgggcaaccgggcactcaagaaggaaaaagaggatccagggagaggaacttttctgaggactggggtagggctgaacagctgcattcgagactggtggagggtgggctgggcatgggatgcacaaatggaaattccactgggtctgcagctcacacataggcatgaccagcatagagatagagaggccccagtgctgctgagtaactgtgattccccaggtgatggcatcagctgagaagggaaggaagcccatgtgaggacactgaagaaggagtgagcagacaataagaagcccacagaagacagagaaggaacaactagagggagaagccaaggcaggcatgtgtgataacatataggaactgagggagaggacatttcaagatggaggggatgccatacaacaggactatgtgatggtttttggctgtgtccataggaagtcacaacaggcaagggaaagaaaccagaacccagtcatggagttaagaagtgagtcagagaggagatgggtagggacagtgaggtaaggcctctttctaaggaagtttggctgaaggatagactagctggacacatgctggctgtgtggggtagagggaggaatgatggagggtaggagagccttgagcctgcgagaagagtctcctagaatagagaagctgaggttaaagttgtggaagacagtggggataactgagtgacagataatcaggagaagaaaaggagatccagaatcatgacagagagatgacctttgccaagagcacagccatctttcactgtcacagagaggtaggacaaaacgattggtgttcaagaattggtttgtagcacaatattttaactatgtcctttaaaaagtttctccacagacactacccaaagcagtccttcactacagtggcagacagacctgaaaattttcatctgaagcagcagagtgaactgcagagtcaggtaatttctagaaggcttgctttgttccattgatactgaagattattcatgaggccagtcttctgagatttctgtcatttctctcatgccaggtcaccaaccagtgtggaggctaaaagcgggcctctttggggattccaggtggaagtgttggacatctgtagtattcctggtctcaaatcatcctgatattcttcattttgttattcacattggactagggcaaggaaatgagttctgcaggaacaaagatcaccacaactggctccccttcaactatgttagatggcaacttgccttcagtatggtgaaacacatcagttaagactggggttgtgcatggcaggactttctacaaggacacccagtctccttaataaacatgagatgctctctttccagaagttctcttgcctgacacagcataggaagatgctgaacggccacacagtgacccattgagatagaatctcactatgttgaccaggctggtcttgaactcttggcacccaagcgatccttttgcctggaatcccaaagtgtcagatttactgaagaatatttcattgtaattactttttatactttataggtcaagagctctgttttaaagacaaaatttattgaatatactttttcaaacaaag

SEQ ID NO: 292367 - DNA, 1744 bp, Homo sapiens
tttttctgtgtgtagcaattatgaatgggattatgttcttcatttgactctctgctttactgctaggaatttttgcacattgattttgtatgctaagactttgctaaagtttatcagcagaaggagctttggggctaagactatggggttttctagatatagaatcatgtcatctgtaaacagagacagtttgacttcctgtctattcctctcttccctcctctatttggatgcccttccagttttgcacattcagtgtaatgttggctgtgggtttgccatggctagctctcatcattttggcacttccgactagaagtgcgagaggggccagtgttgttgttacctgaaaggtaagtgcagcccacaaaaatgcagtgaagaagaagatatatgcatatgtttaagttaatacaattgagatacatttagcagacagaatcaatagagttgatgagtgactgactggatgtgtggggagtttatatcactcccaggtttttgacttgggcaaccgggcactcaagaaggaaaaagaggatccagggagaggaacttttctgaggactggggtagggctgaacagctgcattcgagactggtggagggtgggctgggcatgggatgcacaaatggaaattccactgggtctgcagctcacacataggcatgaccagcatagagatagagaggccccagtgctgctgagtaactgtgattccccaggtgatggcatcagctgagaagggaaggaagcccatgtgaggacactgaagaaggagtgagcagacaataagaagcccacagaagacagagaaggaacaactagagggagaagccaaggcaggcatgtgtgataacatataggaactgagggagaggacatttcaagatggaggggatgccatacaacaggactatgtgatggtttttggctgtgtccataggaagtcacaacaggcaagggaaagaaaccagaacccagtcatggagttaagaagtgagtcagagaggagatgggtagggacagtgaggtaaggcctctttctaaggaagtttggctgaaggatagactagctggacacatgctggctgtgtggggtagagggaggaatgatggagggtaggagagccttgagcctgcgagaagagtctcctagaatagagaagctgaggttaaagttgtggaagacagtggggataactgagtgacagataatcaggagaagaaaaggagatccagaatcatgacagagagatgacctttgccaagagcacagccatctttcactgtcacagagaggtaggacaaaacgattggtgttcaagaattggtttgtagcacaatattttaactatgtcctttaaaaagtttctccacagacactacccaaagcagtccttcactacagtggcagacagacctgaaaattttcatctgaagcagcagagtgaactgcagagtcagagatagaatctcactatgttgaccaggctggtcttgaactcttggcacccaagcgatccttttgcctggaatcccaaagtgtcagatttactgaagaatatttcattgtaattactttttatactttataggtcaagagctctgttttaaagacaaaatttattgaatatactttttcaaacaaagtttcatgttctaatcattgtctgatttcagcattaaatgaaacacagtaaagaaggggaaaaaaatcacaaaaaaacaacacgaataact

SEQ ID NO: 292368 - DNA, 1312 bp, Homo sapiens
ctttacaaaatcatttaacctttatgacaggagctactatggtgctcattccacagatgaggtgctgaggtttagtgaactgaatagcttgttcacagacagttggagacagagactcagtttgcccatacaaagataattttaaccaatagcattttacaatagaatatcataatacctatgaattctaaaaacattttattcaaatctctcttttaatattagcacctcttcaacctcttcttgactctaccaccaaatttatcttcctaatttctcttaccctgtaaatttctgtgtgtgtgtgtgtgtgtgtgtgtgtgtgtgtgtgtggagagagagagagagagatagagacagggaaagagtgagtttaccaaaaaaataagataggaaggttgtcgtaacatcttccatttctcaattctgaagtccccattttcatccctgggagagttgttctaggatagggtagctaaaggaacagagaaaatcagagtaatggaattagctaaaagggaaagtggtgacctgaagaccaaacactaaagaaggggccagtgaatggcaaagaaagtgcagagcaaaaaacatgcaggtagatggggtcctagttagtgaaggcccacaggctggagggtaaacccatgcaagggtcaagtttaatacagtgaaaatataagatgggagacctaccacagagaaccaacacttggcatgtttctgatgacagtgtttagattgcagtggttctaaaaattaagtgattttggaattggcattccatgtcattttaaaagataaatgataaagtaaatgttttattcagatctctctctccctccccacccacctttttccctccattcttctgtttttaatggggacgtttaaaatccaatctcacattaattttttcttaagtgtaaataatgggaaaacttcacttcgagagggggctcctcagtagacctccataatttcctggcttttactgccagttagtcatcaggaatagccatggctaagagagtaccaactgggcaagccagtgaattataccagtgcatctcagatttattgatttgtttaacttttgttttttgttcttttttttttttcagagagatagaatctcactatgttgaccaggctggtcttgaactcttggcacccaagcgatccttttgcctggaatcccaaagtgtcagatttactgaagaatatttcattgtaattactttttatactttataggtcaagagctctgttttaaagacaaaatttattgaatatactttttcaaacaaag

SEQ ID NO: 292369 - DNA, 1393 bp, Homo sapiens
  misc_feature (1383)..(1383): n is a, c, g, or t
ctttacaaaatcatttaacctttatgacaggagctactatggtgctcattccacagatgaggtgctgaggtttagtgaactgaatagcttgttcacagacagttggagacagagactcagtttgcccatacaaagataattttaaccaatagcattttacaatagaatatcataatacctatgaattctaaaaacattttattcaaatctctcttttaatattagcacctcttcaacctcttcttgactctaccaccaaatttatcttcctaatttctcttaccctgtaaatttctgtgtgtgtgtgtgtgtgtgtgtgtgtgtgtgtgtgtggagagagagagagagagatagagacagggaaagagtgagtttaccaaaaaaataagataggaaggttgtcgtaacatcttccatttctcaattctgaagtccccattttcatccctgggagagttgttctaggatagggtagctaaaggaacagagaaaatcagagtaatggaattagctaaaagggaaagtggtgacctgaagaccaaacactaaagaaggggccagtgaatggcaaagaaagtgcagagcaaaaaacatgcaggtagatggggtcctagttagtgaaggcccacaggctggagggtaaacccatgcaagggtcaagtttaatacagtgaaaatataagatgggagacctaccacagagaaccaacacttggcatgtttctgatgacagtgtttagattgcagtggttctaaaaattaagtgattttggaattggcattccatgtcattttaaaagataaatgataaagtaaatgttttattcagatctctctctccctccccacccacctttttccctccattcttctgtttttaatggggacgtttaaaatccaatctcacattaattttttcttaagtgtaaataatgggaaaacttcacttcgagagggggctcctcagtagacctccataatttcctggcttttactgccagttagtcatcaggaatagccatggctaagagagtaccaactgggcaagccagtgaattataccagtgcatctcagatttattgatttgtttaacttttgttttttgttcttttttttttttcagagagatagaatctcactatgttgaccaggctggtcttgaactcttggcacccaagcgatccttttgcctggaatcccaaagtgtcagatttactgaagaatatttcattgtaattactttttatactttataggtcaagagctctgttttaaagacaaaatttattgaatatactttttcaaacaaagtttcatgttctaatcattgtctgatttcagcattaaatgaaacacagtaaagaaggggggaggggaaaaanaaaagataac

SEQ ID NO: 292370 - DNA, 1455 bp, Homo sapiens
tttttctgtgtgtagcaattatgaatgggattatgttcttcatttgactctctgctttactgctaggaatttttgcacattgattttgtatgctaagactttgctaaagtttatcagcagaaggagctttggggctaagactatggggttttctagatatagaatcatgtcatctgtaaacagagacagtttgacttcctgtctattcctctcttccctcctctatttggatgcccttccagttttgcacattcagtgtaatgttggctgtgggtttgccatggctagctctcatcattttggcacttccgactagaagtgcgagaggggccagtgttgttgttacctgaaaggtaagtgcagcccacaaaaatgcagtgaagaagaagatatatgcatatgtttaagttaatacaattgagatacatttagcagacagaatcaatagagttgatgagtgactgactggatgtgtggggagtttatatcactcccaggtttttgacttgggcaaccgggcactcaagaaggaaaaagaggatccagggagaggaacttttctgaggactggggtagggctgaacagctgcattcgagactggtggagggtgggctgggcatgggatgcacaaatggaaattccactgggtctgcagctcacacataggcatgaccagcatagagatagagaggccccagtgctgctgagtaactgtgattccccaggtgatggcatcagctgagaagggaaggaagcccatgtgaggacactgaagaaggagtgagcagacaataagaagcccacagaagacagagaaggaacaactagagggagaagccaaggcaggcatgtgtgataacatataggaactgagggagaggacatttcaagatggaggggatgccatacaacaggactatgtgatggtttttggctgtgtccataggaagtcacaacaggcaagggaaagaaaccagaacccagtcatggagttaagaagtgagtcagagaggagatgggtagggacagtgaggtaaggcctctttctaaggaagtttggctgaaggatagactagctggacacatgctggctgtgtggggtagagggaggaatgatggagggtaggagagccttgagcctgcgagaagagtctcctagaatagagaagctgaggttaaagttgtggaagacagtggggataactgagtgacagataatcaggagaagaaaaggagatccagaatcatgacagagagatgacctttgccaagagcacagccatctttcactgtcacagagaggtaggacaaaacgattggtgttcaagaattggtttgtaggctaccagctgctgtctgatggtgtctcctgtgaagatgtcaatgaatgcatcactgggcagccactagctggccggcttggagaatccttgcatcaacactatgtggtctct

SEQ ID NO: 292371 - DNA, 473 bp, Homo sapiens
atgcagtggcacgatctcggcttactgcctcccgagttcaagctattctcctgcctcagcttcccaagtagctggaattacaggcatgcaccaccacgcccagctaatttttttatttttagtagagacagggtttcaccatattggccaggctggtctcagactcctgacctgaagtgatctgcccacctcggcctcttgaagtgctgggattacaggcatgagccatcgcgctcggctgattctccctagaatccactcttagcagagtgtccaagatgttcctaccaagagcagtggtggtacctggcagctgcccagtgactgactgggatgaagtatgggcaatatggcccaggcctgggctgttagatggtggggtgcaggggaggcaggggcaggggcagataccctacccctcaacccattaagagggaaaccaaagtccgactacccaccaggcagatgtgttc

SEQ ID NO: 292372 - DNA, 668 bp, Homo sapiens
agcgcctgccagtgacgtcgtgggctgcagcgcagcagcacccaacgcatctagcaggaaaggagagggagctttccccgaagaccctcctggaccagccccaggctcctgtgctggttgcacgccagggcctgtactgaccacctccacgtgccactggggctgtaaggaggaatggcggccgtgggcagcctgcttggccggctgaggcagagcaccgtgaaggccaccggacctgcactccgccgcctgcacacatcctcctggcgagctgacagcagcagggcctcactcactcgtgtgcaccgccaggcttatgcacgactctaccccgtgctgctggtgaagcaggatggctccaccatccacatccgctacagggagccacggcgcatgctggcgatgcccatagatctggacaccctgtctcctgaggagcgccgggccaggctgcggaagcgtgaggctcagctccagtcgaggaaggagtacgagcaggagctcagtgatgacttgcatgtggagcgctaccgacagttctggaccaggaccaagaagtgaccgtggctccagccaccccgggacattgctaagatgggagggctgttcttaaatcactcgttcttgaagctgcaaaaaaaaaaaaaaacaaaaaaaaaaaaaaaaaa

SEQ ID NO: 292373 - DNA, 901 bp, Homo sapiens
agcgcctgccagtgacgtcgtgggctgcagcgcagcagcacccaacgcagtgagtaccttgatctcctgcgtggcctcgtccctggtcttagttccaccgggcagcgggagtcaggaccgcctgtcctcagacccctccgcagcgactgtggcggccgcaggttgcacgccagggcctgtactgaccacctccacgtgccactggggctgtaaggaggaatggcggccgtgggcagcctgcttggccggctgaggcagagcaccgtgaaggccaccggacctgcactccgccgcctgcacacatcctcctggcgagctgacagcagcagggcctcactcactcgtgtgcaccgccaggcttatgcacgactctaccccgtgctgctggtgaagcaggatggctccaccatccacatccgctacagggagccacggcgcatgctggcgatgcccatagatctggacaccctgtctcctgaggagcgccgggccaggctgcggaagcgtgaggctcagctccagtcgaggaaggagtacgagcaggagctcagtgatgacttgcatgtggagcgctaccgacagttctggaccaggaccaagaagtgaccgtggctccagccaccccgggacattgctaagatgggagggctgttcttaaatcactcgttcttgaagctgcaaaaaaaaaaaaaccagaaacacacaacgagaaaaaaaaaaaaacaaagaaaaaaacgacacagacaggagaaagaaacagagccagcgcgcgacacacggagcgacaaaagcgagcgacgagggcagagcgagagagtagagcgagaaacacgaagagacaggagaaagaggagaggagcgaccggcacacgagcgaccaaaaaaagaagaggagacacac

SEQ ID NO: 292374 - DNA, 780 bp, Homo sapiens
agcgcctgccagtgacgtcgtgggctgcagcgcagcagcacccaacgcagtgagtaccttgatctcctgcgtggcctcgtccctggtcttagttccaccgggcagcgggagtcaggaccgcctgtcctcagacccctccgcagcgactgtggcggccgcagtctagcaggaaaggagagggagctttccccgaagaccctcctggaccagccccaggctcctgtgctggttgcacgccagggcctgtactgaccacctccacgtgccactggggctgtaaggaggaatggcggccgtgggcagcctgcttggccggctgaggcagagcaccgtgaaggccaccggacctgcactccgccgcctgcacacatcctcctggcgagctgacagcagcagggcctcactcactcgtgtgcaccgccaggcttatgcacgactctaccccgtgctgctggtgaagcaggatggctccaccatccacatccgctacagggagccacggcgcatgctggcgatgcccatagatctggacaccctgtctcctgaggagcgccgggccaggctgcggaagcgtgaggctcagctccagtcgaggaaggagtacgagcaggagctcagtgatgacttgcatgtggagcgctaccgacagttctggaccaggaccaagaagtgaccgtggctccagccaccccgggacattgctaagatgggagggctgttcttaaatcactcgttcttgaagctgcaaaaaaaaaaaaaaacaaaaaaaaaaaaaaaaaa

SEQ ID NO: 292375 - DNA, 907 bp, Homo sapiens
agcgcctgccagtgacgtcgtgggctgcagcgcagcagcacccaacgcagtgagtaccttgatctcctgcgtggcctcgtccctggtcttagttccaccgggcagcgggagtcaggaccgcctgtcctcagacccctccgcagcgactgtggcggccgcaggttggcgcctcgtgtgggccgggaacagaggcgggaggcgctgtaccctcccggtggagtcgggagggagggaggcagggaaggggacagggggctgcacctgtaataagcccttgtccccatgcagtctagcaggaaaggagagggagctttccccgaagaccctcctggaccagccccaggctcctgtgctggttgcacgccagggcctgtactgaccacctccacgtgccactggggctgtaaggaggaatggcggccgtgggcagcctgcttggccggctgaggcagagcaccgtgaaggccaccggacctgcactccgccgcctgcacacatcctcctggcgagctgacagcagcagggcctcactcactcgtgtgcaccgccaggcttatgcacgactctaccccgtgctgctggtgaagcaggatggctccaccatccacatccgctacagggagccacggcgcatgctggcgatgcccatagatctggacaccctgtctcctgaggagcgccgggccaggctgcggaagcgtgaggctcagctccagtcgaggaaggagtacgagcaggagctcagtgatgacttgcatgtggagcgctaccgacagttctggaccaggaccaagaagtgaccgtggctccagccaccccgggacattgctaagatgggagggctgttcttaaatcactcgttcttgaagctgcaaaaaaaaaaaaaaacaaaaaaaaaaaaaaaaaa

SEQ ID NO: 292376 - DNA, 1425 bp, Homo sapiens
agcgcctgccagtgacgtcgtgggctgcagcgcagcagcacccaacgcagtgagtaccttgatctcctgcgtggcctcgtccctggtcttagttccaccgggcagcgggagtcaggaccgcctgtcctcagacccctccgcagcgactgtggcggccgcaggttggcgcctcgtgtgggccgggaacagaggcgggaggcgctgtaccctcccggtggagtcgggagggagggaggcagggaaggggacagggggctgcacctgtaataagcccttgtccccatgcagtctagcaggaaaggagagggagctttccccgaagaccctcctggaccagccccaggctcctgtgctggtgaggccgagggagagggatgtgggcataggacacgtagcaggatttccattttagaggcagccggacctgtcttcaggtcccttccttggtgagagacaggggtacgccagaggaagctgggcgctcggcctctgtgcagcctcatctcctggaatctgagtattgaaaactgggcttttacttcgcacacctcagcacagactcccatgggaatccaggtcacagcaaagcagccctgggcctccattctcctttaagcaagcatgacaatcctcacttcactgagtttttattaaaactagcaatgaccttagaaagcaaggcatgacctcagctccacttttgaggctgcagtccattcagagaggtttcgcagactcggtaacggccagaacagacagcctgggccctgccgcaggctgactcagaatctttgggagtagtgaccaacttctgcttttggaaaaacctctacaggcggttctgagaagtccaagggttgctgggagaggttggttgcacgccagggcctgtactgaccacctccacgtgccactggggctgtaaggaggaatggcggccgtgggcagcctgcttggccggctgaggcagagcaccgtgaaggccaccggacctgcactccgccgcctgcacacatcctcctggcgagctgacagcagcagggcctcactcactcgtgtgcaccgccaggcttatgcacgactctaccccgtgctgctggtgaagcaggatggctccaccatccacatccgctacagggagccacggcgcatgctggcgatgcccatagatctggacaccctgtctcctgaggagcgccgggccaggctgcggaagcgtgaggctcagctccagtcgaggaaggagtacgagcaggagctcagtgatgacttgcatgtggagcgctaccgacagttctggaccaggaccaagaagtgaccgtggctccagccaccccgggacattgctaagatgggagggctgttcttaaatcactcgttcttgaagctgcaaaaaaaaaaaaaaacaaaaaaaaaaaaaaaaaa

SEQ ID NO: 292377 - DNA, 1298 bp, Homo sapiens
agcgcctgccagtgacgtcgtgggctgcagcgcagcagcacccaacgcagtgagtaccttgatctcctgcgtggcctcgtccctggtcttagttccaccgggcagcgggagtcaggaccgcctgtcctcagacccctccgcagcgactgtggcggccgcagtctagcaggaaaggagagggagctttccccgaagaccctcctggaccagccccaggctcctgtgctggtgaggccgagggagagggatgtgggcataggacacgtagcaggatttccattttagaggcagccggacctgtcttcaggtcccttccttggtgagagacaggggtacgccagaggaagctgggcgctcggcctctgtgcagcctcatctcctggaatctgagtattgaaaactgggcttttacttcgcacacctcagcacagactcccatgggaatccaggtcacagcaaagcagccctgggcctccattctcctttaagcaagcatgacaatcctcacttcactgagtttttattaaaactagcaatgaccttagaaagcaaggcatgacctcagctccacttttgaggctgcagtccattcagagaggtttcgcagactcggtaacggccagaacagacagcctgggccctgccgcaggctgactcagaatctttgggagtagtgaccaacttctgcttttggaaaaacctctacaggcggttctgagaagtccaagggttgctgggagaggttggttgcacgccagggcctgtactgaccacctccacgtgccactggggctgtaaggaggaatggcggccgtgggcagcctgcttggccggctgaggcagagcaccgtgaaggccaccggacctgcactccgccgcctgcacacatcctcctggcgagctgacagcagcagggcctcactcactcgtgtgcaccgccaggcttatgcacgactctaccccgtgctgctggtgaagcaggatggctccaccatccacatccgctacagggagccacggcgcatgctggcgatgcccatagatctggacaccctgtctcctgaggagcgccgggccaggctgcggaagcgtgaggctcagctccagtcgaggaaggagtacgagcaggagctcagtgatgacttgcatgtggagcgctaccgacagttctggaccaggaccaagaagtgaccgtggctccagccaccccgggacattgctaagatgggagggctgttcttaaatcactcgttcttgaagctgcaaaaaaaaaaaaaaacaaaaaaaaaaaaaaaaaa

SEQ ID NO: 292378 - DNA, 1168 bp, Homo sapiens
ggtgggctgcagcgcagcagcacccaacgcatctagcaggaaaggagagggagctttccccgaagaccctcctggaccagccccaggctcctgtgctggtgaggccgagggagagggatgtgggcataggacacgtagcaggatttccattttagaggcagccggacctgtcttcaggtcccttccttggtgagagacaggggtacgccagaggaagctgggcgctcggcctctgtgcagcctcatctcctggaatctgagtattgaaaactgggcttttacttcgcacacctcagcacagactcccatgggaatccaggtcacagcaaagcagccctgggcctccattctcctttaagcaagcatgacaatcctcacttcactgagtttttattaaaactagcaatgaccttagaaagcaaggcatgacctcagctccacttttgaggctgcagtccattcagagaggtttcgcagactcggtaacggccagaacagacagcctgggccctgccgcaggctgactcagaatctttgggagtagtgaccaacttctgcttttggaaaaacctctacaggcggttctgagaagtccaagggttgctgggagaggttggttgcacgccagggcctgtactgaccacctccacgtgccactggggctgtaaggaggaatggcggccgtgggcagcctgcttggccggctgaggcagagcaccgtgaaggccaccggacctgcactccgccgcctgcacacatcctcctggcgagctgacagcagcagggcctcactcactcgtgtgcaccgccaggcttatgcacgactctaccccgtgctgctggtgaagcaggatggctccaccatccacatccgctacagggagccacggcgcatgctggcgatgcccatagatctggacaccctgtctcctgaggagcgccgggccaggctgcggaagcgtgaggctcagctccagtcgaggaaggagtacgagcaggagctcagtgatgacttgcatgtggagcgctaccgacagttctggaccaggaccaagaagtgaccgtggctccagccaccccgggacattgctaagatgggagggctgttcttaaatcactcgttcttgaagctgcaaaaaaaaaaaaaaacaaaaaaaaaaaaaaaaaa

SEQ ID NO: 292379 - DNA, 818 bp, Homo sapiens
agcgcctgccagtgacgtcgtgggctgcagcgcagcagcacccaacgcagtgagtaccttgatctcctgcgtggcctcgtccctggtcttagttccaccgggcagcgggagtcaggaccgcctgtcctcagacccctccgcagcgactgtggcggccgcagtctagcaggaaaggagagggagctttccccgaagaccctcctggaccagccccaggctcctgtgctggcggttctgagaagtccaagggttgctgggagaggttggttgcacgccagggcctgtactgaccacctccacgtgccactggggctgtaaggaggaatggcggccgtgggcagcctgcttggccggctgaggcagagcaccgtgaaggccaccggacctgcactccgccgcctgcacacatcctcctggcgagctgacagcagcagggcctcactcactcgtgtgcaccgccaggcttatgcacgactctaccccgtgctgctggtgaagcaggatggctccaccatccacatccgctacagggagccacggcgcatgctggcgatgcccatagatctggacaccctgtctcctgaggagcgccgggccaggctgcggaagcgtgaggctcagctccagtcgaggaaggagtacgagcaggagctcagtgatgacttgcatgtggagcgctaccgacagttctggaccaggaccaagaagtgaccgtggctccagccaccccgggacattgctaagatgggagggctgttcttaaatcactcgttcttgaagctgcaaaaaaaaaaaaaaacaaaaaaaaaaaaaaaaaa

SEQ ID NO: 292380 - DNA, 1284 bp, Homo sapiens
ggtgggctgcagcgcagcagcacccaacgcatctagcaggaaaggagagggagctttccccgaagaccctcctggaccagccccaggctcctgtgctggtgaggccgagggagagggatgtgggcataggacacgtagcaggatttccattttagaggcagccggacctgtcttcaggtcccttccttggtgagagacaggggtacgccagaggaagctgggcgctcggcctctgtgcagcctcatctcctggaatctgagtattgaaaactgggcttttacttcgcacacctcagcacagactcccatgggaatccaggtcacagcaaagcagccctgggcctccattctcctttaagcaagcatgacaatcctcacttcactgagtttttattaaaactagcaatgaccttagaaagcaaggcatgacctcagctccacttttgaggctgcagtccattcagagaggtttcgcagactcggtaacggccagaacagacagcctgggccctgccgcaggctgactcagaatctttgggagtagtgaccaacttctgcttttggaaaaacctctacaggcggttctgagaagtccaagggttgctgggagaggttggtgagtggcgtggtgattacatgtgtcttggaagcatcctgggctgggatttgataagaaaccattaggtggaagaaccttccttttaaaaaagatctcttcattctctgcctagcgttgcacgccagggcctgtactgaccacctccacgtgccactggggctgtaaggaggaatggcggccgtgggcagcctgcttggccggctgaggcagagcaccgtgaaggccaccggacctgcactccgccgcctgcacacatcctcctggcgagctgacagcagcagggcctcactcactcgtgtgcaccgccaggcttatgcacgactctaccccgtgctgctggtgaagcaggatggctccaccatccacatccgctacagggagccacggcgcatgctggcgatgcccatagatctggacaccctgtctcctgaggagcgccgggccaggctgcggaagcgtgaggctcagctccagtcgaggaaggagtacgagcaggagctcagtgatgacttgcatgtggagcgctaccgacagttctggaccaggaccaagaagtgaccgtggctccagccaccccgggacattgctaagatgggagggctgttcttaaatcactcgttcttgaagctgcaaaaaaaaaaaaaaacaaaaaaaaaaaaaaaaaa

SEQ ID NO: 292381 - DNA, 1062 bp, Homo sapiens
agcgcctgccagtgacgtcgtgggctgcagcgcagcagcacccaacgcaaggcagccggacctgtcttcaggtcccttccttggtgagagacaggggtacgccagaggaagctgggcgctcggcctctgtgcagcctcatctcctggaatctgagtattgaaaactgggcttttacttcgcacacctcagcacagactcccatgggaatccaggtcacagcaaagcagccctgggcctccattctcctttaagcaagcatgacaatcctcacttcactgagtttttattaaaactagcaatgaccttagaaagcaaggcatgacctcagctccacttttgaggctgcagtccattcagagaggtttcgcagactcggtaacggccagaacagacagcctgggccctgccgcaggctgactcagaatctttgggagtagtgaccaacttctgcttttggaaaaacctctacaggcggttctgagaagtccaagggttgctgggagaggttggttgcacgccagggcctgtactgaccacctccacgtgccactggggctgtaaggaggaatggcggccgtgggcagcctgcttggccggctgaggcagagcaccgtgaaggccaccggacctgcactccgccgcctgcacacatcctcctggcgagctgacagcagcagggcctcactcactcgtgtgcaccgccaggcttatgcacgactctaccccgtgctgctggtgaagcaggatggctccaccatccacatccgctacagggagccacggcgcatgctggcgatgcccatagatctggacaccctgtctcctgaggagcgccgggccaggctgcggaagcgtgaggctcagctccagtcgaggaaggagtacgagcaggagctcagtgatgacttgcatgtggagcgctaccgacagttctggaccaggaccaagaagtgaccgtggctccagccaccccgggacattgctaagatgggagggctgttcttaaatcactcgttcttgaagctgcaaaaaaaaaaaaaaacaaaaaaaaaaaaaaaaaa

SEQ ID NO: 292382 - DNA, 751 bp, Homo sapiens
agcgcctgccagtgacgtcgtgggctgcagcgcagcagcacccaacgcagtgagtaccttgatctcctgcgtggcctcgtccctggtcttagttccaccgggcagcgggagtcaggaccgcctgtcctcagacccctccgcagcgactgtggcggccgcaggcggttctgagaagtccaagggttgctgggagaggttggttgcacgccagggcctgtactgaccacctccacgtgccactggggctgtaaggaggaatggcggccgtgggcagcctgcttggccggctgaggcagagcaccgtgaaggccaccggacctgcactccgccgcctgcacacatcctcctggcgagctgacagcagcagggcctcactcactcgtgtgcaccgccaggcttatgcacgactctaccccgtgctgctggtgaagcaggatggctccaccatccacatccgctacagggagccacggcgcatgctggcgatgcccatagatctggacaccctgtctcctgaggagcgccgggccaggctgcggaagcgtgaggctcagctccagtcgaggaaggagtacgagcaggagctcagtgatgacttgcatgtggagcgctaccgacagttctggaccaggaccaagaagtgaccgtggctccagccaccccgggacattgctaagatgggagggctgttcttaaatcactcgttcttgaagctgcaaaaaaaaaaaaaaacaaaaaaaaaaaaaaaaaa

SEQ ID NO: 292383 - DNA, 713 bp, Homo sapiens
agcgcctgccagtgacgtcgtgggctgcagcgcagcagcacccaacgcagtgagtaccttgatctcctgcgtggcctcgtccctggtcttagttccaccgggcagcgggagtcaggaccgcctgtcctcagacccctccgcagcgactgtggcggccgcaggttgcacgccagggcctgtactgaccacctccacgtgccactggggctgtaaggaggaatggcggccgtgggcagcctgcttggccggctgaggcagagcaccgtgaaggccaccggacctgcactccgccgcctgcacacatcctcctggcgagctgacagcagcagggcctcactcactcgtgtgcaccgccaggcttatgcacgactctaccccgtgctgctggtgaagcaggatggctccaccatccacatccgctacagggagccacggcgcatgctggcgatgcccatagatctggacaccctgtctcctgaggagcgccgggccaggctgcggaagcgtgaggctcagctccagtcgaggaaggagtacgagcaggagctcagtgatgacttgcatgtggagcgctaccgacagttctggaccaggaccaagaagtgaccgtggctccagccaccccgggacattgctaagatgggagggctgttcttaaatcactcgttcttgaagctgcaaaaaaaaaaaaaaacaaaaaaaaaaaaaaaaaa

SEQ ID NO: 292384 - DNA, 1648 bp, Homo sapiens
ggtgggctgcagcgcagcagcacccaacgcatctagcaggaaaggagagggagctttccccgaagaccctcctggaccagccccaggctcctgtgctggtgaggccgagggagagggatgtgggcataggacacgtagcaggatttccattttagaggcagccggacctgtcttcaggtcccttccttggtgagagacaggggtacgccagaggaagctgggcgctcggcctctgtgcagcctcatctcctggaatctgagtattgaaaactgggcttttacttcgcacacctcagcacagactcccatgggaatccaggtcacagcaaagcagccctgggcctccattctcctttaagcaagcatgacaatcctcacttcactgagtttttattaaaactagcaatgaccttagaaagcaaggcatgacctcagctccacttttgaggctgcagtccattcagagaggtttcgcagactcggtaacggccagaacagacagcctgggccctgccgcaggctgactcagaatctttgggagtagtgaccaacttctgcttttggaaaaacctctacaggcggttctgagaagtccaagggttgctgggagaggttggtgagtggcgtggtgattacatgtgtcttggaagcatcctgggctgggatttgataagaaaccattaggtggaagaaccttccttttaaaaaagatctcttcattctctgcctagcgttgcacgccagggcctgtactgaccacctccacgtgccactggggctgtaaggaggaatggcggccgtgggcagcctgcttgggtaagcatggacttttaggtccctggggattactgtcaggggccaccccagggaacccctctcttcagcaggaaaccgccattctaatcctccctagtccttgctattgtccactgtcccctgtgctggaagctttgtgcccttgctcagcctggcagcctcttcctggctagggggccagaacgcctctgaccacagcctgtggctcctgaggaagccccgaggctcatcctgccccggcacgggtcaccagctctggtaatgtctcctgtggcccggcagtgccaatcacagccagcctcagtcatgttggcactctgctgcagcactgtcggctgaccagagcttgaacatttatctgcagccggctgaggcagagcaccgtgaaggccaccggacctgcactccgccgcctgcacacatcctcctggcgagctgacagcagcagggcctcactcactcgtgtgcaccgccaggcttatgcacgactctaccccgtgctgctggtgaagcaggatggctccaccatccacatccgctacagggagccacggcgcatgctggcgatgcccatagatctggacaccctgtctcctgaggagcgccgggccaggctgcggaagcgtgaggctcagctccagtcgaggaaggagtacgagcaggagctcagtgatgacttgcatgtggagcgctaccgacagttctggaccaggaccaagaagtgaccgtggctccagccaccccgggacattgctaagatgggagggctgttcttaaatcactcgttcttgaagctgcaaaaaaaaaaaaaaacaaaaaaaaaaaaaaaaaa

SEQ ID NO: 292385 - DNA, 1662 bp, Homo sapiens
agcgcctgccagtgacgtcgtgggctgcagcgcagcagcacccaacgcagtgagtaccttgatctcctgcgtggcctcgtccctggtcttagttccaccgggcagcgggagtcaggaccgcctgtcctcagacccctccgcagcgactgtggcggccgcagtctagcaggaaaggagagggagctttccccgaagaccctcctggaccagccccaggctcctgtgctggtgaggccgagggagagggatgtgggcataggacacgtagcaggatttccattttagaggcagccggacctgtcttcaggtcccttccttggtgagagacaggggtacgccagaggaagctgggcgctcggcctctgtgcagcctcatctcctggaatctgagtattgaaaactgggcttttacttcgcacacctcagcacagactcccatgggaatccaggtcacagcaaagcagccctgggcctccattctcctttaagcaagcatgacaatcctcacttcactgagtttttattaaaactagcaatgaccttagaaagcaaggcatgacctcagctccacttttgaggctgcagtccattcagagaggtttcgcagactcggtaacggccagaacagacagcctgggccctgccgcaggctgactcagaatctttgggagtagtgaccaacttctgcttttggaaaaacctctacaggcggttctgagaagtccaagggttgctgggagaggttggttgcacgccagggcctgtactgaccacctccacgtgccactggggctgtaaggaggaatggcggccgtgggcagcctgcttgggtaagcatggacttttaggtccctggggattactgtcaggggccaccccagggaacccctctcttcagcaggaaaccgccattctaatcctccctagtccttgctattgtccactgtcccctgtgctggaagctttgtgcccttgctcagcctggcagcctcttcctggctagggggccagaacgcctctgaccacagcctgtggctcctgaggaagccccgaggctcatcctgccccggcacgggtcaccagctctggtaatgtctcctgtggcccggcagtgccaatcacagccagcctcagtcatgttggcactctgctgcagcactgtcggctgaccagagcttgaacatttatctgcagccggctgaggcagagcaccgtgaaggccaccggacctgcactccgccgcctgcacacatcctcctggcgagctgacagcagcagggcctcactcactcgtgtgcaccgccaggcttatgcacgactctaccccgtgctgctggtgaagcaggatggctccaccatccacatccgctacagggagccacggcgcatgctggcgatgcccatagatctggacaccctgtctcctgaggagcgccgggccaggctgcggaagcgtgaggctcagctccagtcgaggaaggagtacgagcaggagctcagtgatgacttgcatgtggagcgctaccgacagttctggaccaggaccaagaagtgaccgtggctccagccaccccgggacattgctaagatgggagggctgttcttaaatcactcgttcttgaagctgcaaaaaaaaaaaaaaacaaaaaaaaaaaaaaaaaa

SEQ ID NO: 292386 - DNA, 1542 bp, Homo sapiens
ggtgggctgcagcgcagcagcacccaacgcatctagcaggaaaggagagggagctttccccgaagaccctcctggaccagccccaggctcctgtgctggtgaggccgagggagagggatgtgggcataggacacgtagcaggatttccattttagaggcagccggacctgtcttcaggtcccttccttggtgagagacaggggtacgccagaggaagctgggcgctcggcctctgtgcagcctcatctcctggaatctgagtattgaaaactgggcttttacttcgcacacctcagcacagactcccatgggaatccaggtcacagcaaagcagccctgggcctccattctcctttaagcaagcatgacaatcctcacttcactgagtttttattaaaactagcaatgaccttagaaagcaaggcatgacctcagctccacttttgaggctgcagtccattcagagaggtttcgcagactcggtaacggccagaacagacagcctgggccctgccgcaggctgactcagaatctttgggagtagtgaccaacttctgcttttggaaaaacctctacaggcggttctgagaagtccaagggttgctgggagaggttggtgagtggcgtggtgattacatgtgtcttggaagcatcctgggctgggatttgataagaaaccattaggtggaagaaccttccttttaaaaaagatctcttcattctctgcctagcgttgcacgccagggcctgtactgaccacctccacgtgccactggggctgtaaggaggaatggcggccgtgggcagcctgcttgggtaagcatggacttttaggtccctggggattactgtcaggggccaccccagggaacccctctcttcagcaggaaaccgccattctaatcctccctagtccttgctattgtccactgtcccctgtgctggaagctttgtgcccttgctcagcctggcagcctcttcctggctagggggccagaacgcctctgaccacagcctgtggctcctgaggaagccccgaggctcatcctgccccggcacgggtcaccagctctgccggctgaggcagagcaccgtgaaggccaccggacctgcactccgccgcctgcacacatcctcctggcgagctgacagcagcagggcctcactcactcgtgtgcaccgccaggcttatgcacgactctaccccgtgctgctggtgaagcaggatggctccaccatccacatccgctacagggagccacggcgcatgctggcgatgcccatagatctggacaccctgtctcctgaggagcgccgggccaggctgcggaagcgtgaggctcagctccagtcgaggaaggagtacgagcaggagctcagtgatgacttgcatgtggagcgctaccgacagttctggaccaggaccaagaagtgaccgtggctccagccaccccgggacattgctaagatgggagggctgttcttaaatcactcgttcttgaagctgcaaaaaaaaaaaaaaacaaaaaaaaaaaaaaaaaa

SEQ ID NO: 292387 - DNA, 1532 bp, Homo sapiens
ggtgggctgcagcgcagcagcacccaacgcatctagcaggaaaggagagggagctttccccgaagaccctcctggaccagccccaggctcctgtgctggtgaggccgagggagagggatgtgggcataggacacgtagcaggatttccattttagaggcagccggacctgtcttcaggtcccttccttggtgagagacaggggtacgccagaggaagctgggcgctcggcctctgtgcagcctcatctcctggaatctgagtattgaaaactgggcttttacttcgcacacctcagcacagactcccatgggaatccaggtcacagcaaagcagccctgggcctccattctcctttaagcaagcatgacaatcctcacttcactgagtttttattaaaactagcaatgaccttagaaagcaaggcatgacctcagctccacttttgaggctgcagtccattcagagaggtttcgcagactcggtaacggccagaacagacagcctgggccctgccgcaggctgactcagaatctttgggagtagtgaccaacttctgcttttggaaaaacctctacaggcggttctgagaagtccaagggttgctgggagaggttggttgcacgccagggcctgtactgaccacctccacgtgccactggggctgtaaggaggaatggcggccgtgggcagcctgcttgggtaagcatggacttttaggtccctggggattactgtcaggggccaccccagggaacccctctcttcagcaggaaaccgccattctaatcctccctagtccttgctattgtccactgtcccctgtgctggaagctttgtgcccttgctcagcctggcagcctcttcctggctagggggccagaacgcctctgaccacagcctgtggctcctgaggaagccccgaggctcatcctgccccggcacgggtcaccagctctggtaatgtctcctgtggcccggcagtgccaatcacagccagcctcagtcatgttggcactctgctgcagcactgtcggctgaccagagcttgaacatttatctgcagccggctgaggcagagcaccgtgaaggccaccggacctgcactccgccgcctgcacacatcctcctggcgagctgacagcagcagggcctcactcactcgtgtgcaccgccaggcttatgcacgactctaccccgtgctgctggtgaagcaggatggctccaccatccacatccgctacagggagccacggcgcatgctggcgatgcccatagatctggacaccctgtctcctgaggagcgccgggccaggctgcggaagcgtgaggctcagctccagtcgaggaaggagtacgagcaggagctcagtgatgacttgcatgtggagcgctaccgacagttctggaccaggaccaagaagtgaccgtggctccagccaccccgggacattgctaagatgggagggctgttcttaaatcactcgttcttgaagctgcaaaaaaaaaaaaaaacaaaaaaaaaaaaaaaaaa

SEQ ID NO: 292388 - DNA, 1586 bp, Homo sapiens
agcgcctgccagtgacgtcgtgggctgcagcgcagcagcacccaacgcagtgagtaccttgatctcctgcgtggcctcgtccctggtcttagttccaccgggcagcgggagtcaggaccgcctgtcctcagacccctccgcagcgactgtggcggccgcaggttggcgcctcgtgtgggccgggaacagaggcgggaggcgctgtaccctcccggtggagtcgggagggagggaggcagggaaggggacagggggctgcacctgtaataagcccttgtccccatgcagtctagcaggaaaggagagggagctttccccgaagaccctcctggaccagccccaggctcctgtgctggtgaggccgagggagagggatgtgggcataggacacgtagcaggatttccattttagaggcagccggacctgtcttcaggtcccttccttggtgagagacaggggtacgccagaggaagctgggcgctcggcctctgtgcagcctcatctcctggaatctgagtattgaaaactgggcttttacttcgcacacctcagcacagactcccatgggaatccaggtcacagcaaagcagccctgggcctccattctcctttaagcaagcatgacaatcctcacttcactgagtttttattaaaactagcaatgaccttagaaagcaaggcatgacctcagctccacttttgaggctgcagtccattcagagaggtttcgcagactcggtaacggccagaacagacagcctgggccctgccgcaggctgactcagaatctttgggagtagtgaccaacttctgcttttggaaaaacctctacaggcggttctgagaagtccaagggttgctgggagaggttggttgcacgccagggcctgtactgaccacctccacgtgccactggggctgtaaggaggaatggcggccgtgggcagcctgcttggtccttgctattgtccactgtcccctgtgctggaagctttgtgcccttgctcagcctggcagcctcttcctggctagggggccagaacgcctctgaccacagcctgtggctcctgaggaagccccgaggctcatcctgccccggcacgggtcaccagctctgccggctgaggcagagcaccgtgaaggccaccggacctgcactccgccgcctgcacacatcctcctggcgagctgacagcagcagggcctcactcactcgtgtgcaccgccaggcttatgcacgactctaccccgtgctgctggtgaagcaggatggctccaccatccacatccgctacagggagccacggcgcatgctggcgatgcccatagatctggacaccctgtctcctgaggagcgccgggccaggctgcggaagcgtgaggctcagctccagtcgaggaaggagtacgagcaggagctcagtgatgacttgcatgtggagcgctaccgacagttctggaccaggaccaagaagtgaccgtggctccagccaccccgggacattgctaagatgggagggctgttcttaaatcactcgttcttgaagctgcaaaaaaaaaaaaaaacaaaaaaaaaaaaaaaaaa

SEQ ID NO: 292389 - DNA, 776 bp, Homo sapiens
agcgcctgccagtgacgtcgtgggctgcagcgcagcagcacccaacgcatctagcaggaaaggagagggagctttccccgaagaccctcctggaccagccccaggctcctgtgctggttgcacgccagggcctgtactgaccacctccacgtgccactggggctgtaaggaggaatggcggccgtgggcagcctgcttggcctggcagcctcttcctggctagggggccagaacgcctctgaccacagcctgtggctcctgaggaagccccgaggctcatcctgccccggcacgggtcaccagctctgccggctgaggcagagcaccgtgaaggccaccggacctgcactccgccgcctgcacacatcctcctggcgagctgacagcagcagggcctcactcactcgtgtgcaccgccaggcttatgcacgactctaccccgtgctgctggtgaagcaggatggctccaccatccacatccgctacagggagccacggcgcatgctggcgatgcccatagatctggacaccctgtctcctgaggagcgccgggccaggctgcggaagcgtgaggctcagctccagtcgaggaaggagtacgagcaggagctcagtgatgacttgcatgtggagcgctaccgacagttctggaccaggaccaagaagtgaccgtggctccagccaccccgggacattgctaagatgggagggctgttcttaaatcactcgttcttgaagctgcaaaaaaaaaaaaaaacaaaaaaaaaaaaaaaaaa

SEQ ID NO: 292390 - DNA, 402 bp, Homo sapiens
gcggccgctgggagcggggttcgatcccgtgatgccgtcgtgggtgccggccagagaagagctccggaggccggggcggccggcgggcgtgcgaatgtcatctttcccaacaagttgttcccagcagaatcctctctcctggcacaaaacaagcagatgaagagcagccctgagaggtagacacagcggagatttttttcacccgcattgtacagaagagaaaatgaagctttgcccaacctgcaggagatcccctcaccttgcaaaagagccaagctgtggctaaactgggatcttcagtccctggaccatttagcttgactaagagaacaggaatggaggccaaaagatctacaaaatgctcacacagagaagatgacagcttctacaaataaatgtcaa

SEQ ID NO: 292391 - DNA, 787 bp, Homo sapiens
  misc_feature (9)..(9): n is a, c, g, or t
  misc_feature (13)..(13): n is a, c, g, or t
  misc_feature (15)..(15): n is a, c, g, or t
  misc_feature (25)..(25): n is a, c, g, or t
gacctcggnccantnttgacatgangacagtatgaaatttcatacagtttcctaacttgagaaaacatggtgatgcaattcctccaaccaggagggatttatggacagcggtggctacgtcctaatctgcccagaatacaggatgactaaacaaattggcaaacggacgcagctttctctctctctaagaaaagtctgctgagaaccctcgttcccactctgtttctgcctccaagaagaaaagcctaaaactcactttcttccggactctttcaaggaagctgattaaaagaagctcctaaaccagaggtgcagacaaggtgatgatgtggctctcagaggaaggtgtgctacctacaaccctgctggcttcatggaagaatatgcttctcaaatgcaaatccaatcaagttatctccctgcttaaatccaaactcgctcatgtggcccacaaagcctaccttgcctgcctctctctaacctcacccaaaacacacttccattgctctctaggttccagcaccctgaccttttggtctgcactgtgccaggctccctccagccctgaagcctttgcacatgctgttcctcctgtctggaaaggctctcccatcttgtctattcgttctccaggctcaagtgactcttcctgagagccttctctgaccccagtccaggtcaagttcctctgtcacatgcctgaccctgcatccctccttgacagcacttatatcagcttgtaacacatttttgtgtgattattttgttaatgtcagcctctcccaca

SEQ ID NO: 292392 - DNA, 490 bp, Homo sapiens
cgctgctcacctcccgcagcagcaacagtgcccggggtcccgcagcgtaagttctgccggcaagtcggatcccctcacaggtccgccgctgcgttcatacacaagcgacttccgttccgccgctacttcaggccgggtcatgctaacggaagtgcttcctttttacagtccgggtggacccaaagctccgtggcggtgctgaactttagggcagccactagccacggacttaagcggcaattgagctcctcaaagtgggtgagtgcaaatcaaatgtgcgctaaatgtcagatacactggatgtggaagaagaaatgtcaaatagtgtcaaatagttcatatatataatgtttatattgattatgtgctgcaataattgttgggatatattgggttaaataagtacatttgttgaattagttttttttatttgtagctatggtggtagaaatatttgaattaagttcacctgttgtttctttttactttt

SEQ ID NO: 292393 - DNA, 808 bp, Homo sapiens
cgctgctcacctcccgcagcagcaacagtgcccggggtcccgcagcgtaagttctgccggcaagtcggatcccctcacaggtccgccgctgcgttcatacacaagcgacttccgttccgccgctacttcaggccgggtcatgctaacggaagtgcttcctttttacagtccgggtggacccaaagctccgtggcggtgctgaactttagggcagccactagccacggacttaagcggcaattgagctcctcaaagtggtgccctaaagaaggaagcttgaatgcccctggggataagaggcttattaccagagggacactcccagatcctcccagcacacctgtagacacctcctgcacaccctcggcggcccggtgacagccatccacaagctggcgggtccaggcagccagctcctgcggtgactccacgctgaacagccagacaaggttctctctggaggcagaaactgttggggtcagctctgtgccctctgaaccatgcagcacaaggcataagtgtcagcgaatgagtggctaatggggaccttagtattgacctgggcttggatggcagtcgcccacgacctcgcactagcctcatccttggccctcaggaagagggtgtcttgaccatctgccgagcagatctccagatacctgcaggcacaaatgggtggagacaaggacctgaccattaggctgcagctgcccaaccctggcccaagaaaccccacccaccaccaaaccaggagaaaccagggggatgtccgtgagagaatcaggagcaaccctcactgctgggctcc

SEQ ID NO: 292394 - DNA, 803 bp, Homo sapiens
gctgcgtggggatgtctcctttgtttagatggcgtcagaggcagagcaggtgtcagtgaaggggagtgagcacaggaccagctgtctcccaagaggctgaggagctggcccaaggctttgggggctggatttgtgcctcacccagctcctgccttgtggctgtctccacagtcctccctactgactggctttctgcctttgttttctcagccatgatgaggagcagccctgggccaggtgccacggtcagtatgagaggctccaggatcaggctagagaaccacgcgaaccaggtctggggagctatctgtgggaaaggtcagggcctgtttttctcctaagctgctggctgttcaagggacctacctccttgtcccttcccagtcacaggtccaaggggcaaatagcgaattcccatggaggagaatcactgcactccaagtggacgtggctggtaggaagcttccctcatgctgcccttctggaaggtgccttcccctgtgctgacgtctgcaggatgcgtgttacaccccatttggatatcacatcttgagctgtgggaaaggagagcagggcttccctctctgaaccccatgcctggcagggtaagtgcccagggagcacctgctgcctggatggggagtctgcgccacttctgctagcacagcagcatcccgtacctgaaagtgaaacgtctgaataggctcgccgtcctgatcgtaagtgaacttgccaaggagtgtcccctcctgctgcaggtcttcgtcaaacccctgcaaagagagcggagggaagtggggagg

SEQ ID NO: 292395 - DNA, 514 bp, Homo sapiens
gctgcgtggggatgtctcctttgtttagatggcgtcagaggcagagcaggtgtcagtgaaggggagtgagcacaggaccagctgtctcccaagaggctgaggagctggcccaaggctttgggggctggatttgtgcctcacccagctcctgccttgtggctgtctccacagtcctccctactgactggctttctgcctttgttttctcagccatgatgaggagcagccctgggccaggtgccacggtcagtatgagaggctccaggatcaggctagagaaccacgcgaaccaggtctggggagctatctgtgggaaaggtcagggcctgtttttctcctaagctgctggctgttcaagggacctacctccttgtcccttcccagtcacaggtccaaggggcaaatagcgaattcccatggaggagaatcactgcactccaagtggacgtggctggtaggatgggatacagacgcgacggcatagagcgaaggaagagaggactcgcggagcctt

SEQ ID NO: 292396 - DNA, 709 bp, Homo sapiens
gctgcgtggggatgtctcctttgtttagatggcgtcagaggcagagcaggtgtcagtgaaggggagtgagcacaggaccagctgtctcccaagaggctgaggagctggcccaaggctttgggggctggatttgtgcctcacccagctcctgccttgtggctgtctccacagtcctccctactgactggctttctgcctttgttttctcagccatgatgaggagcagccctgggccaggtgccacggtcagtatgagaggctccaggatcaggctagagaaccacgcgaaccaggtctggggagctatctgtgggaaaggtcagggcctgtttttctcctaagctgctggctgttcaagggacctacctccttgtcccttcccagtcacaggtccaaggggcaaatagcgaattcccatggaggagaatcactgcactccaagtggacgtggctggtaggtaagtgtaactttttctgctgctgttcagtggtactgagagacaggaaagccccactgctcccgccccaccctttgtgatgggttatcaatgacagctaataaagccacctcactgcttcctcatgccagcccttgacccacaaacactggaggagacctgcctcaggtcccatcccccaccacaactgggctttagctgaaagttgtgggtttctgaacttcaggaataagtctttggggacattcgtt

SEQ ID NO: 292397 - DNA, 686 bp, Homo sapiens
tctagttacatttaatatatagtattttcctttgcccttattttctgttaactgatggttaaatcagaggcgtgatcagatttgggttacatttgtttggcaaaaacatttcataggtagcgttgtgtgctttcatcaggaagcatctaatgtctactttgtctttagttgcttattaagattgatcacttagtataggtgttgccagcttgatccatctattacaacttttccaccagctttttacttgatggttttaaacagacattgatattcatgactcacttttatttttaaaattgtgattgggtactagtacagctaaagaagcaaaggaatattttgctgatatggaaaggcatcgcatcttgtttagatatgctggtcctgaagatgatgctgccattaccttggtaattaagttaattttttaaaagcttttgttagccatccccctaccttctattcctttcctcccagtcctggttccctatgataagtctcttttgaatgctcaagctagttaattttaatttttcccccagatgatgctgtgcttgtataaacttctttaattgaaagaccttagtttaaatgtgtttttgattaaaatattgtaaaataacctaatttttccagaaattaagaattagttattggccacttatacattttaattttgtaat

SEQ ID NO: 292398 - DNA, 799 bp, Homo sapiens
gcatgtgctgagtctaggtctgagaaggaatatgtatttgacattttatagttaatactggtggttctcatatggtgccacttaatgtgggatatgcaattggttgttactagtctttgataagtaaaacggagtaaacatttagacctttataataatgtgttactaaaacagcatgtgattacattttttagtaatttgtgttctatggtatttttaaaagtattggcccatgacaaattagaaatgaaaaaaaatatttaaatcccatgtaatttaagaagtactcttccaagatatttccttttcaggctcaaggaccaaatagcaaatacaaatgttttatgtatgaagggattcatcattaaaatttgtctttgggactttcccactagtttaaatgtatttgtcaaaaagtctttggtcatgtcaaccccagaattgaaatgctactgccaaattgtttataatcactcatagtaagagatcaggactgcaatgctccactgattgggcatgccaaagaaataaactacaatgttgtggcatttatctttttatattgcacttaaccacggaagaaaaaaccttttgtatcattttaaggtaaaggccgaggggcaaagaaaaggaaagcatctggctctgaaaatgaaggcgattataaccctggcaggaaaacatccaaaacaacaagcaagaaggtaaccgggaacatcattgcatattagtgcatggctttttaaaaaaagatctgtaagtgacttagtttgcttatgactatagtcctggaacagct

SEQ ID NO: 292399 - DNA, 549 bp, Homo sapiens
ccccgccttggcctcccagagtgctggcattacaggtgtgagccaccacgcccagccaggcaactcagtttctaatcagctataagaaattccatttatataggactctcttcagtttggtttgttggtaagtatattgacctgtgaaatggaaatttgcttactagggaaaaccgtcttcagatacagtccctaagcccaagagagccccaaaacagaagaaagtagtagaggctgtaaactctgactcggattcagaatttggcattccaaagaagactacaacaccaaaaggtgaggattatcttcttataaccctttaaacatatgctgtgtggaaaagattgaattttttctacctcattgaatttagagaggctaggtatctattttgttttaaattgctttactcctcagtaagcagtgtgtctaggaatcagtgctgaatatagtccaaaggaggcatagcaatttagttcagtcactttgttttacaaattaaaaaattgaggctcaaagaggttaaataagaatccctaagaatggtcc

SEQ ID NO: 292400 - DNA, 587 bp, Homo sapiens
gtgcggtgttatgccggacaagagggaggtgaccgtggcggcggcggcggcggctctgtttattgtccctctcggtgtgtgtgtgtgaggaaatcggggctgcagcgaggctaaggcggcctttgaagcagcggcggcgaccgggacgactactctggcgactcgagtggctggccttcgcggagtgtgagaaggacaaggcacctctgcgtcctcgccacgtccgagcgcctcgggctccccggccgccctcgcggctcgcacgcccgggcttcagcccggcctgcagcggcgcccgcgggcgggcgagaaggcaacgccgccgctcggccgccgccggtcgctccctgctttctcctcagccgccgccactgcctgggatcttcgcgtcggggcccgagccatggaggatatcatcgtgatctcggacgacaacggctctgagagctccgaggggcgcccgcccgggccggtacgaggaggccgcgcacgggccctgttaggcgaacctccggagcgctgacccgacggacacgtgaccaagggtcaaaattagaaccaatccctcatcgaagactaacgaatga

SEQ ID NO: 292401 - DNA, 5878 bp, Homo sapiens
gtgcggtgttatgccggacaagagggaggtgaccgtggcggcggcggcggcggctctgtttattgtccctctcggtgtgtgtgtgtgaggaaatcggggctgcagcgaggctaaggcggcctttgaagcagcggcggcgaccgggacgactactctggcgactcgagtggctggccttcgcggagtgtgagaaggacaaggcacctctgcgtcctcgccacgtccgagcgcctcgggctccccggccgccctcgcggctcgcacgcccgggcttcagcccggcctgcagcggcgcccgcgggcgggcgagaaggcaacgccgccgctcggccgccgccggtcgctccctgctttctcctcagccgccgcgctaggcccgggcgacgcggacgccgcgcctcgagtttgagggcagccggcggcgcggcctcctcagcgggctcggctggacgtccgctccggatcttcgcgatggggcgcgggggtcggcgcggctaggagtgcggcgagtggagcggtgggtgcggagcggcggggcccagcggcccgcagggaggcgggagcggcggctgcggcctcagggcctgtgagctggaggcactcgccatggccaagtcgggtggctgcggcgcgggagccggcgtgggcggcggcaacggggcactgacctgggtgaacaatgctgcaaaaaaagaagagtcagaaactgccaacaaaaatgattcttcaaagaagttgtctgttgagagagtgtatcagaagaagacacaacttgaacacattcttcttcgtcctgatacatatattgggtcagtggagccattgacgcagttcatgtgggtgtatgatgaagatgtaggaatgaattgcagggaggttacctttgtgccaggtttatacaagatctttgatgaaattttggttaatgctgctgacaataaacagagggataagaacatgacttgtattaaagtttctattgatcctgaatctaacattataagcatttggaataatgggaaaggcattccagtagtagaacacaaggtagagaaagtttatgttcctgctttaatttttggacagcttttaacatccagtaactatgatgatgatgagaaaaaagttacaggtggtcgtaatggttatggtgcaaaactttgtaatattttcagtacaaagtttacagtagaaacagcttgcaaagaatacaaacacagttttaagcagacatggatgaataatatgatgaagacttctgaagccaaaattaaacattttgatggtgaagattacacatgcataacattccaaccagatctgtccaaatttaagatggaaaaacttgacaaggatattgtggccctcatgactagaagggcatatgatttggctggttcgtgtagaggggtcaaggtcatgtttaatggaaagaaattgcctgtaaatggatttcgcagttatgtagatctttatgtgaaagacaaattggatgaaactggggtggccctgaaagttattcatgagcttgcaaatgaaagatgggatgtttgtctcacattgagtgaaaaaggattccagcaaatcagctttgtaaatagtattgcaactacaaaaggtggacggcacgtggattatgtggtagatcaagttgttggtaaactgattgaagtagttaagaaaaagaacaaagctggtgtatcagtgaaaccatttcaagtaaaaaaccatatatgggtttttattaattgccttattgaaaatccaacttttgattctcagactaaggaaaacatgactctgcagcccaaaagttttgggtctaaatgccagctgtcagaaaaattttttaaagcagcctctaattgtggcattgtagaaagtatcctgaactgggtgaaatttaaggctcagactcagctgaataagaagtgttcatcagtaaaatacagtaaaatcaaaggtattcccaaactggatgatgctaatgatgctggtggtaaacattccctggagtgtacactgatattaacagagggagactctgccaaatcactggctgtgtctggattaggtgtgattggacgagacagatacggagtttttccactcaggggcaaaattcttaatgtacgggaagcttctcataaacagatcatggaaaatgctgaaataaataatattattaaaatagttggtctacaatataagaaaagttacgatgatgcagaatctctgaaaaccttacgctatggaaagattatgattatgaccgatcaggatcaagatggttctcacataaaaggcctgcttattaatttcatccatcacaattggccatcacttttgaagcatggttttcttgaagagttcattactcctattgtaaaggcaagcaaaaataagcaggaactttccttctacagtattcctgaatttgacgaatggaaaaaacatatagaaaaccagaaagcctggaaaataaagtactataaaggattgggtactagtacagctaaagaagcaaaggaatattttgctgatatggaaaggcatcgcatcttgtttagatatgctggtcctgaagatgatgctgccattaccttggcatttagtaagaagaagattgatgacagaaaagaatggttaacaaattttatggaagaccggagacagcgtaggctacatggcttaccagagcaatttttatatggtactgcaacaaagcatttgacttataatgatttcatcaacaaggaattgattctcttctcaaactcagacaatgaaagatctataccatctcttgttgatggctttaaacctggccagcggaaagttttatttacctgtttcaagaggaatgataaacgtgaagtaaaagttgcccagttggctggctctgttgctgagatgtcggcttatcatcatggagaacaagcattgatgatgactattgtgaatttggctcagaactttgtgggaagtaacaacattaacttgcttcagcctattggtcagtttggaactcggcttcatggtggcaaagatgctgcaagccctcgttatattttcacaatgttaagcactttagcaaggctactttttcctgctgtggatgacaacctccttaagttcctttatgatgataatcaacgtgtagagcctgagtggtatattcctataattcccatggttttaataaatggtgctgagggcattggtactggatgggcttgtaaactacccaactatgatgctagggaaattgtgaacaatgtcagacgaatgctagatggcctggatcctcatcccatgcttccaaactacaaaaactttaaaggcacgattcaagaacttggtcaaaaccagtatgcagtcagtggtgaaatatttgtagtggacagaaacacagtagaaattacagagcttccagttagaacttggacacaggtatataaagaacaggttttagaacctatgctaaatggaacagataaaacaccagcattaatttctgattataaagaatatcatactgacacaactgtgaaatttgtggtgaaaatgactgaagagaaactagcacaagcagaagctgctggactgcataaagtttttaaacttcaaactactcttacttgtaattccatggtactttttgatcatatgggatgtctgaagaaatatgaaactgtgcaagacattctgaaagaattctttgatttacgattaagttattacggtttacgtaaggagtggcttgtgggaatgttgggagcagaatctacaaagcttaacaatcaagcccgtttcattttagagaagatacaagggaaaattactatagagaataggtcaaagaaagatttgattcaaatgttagtccagagaggttatgaatctgacccagtgaaagcctggaaagaagcacaagaaaaggcagcagaagaggatgaaacacaaaaccagcatgatgatagttcctccgattcaggaactccttcaggcccagattttaattatattttaaatatgtctctgtggtctcttactaaagaaaaagttgaagaactgattaaacagagagatgcaaaagggcgagaggtcaatgatcttaaaagaaaatctccttcagatctttggaaagaggatttagcggcatttgttgaagaactggataaagtggaatctcaagaacgagaagatgttctggctggaatgtctggaaaagcaattaaaggtaaagttggcaaacctaaggtgaagaaactccagttggaagagacaatgccctcaccttatggcagaagaataattcctgaaattacagctatgaaggcagatgccagcaaaaagttgctgaagaagaagaagggtgatcttgatactgcagcagtaaaagtggaatttgatgaagaattcagtggagcaccagtagaaggtgcaggagaagaggcattgactccatcagttcctataaataaaggtcccaaacctaagagggagaagaaggagcctggtaccagagtgagaaaaacacctacatcatctggtaaacctagtgcaaagaaagtgaagaaacggaatccttggtcagatgatgaatccaagtcagaaagtgatttggaagaaacagaacctgtggttattccaagagattctttgcttaggagagcagcagccgaaagacctaaatacacatttgatttctcagaagaagaggatgatgatgctgatgatgatgatgatgacaataatgatttagaggaattgaaagttaaagcatctcccataacaaatgatggggaagatgaatttgttccttcagatgggttagataaagatgaatatacattttcaccaggcaaatcaaaagccactccagaaaaatctttgcatgacaaaaaaagtcaggattttggaaatctcttctcatttccttcatattctcagaagtcagaagatgattcagctaaatttgacagtaatgaagaagattctgcttctgttttttcaccatcatttggtctgaaacagacagataaagttccaagtaaaacggtagctgctaaaaagggaaaaccgtcttcagatacagtccctaagcccaagagagccccaaaacagaagaaagtagtagaggctgtaaactctgactcggattcagaatttggcattccaaagaagactacaacaccaaaaggtaaaggccgaggggcaaagaaaaggaaagcatctggctctgaaaatgaaggcgattataaccctggcaggaaaacatccaaaacaacaagcaagaaaccgaagaagacatcttttgatcaggattcagatgtggacatcttcccctcagacttccctactgagccaccttctctgccacgaaccggtcgggctaggaaagaagtaaaatattttgcagagtctgatgaagaagaagatgatgttgattttgcaatgtttaattaagtgcccaaagagcacaaacatttttcaacaaatatcttgtgttgtccttttgtcttctctgtctcagacttttgtacatctggcttattttaatgtgatgatgtaattgacggttttttattattgtggtaggccttttaacattttgttcttacacatacagttttatgctcttttttactcattgaaatgtcacgtactgtctgattggcttgtagaattgttatagactgccgtgcattagcacagattttaattgtcatggttacaaactacagacctgctttttgaaatgaaatttaaacattaaaaatggaactgtgttctctgtctctttactgaagataaaggtgtagtaaaagctcccacacacctttaaaataaatatattttattctttgcagga

SEQ ID NO: 292402 - DNA, 5792 bp, Homo sapiens
gtgcggtgttatgccggacaagagggaggtgaccgtggcggcggcggcggcggctctgtttattgtccctctcggtgtgtgtgtgtgaggaaatcggggctgcagcgaggctaaggcggcctttgaagcagcggcggcgaccgggacgactactctggcgactcgagtggctggccttcgcggagtgtgagaaggacaaggcacctctgcgtcctcgccacgtccgagcgcctcgggctccccggccgccctcgcggctcgcacgcccgggcttcagcccggcctgcagcggcgcccgcgggcgggcgagaaggcaacgccgccgctcggccgccgccggtcgctccctgctttctcctcagccgccgcgctaggcccgggcgacgcggacgccgcgcctcgagtttgagggcagccggcggcgcggcctcctcagcgggctcggctggacgtccgctccggatcttcgcgatggggcgcgggggtcggcgcggctaggagtgcggcgagtggagcggtgggtgcggagcggcggggcccagcggcccgcagggaggcgggagcggcggctgcggcctcagggcctgtgagctggaggcactcgccatggccaagtcgggtggctgcggcgcgggagccggcgtgggcggcggcaacggggcactgacctgggtgaacaatgctgcaaaaaaagaagagtcagaaactgccaacaaaaatgattcttcaaagaagttgtctgttgagagagtgtatcagaagaagacacaacttgaacacattcttcttcgtcctgatacatatattgggtcagtggagccattgacgcagttcatgtgggtgtatgatgaagatgtaggaatgaattgcagggaggttacctttgtgccaggtttatacaagatctttgatgaaattttggttaatgctgctgacaataaacagagggataagaacatgacttgtattaaagtttctattgatcctgaatctaacattataagcatttggaataatgggaaaggcattccagtagtagaacacaaggtagagaaagtttatgttcctgctttaatttttggacagcttttaacatccagtaactatgatgatgatgagaaaaaagttacaggtggtcgtaatggttatggtgcaaaactttgtaatattttcagtacaaagtttacagtagaaacagcttgcaaagaatacaaacacagttttaagcagacatggatgaataatatgatgaagacttctgaagccaaaattaaacattttgatggtgaagattacacatgcataacattccaaccagatctgtccaaatttaagatggaaaaacttgacaaggatattgtggccctcatgactagaagggcatatgatttggctggttcgtgtagaggggtcaaggtcatgtttaatggaaagaaattgcctgtaaatggatttcgcagttatgtagatctttatgtgaaagacaaattggatgaaactggggtggccctgaaagttattcatgagcttgcaaatgaaagatgggatgtttgtctcacattgagtgaaaaaggattccagcaaatcagctttgtaaatagtattgcaactacaaaaggtggacggcacgtggattatgtggtagatcaagttgttggtaaactgattgaagtagttaagaaaaagaacaaagctggtgtatcagtgaaaccatttcaagtaaaaaaccatatatgggtttttattaattgccttattgaaaatccaacttttgattctcagactaaggaaaacatgactctgcagcccaaaagttttgggtctaaatgccagctgtcagaaaaattttttaaagcagcctctaattgtggcattgtagaaagtatcctgaactgggtgaaatttaaggctcagactcagctgaataagaagtgttcatcagtaaaatacagtaaaatcaaaggtattcccaaactggatgatgctaatgatgctggtggtaaacattccctggagtgtacactgatattaacagagggagactctgccaaatcactggctgtgtctggattaggtgtgattggacgagacagatacggagtttttccactcaggggcaaaattcttaatgtacgggaagcttctcataaacagatcatggaaaatgctgaaataaataatattattaaaatagttggtctacaatataagaaaagttacgatgatgcagaatctctgaaaaccttacgctatggaaagattatgattatgaccgatcaggatcaagatggttctcacataaaaggcctgcttattaatttcatccatcacaattggccatcacttttgaagcatggttttcttgaagagttcattactcctattgtaaaggcaagcaaaaataagcaggaactttccttctacagtattcctgaatttgacgaatggaaaaaacatatagaaaaccagaaagcctggaaaataaagtactataaaggattgggtactagtacagctaaagaagcaaaggaatattttgctgatatggaaaggcatcgcatcttgtttagatatgctggtcctgaagatgatgctgccattaccttggcatttagtaagaagaagattgatgacagaaaagaatggttaacaaattttatggaagaccggagacagcgtaggctacatggcttaccagagcaatttttatatggtactgcaacaaagcatttgacttataatgatttcatcaacaaggaattgattctcttctcaaactcagacaatgaaagatctataccatctcttgttgatggctttaaacctggccagcggaaagttttatttacctgtttcaagaggaatgataaacgtgaagtaaaagttgcccagttggctggctctgttgctgagatgtcggcttatcatcatggagaacaagcattgatgatgactattgtgaatttggctcagaactttgtgggaagtaacaacattaacttgcttcagcctattggtcagtttggaactcggcttcatggtggcaaagatgctgcaagccctcgttatattttcacaatgttaagcactttagcaaggctactttttcctgctgtggatgacaacctccttaagttcctttatgatgataatcaacgtgtagagcctgagtggtatattcctataattcccatggttttaataaatggtgctgagggcattggtactggatgggcttgtaaactacccaactatgatgctagggaaattgtgaacaatgtcagacgaatgctagatggcctggatcctcatcccatgcttccaaactacaaaaactttaaaggcacgattcaagaacttggtcaaaaccagtatgcagtcagtggtgaaatatttgtagtggacagaaacacagtagaaattacagagcttccagttagaacttggacacaggtatataaagaacaggttttagaacctatgctaaatggaacagataaaacaccagcattaatttctgattataaagaatatcatactgacacaactgtgaaatttgtggtgaaaatgactgaagagaaactagcacaagcagaagctgctggactgcataaagtttttaaacttcaaactactcttacttgtaattccatggtactttttgatcatatgggatgtctgaagaaatatgaaactgtgcaagacattctgaaagaattctttgatttacgattaagttattacggtttacgtaaggagtggcttgtgggaatgttgggagcagaatctacaaagcttaacaatcaagcccgtttcattttagagaagatacaagggaaaattactatagagaataggtcaaagaaagatttgattcaaatgttagtccagagaggttatgaatctgacccagtgaaagcctggaaagaagcacaagaaaaggcagcagaagaggatgaaacacaaaaccagcatgatgatagttcctccgattcaggaactccttcaggcccagattttaattatattttaaatatgtctctgtggtctcttactaaagaaaaagttgaagaactgattaaacagagagatgcaaaagggcgagaggtcaatgatcttaaaagaaaatctccttcagatctttggaaagaggatttagcggcatttgttgaagaactggataaagtggaatctcaagaacgagaagatgttctggctggaatgtctggaaaagcaattaaaggtaaagttggcaaacctaaggtgaagaaactccagttggaagagacaatgccctcaccttatggcagaagaataattcctgaaattacagctatgaaggcagatgccagcaaaaagttgctgaagaagaagaagggtgatcttgatactgcagcagtaaaagtggaatttgatgaagaattcagtggagcaccagtagaaggtgcaggagaagaggcattgactccatcagttcctataaataaaggtcccaaacctaagagggagaagaaggagcctggtaccagagtgagaaaaacacctacatcatctggtaaacctagtgcaaagaaagtgaagaaacggaatccttggtcagatgatgaatccaagtcagaaagtgatttggaagaaacagaacctgtggttattccaagagattctttgcttaggagagcagcagccgaaagacctaaatacacatttgatttctcagaagaagaggatgatgatgctgatgatgatgatgatgacaataatgatttagaggaattgaaagttaaagcatctcccataacaaatgatggggaagatgaatttgttccttcagatgggttagataaagatgaatatacattttcaccaggcaaatcaaaagccactccagaaaaatctttgcatgacaaaaaaagtcaggattttggaaatctcttctcatttccttcatattctcagaagtcagaagatgattcagctaaatttgacagtaatgaagaagattctgcttctgttttttcaccatcatttggtctgaaacagacagataaagttccaagtaaaacggtagctgctaaaaagggaaaaccgtcttcagatacagtccctaagcccaagagagccccaaaacagaagaaagtagtagaggctgtaaactctgactcggattcagaatttggcattccaaagaagactacaacaccaaaaggtaaaggccgaggggcaaagaaaaggaaagcatctggctctgaaaatgaaggcgattataaccctggcaggaaaacatccaaaacaacaagcaagaaaccgaagaagacatcttttgatcaggattcagatgtggacatcttcccctcagacttccctactgagccaccttctctgccacgaaccggtcgggctaggaaagaagtaaaatattttgcagagtctgatgaagaagaagatgatgttgattttgcaatgtttaattaagtgcccaaagagcacaaacatttttcaacaaatatcttgtgttgtccttttgtcttctctgtctcagacttttgtacatctggcttattttaatgtgatgatgtaattgacggttttttattattgtggtaggccttttaacattttgttcttacacatacagttttatgctcttttttactcattgaaatgtcacgtactgtctgattggcttgtagaattgttatagactgccgtgcattagcacagattttaattgtcatggttacaaactacagacctgctttttgaaatgaaatttaaacattaaaaatggaact

SEQ ID NO: 292403 - DNA, 6136 bp, Homo sapiens
gtgcggtgttatgccggacaagagggaggtgaccgtggcggcggcggcggcggctctgtttattgtccctctcggtgtgtgtgtgtgaggaaatcggggctgcagcgaggctaaggcggcctttgaagcagcggcggcgaccgggacgactactctggcgactcgagtggctggccttcgcggagtgtgagaaggacaaggcacctctgcgtcctcgccacgtccgagcgcctcgggctccccggccgccctcgcggctcgcacgcccgggcttcagcccggcctgcagcggcgcccgcgggcgggcgagaaggcaacgccgccgctcggccgccgccggtcgctccctgctttctcctcagccgccgcgctaggcccgggcgacgcggacgccgcgcctcgagtttgagggcagccggcggcgcggcctcctcagcgggctcggctggacgtccgctccggatcttcgcgatggggcgcgggggtcggcgcggctaggagtgcggcgagtggagcggtgggtgcggagcggcggggcccagcggcccgcagggaggcgggagcggcggctgcggcctcagggcctgtgagctggaggcactcgccatggccaagtcgggtggctgcggcgcgggagccggcgtgggcggcggcaacggggcactgacctgggtgaacaatgctgcaaaaaaagaagagtcagaaactgccaacaaaaatgattcttcaaagaagttgtctgttgagagagtgtatcagaagaagacacaacttgaacacattcttcttcgtcctgatacatatattgggtcagtggagccattgacgcagttcatgtgggtgtatgatgaagatgtaggaatgaattgcagggaggttacctttgtgccaggtttatacaagatctttgatgaaattttggttaatgctgctgacaataaacagagggataagaacatgacttgtattaaagtttctattgatcctgaatctaacattataagcatttggaataatgggaaaggcattccagtagtagaacacaaggtagagaaagtttatgttcctgctttaatttttggacagcttttaacatccagtaactatgatgatgatgagaaaaaagttacaggtggtcgtaatggttatggtgcaaaactttgtaatattttcagtacaaagtttacagtagaaacagcttgcaaagaatacaaacacagttttaagcagacatggatgaataatatgatgaagacttctgaagccaaaattaaacattttgatggtgaagattacacatgcataacattccaaccagatctgtccaaatttaagatggaaaaacttgacaaggatattgtggccctcatgactagaagggcatatgatttggctggttcgtgtagaggggtcaaggtcatgtttaatggaaagaaattgcctgtaaatggatttcgcagttatgtagatctttatgtgaaagacaaattggatgaaactggggtggccctgaaagttattcatgagcttgcaaatgaaagatgggatgtttgtctcacattgagtgaaaaaggattccagcaaatcagctttgtaaatagtattgcaactacaaaaggtggacggcacgtggattatgtggtagatcaagttgttggtaaactgattgaagtagttaagaaaaagaacaaagctggtgtatcagtgaaaccatttcaagtaaaaaaccatatatgggtttttattaattgccttattgaaaatccaacttttgattctcagactaaggaaaacatgactctgcagcccaaaagttttgggtctaaatgccagctgtcagaaaaattttttaaagcagcctctaattgtggcattgtagaaagtatcctgaactgggtgaaatttaaggctcagactcagctgaataagaagtgttcatcagtaaaatacagtaaaatcaaaggtattcccaaactggatgatgctaatgatgctggtggtaaacattccctggagtgtacactgatattaacagagggagactctgccaaatcactggctgtgtctggattaggtgtgattggacgagacagatacggagtttttccactcaggggcaaaattcttaatgtacgggaagcttctcataaacagatcatggaaaatgctgaaataaataatattattaaaatagttggtctacaatataagaaaagttacgatgatgcagaatctctgaaaaccttacgctatggaaagattatgattatgaccgatcaggatcaagatggttctcacataaaaggcctgcttattaatttcatccatcacaattggccatcacttttgaagcatggttttcttgaagagttcattactcctattgtaaaggcaagcaaaaataagcaggaactttccttctacagtattcctgaatttgacgaatggaaaaaacatatagaaaaccagaaagcctggaaaataaagtactataaaggattgggtactagtacagctaaagaagcaaaggaatattttgctgatatggaaaggcatcgcatcttgtttagatatgctggtcctgaagatgatgctgccattaccttggcatttagtaagaagaagattgatgacagaaaagaatggttaacaaattttatggaagaccggagacagcgtaggctacatggcttaccagagcaatttttatatggtactgcaacaaagcatttgacttataatgatttcatcaacaaggaattgattctcttctcaaactcagacaatgaaagatctataccatctcttgttgatggctttaaacctggccagcggaaagttttatttacctgtttcaagaggaatgataaacgtgaagtaaaagttgcccagttggctggctctgttgctgagatgtcggcttatcatcatggagaacaagcattgatgatgactattgtgaatttggctcagaactttgtgggaagtaacaacattaacttgcttcagcctattggtcagtttggaactcggcttcatggtggcaaagatgctgcaagccctcgttatattttcacaatgttaagcactttagcaaggctactttttcctgctgtggatgacaacctccttaagttcctttatgatgataatcaacgtgtagagcctgagtggtatattcctataattcccatggttttaataaatggtgctgagggcattggtactggatgggcttgtaaactacccaactatgatgctagggaaattgtgaacaatgtcagacgaatgctagatggcctggatcctcatcccatgcttccaaactacaaaaactttaaaggcacgattcaagaacttggtcaaaaccagtatgcagtcagtggtgaaatatttgtagtggacagaaacacagtagaaattacagagcttccagttagaacttggacacaggtatataaagaacaggttttagaacctatgctaaatggaacagataaaacaccagcattaatttctgattataaagaatatcatactgacacaactgtgaaatttgtggtgaaaatgactgaagagaaactagcacaagcagaagctgctggactgcataaagtttttaaacttcaaactactcttacttgtaattccatggtactttttgatcatatgggatgtctgaagaaatatgaaactgtgcaagacattctgaaagaattctttgatttacgattaagttattacggtttacgtaaggagtggcttgtgggaatgttgggagcagaatctacaaagcttaacaatcaagcccgtttcattttagagaagatacaagggaaaattactatagagaataggtcaaagaaagatttgattcaaatgttagtccagagaggttatgaatctgacccagtgaaagcctggaaagaagcacaagaaaaggcagcagaagaggatgaaacacaaaaccagcatgatgatagttcctccgattcaggaactccttcaggcccagattttaattatattttaaatatgtctctgtggtctcttactaaagaaaaagttgaagaactgattaaacagagagatgcaaaagggcgagaggtcaatgatcttaaaagaaaatctccttcagatctttggaaagaggatttagcggcatttgttgaagaactggataaagtggaatctcaagaacgagaagatgttctggctggaatgtctggaaaagcaattaaaggtaaagttggcaaacctaaggtgaagaaactccagttggaagagacaatgccctcaccttatggcagaagaataattcctgaaattacagctatgaaggcagatgccagcaaaaagttgctgaagaagaagaagggtgatcttgatactgcagcagtaaaagtggaatttgatgaagaattcagtggagcaccagtagaaggtgcaggagaagaggcattgactccatcagttcctataaataaaggtcccaaacctaagagggagaagaaggagcctggtaccagagtgagaaaaacacctacatcatctggtaaacctagtgcaaagaaagtgaagaaacggaatccttggtcagatgatgaatccaagtcagaaagtgatttggaagaaacagaacctgtggttattccaagagattctttgcttaggagagcagcagccgaaagacctaaatacacatttgatttctcagaagaagaggatgatgatgctgatgatgatgatgatgacaataatgatttagaggaattgaaagttaaagcatctcccataacaaatgatggggaagatgaatttgttccttcagatgggttagataaagatgaatatacattttcaccaggcaaatcaaaagccactccagaaaaatctttgcatgacaaaaaaagtcaggattttggaaatctcttctcatttccttcatattctcagaagtcagaagatgattcagctaaatttgacagtaatgaagaagattctgcttctgttttttcaccatcatttggtctgaaacagacagataaagttccaagtaaaacggtagctgctaaaaagggaaaaccgtcttcagatacagtccctaagcccaagagagccccaaaacagaagaaagtagtagaggctgtaaactctgactcggattcagaatttggcattccaaagaagactacaacaccaaaaggtaaaggccgaggggcaaagaaaaggaaagcatctggctctgaaaatgaaggcgattataaccctggcaggaaaacatccaaaacaacaagcaagaaaccgaagaagacatcttttgatcaggattcagatgtggacatcttcccctcagacttccctactgagccaccttctctgccacgaaccggtcgggctaggaaagaagtaaaatattttgcagagtctgatgaagaagaagatgatgttgattttgcaatgtttaattaagtgcccaaagagcacaaacatttttcaacaaatatcttgtgttgtccttttgtcttctctgtctcagacttttgtacatctggcttattttaatgtgatgatgtaattgacggttttttattattgtggtaggccttttaacattttgttcttacacatacagttttatgctcttttttactcattgaaatgtcacgtactgtctgattggcttgtagaattgttatagactgccgtgcattagcacagattttaattgtcatggttacaaactacagacctgctttttgaaatgaaatttaaacattaaaaatggaactaaaaaaaaaaaaaacaaaaaaaaaaaaaaaaaaaaacaaaaagaaacaaaacaagccaaccacaccaaccaaaaaggagagcaacaaaaaagaaacagtccacaagaagagagagccaacaatgaaacacgagaacagggatagcaagaaagagcccgccgcgccgcgcaagaacgaacaaggcgcagagaccacgtccgaaccggcaaccaaacggcacgcagcgaaaatgcgccagggagcgccgtgccgaccacggcagccggcacaaaagcgagcaggcagaccacacagcgggccgcagacgcgacccacgcgcgagaagccgcgcacacccggaaggt

SEQ ID NO: 292404 - DNA, 5900 bp, Homo sapiens
gtgcggtgttatgccggacaagagggaggtgaccgtggcggcggcggcggcggctctgtttattgtccctctcggtgtgtgtgtgtgaggaaatcggggctgcagcgaggctaaggcggcctttgaagcagcggcggcgaccgggacgactactctggcgactcgagtggctggccttcgcggagtgtgagaaggacaaggcacctctgcgtcctcgccacgtccgagcgcctcgggctccccggccgccctcgcggctcgcacgcccgggcttcagcccggcctgcagcggcgcccgcgggcgggcgagaaggcaacgccgccgctcggccgccgccggtcgctccctgctttctcctcagccgccgcgctaggcccgggcgacgcggacgccgcgcctcgagtttgagggcagccggcggcgcggcctcctcagcgggctcggctggacgtccgctccggatcttcgcgatggggcgcgggggtcggcgcggctaggagtgcggcgagtggagcggtgggtgcggagcggcggggcccagcggcccgcagggaggcgggagcggcggctgcggcctcagggcctgtgagctggaggcactcgccatggccaagtcgggtggctgcggcgcgggagccggcgtgggcggcggcaacggggcactgacctgggtgaacaatgctgcaaaaaaagaagagtcagaaactgccaacaaaaatgattcttcaaagaagttgtctgttgagagagtgtatcagaagaagacacaacttgaacacattcttcttcgtcctgatacatatattgggtcagtggagccattgacgcagttcatgtgggtgtatgatgaagatgtaggaatgaattgcagggaggttacctttgtgccaggtttatacaagatctttgatgaaattttggttaatgctgctgacaataaacagagggataagaacatgacttgtattaaagtttctattgatcctgaatctaacattataagcatttggaataatgggaaaggcattccagtagtagaacacaaggtagagaaagtttatgttcctgctttaatttttggacagcttttaacatccagtaactatgatgatgatgagaaaaaagttacaggtggtcgtaatggttatggtgcaaaactttgtaatattttcagtacaaagtttacagtagaaacagcttgcaaagaatacaaacacagttttaagcagacatggatgaataatatgatgaagacttctgaagccaaaattaaacattttgatggtgaagattacacatgcataacattccaaccagatctgtccaaatttaagatggaaaaacttgacaaggatattgtggccctcatgactagaagggcatatgatttggctggttcgtgtagaggggtcaaggtcatgtttaatggaaagaaattgcctgtaaatggatttcgcagttatgtagatctttatgtgaaagacaaattggatgaaactggggtggccctgaaagttattcatgagcttgcaaatgaaagatgggatgtttgtctcacattgagtgaaaaaggattccagcaaatcagctttgtaaatagtattgcaactacaaaaggtggacggcacgtggattatgtggtagatcaagttgttggtaaactgattgaagtagttaagaaaaagaacaaagctggtgtatcagtgaaaccatttcaagtaaaaaaccatatatgggtttttattaattgccttattgaaaatccaacttttgattctcagactaaggaaaacatgactctgcagcccaaaagttttgggtctaaatgccagctgtcagaaaaattttttaaagcagcctctaattgtggcattgtagaaagtatcctgaactgggtgaaatttaaggctcagactcagctgaataagaagtgttcatcagtaaaatacagtaaaatcaaaggtattcccaaactggatgatgctaatgatgctggtggtaaacattccctggagtgtacactgatattaacagagggagactctgccaaatcactggctgtgtctggattaggtgtgattggacgagacagatacggagtttttccactcaggggcaaaattcttaatgtacgggaagcttctcataaacagatcatggaaaatgctgaaataaataatattattaaaatagttggtctacaatataagaaaagttacgatgatgcagaatctctgaaaaccttacgctatggaaagattatgattatgaccgatcaggatcaagatggttctcacataaaaggcctgcttattaatttcatccatcacaattggccatcacttttgaagcatggttttcttgaagagttcattactcctattgtaaaggcaagcaaaaataagcaggaactttccttctacagtattcctgaatttgacgaatggaaaaaacatatagaaaaccagaaagcctggaaaataaagtactataaaggattgggtactagtacagctaaagaagcaaaggaatattttgctgatatggaaaggcatcgcatcttgtttagatatgctggtcctgaagatgatgctgccattaccttggcatttagtaagaagaagattgatgacagaaaagaatggttaacaaattttatggaagaccggagacagcgtaggctacatggcttaccagagcaatttttatatggtactgcaacaaagcatttgacttataatgatttcatcaacaaggaattgattctcttctcaaactcagacaatgaaagatctataccatctcttgttgatggctttaaacctggccagcggaaagttttatttacctgtttcaagaggaatgataaacgtgaagtaaaagttgcccagttggctggctctgttgctgagatgtcggcttatcatcatggagaacaagcattgatgatgactattgtgaatttggctcagaactttgtgggaagtaacaacattaacttgcttcagcctattggtcagtttggaactcggcttcatggtggcaaagatgctgcaagccctcgttatattttcacaatgttaagcactttagcaaggctactttttcctgctgtggatgacaacctccttaagttcctttatgatgataatcaacgtgtagagcctgagtggtatattcctataattcccatggttttaataaatggtgctgagggcattggtactggatgggcttgtaaactacccaactatgatgctagggaaattgtgaacaatgtcagacgaatgctagatggcctggatcctcatcccatgcttccaaactacaaaaactttaaaggcacgattcaagaacttggtcaaaaccagtatgcagtcagtggtgaaatatttgtagtggacagaaacacagtagaaattacagagcttccagttagaacttggacacaggtatataaagaacaggttttagaacctatgctaaatggaacagataaaacaccagcattaatttctgattataaagaatatcatactgacacaactgtgaaatttgtggtgaaaatgactgaagagaaactagcacaagcagaagctgctggactgcataaagtttttaaacttcaaactactcttacttgtaattccatggtactttttgatcatatgggatgtctgaagaaatatgaaactgtgcaagacattctgaaagaattctttgatttacgattaagttattacggtttacgtaaggagtggcttgtgggaatgttgggagcagaatctacaaagcttaacaatcaagcccgtttcattttagagaagatacaagggaaaattactatagagaataggtcaaagaaagatttgattcaaatgttagtccagagaggttatgaatctgacccagtgaaagcctggaaagaagcacaagaaaaggcagcagaagaggatgaaacacaaaaccagcatgatgatagttcctccgattcaggaactccttcaggcccagattttaattatattttaaatatgtctctgtggtctcttactaaagaaaaagttgaagaactgattaaacagagagatgcaaaagggcgagaggtcaatgatcttaaaagaaaatctccttcagatctttggaaagaggatttagcggcatttgttgaagaactggataaagtggaatctcaagaacgagaagatgttctggctggaatgtctggaaaagcaattaaaggtaaagttggcaaacctaaggtgaagaaactccagttggaagagacaatgccctcaccttatggcagaagaataattcctgaaattacagctatgaaggcagatgccagcaaaaagttgctgaagaagaagaagggtgatcttgatactgcagcagtaaaagtggaatttgatgaagaattcagtggagcaccagtagaaggtgcaggagaagaggcattgactccatcagttcctataaataaaggtcccaaacctaagagggagaagaaggagcctggtaccagagtgagaaaaacacctacatcatctggtaaacctagtgcaaagaaagtgaagaaacggaatccttggtcagatgatgaatccaagtcagaaagtgatttggaagaaacagaacctgtggttattccaagagattctttgcttaggagagcagcagccgaaagacctaaatacacatttgatttctcagaagaagaggatgatgatgctgatgatgatgatgatgacaataatgatttagaggaattgaaagttaaagcatctcccataacaaatgatggggaagatgaatttgttccttcagatgggttagataaagatgaatatacattttcaccaggcaaatcaaaagccactccagaaaaatctttgcatgacaaaaaaagtcaggattttggaaatctcttctcatttccttcatattctcagaagtcagaagatgattcagctaaatttgacagtaatgaagaagattctgcttctgttttttcaccatcatttggtctgaaacagacagataaagttccaagtaaaacggtagctgctaaaaagggaaaaccgtcttcagatacagtccctaagcccaagagagccccaaaacagaagaaagtagtagaggctgtaaactctgactcggattcagaatttggcattccaaagaagactacaacaccaaaaggtaaaggccgaggggcaaagaaaaggaaagcatctggctctgaaaatgaaggcgattataaccctggcaggaaaacatccaaaacaacaagcaagaaaccgaagaagacatcttttgatcaggattcagatgtggacatcttcccctcagacttccctactgagccaccttctctgccacgaaccggtcgggctaggaaagaagtaaaatattttgcagagtctgatgaagaagaagatgatgttgattttgcaatgtttaattaagtgcccaaagagcacaaacatttttcaacaaatatcttgtgttgtccttttgtcttctctgtctcagacttttgtacatctggcttattttaatgtgatgatgtaattgacggttttttattattgtggtaggccttttaacattttgttcttacacatacagttttatgctcttttttactcattgaaatgtcacgtactgtctgattggcttgtagaattgttatagactgccgtgcattagcacagattttaattgtcatggttacaaactacagacctgctttttgaaatgaaatttaaacattaaaaatggaactaaaaaacaacacagacgcacaacacagaagccacacaatacaacaacacaaacacacagacacaaaaaaaccatagaagaccaagaaacacaacagatcagaaaacac

SEQ ID NO: 292405 - DNA, 5532 bp, Homo sapiens
tctgtctcaaaaacaaaacaaacaaacaaactgatatcttacagaattgggaaatgtttgtatttttggattgctggagactgctctagtgattctggtgactatacccacgttttgggctcagtcaaaactacaggttcatgttgtataataagagccagacggtcagtaaatagacctgtgttttctttagatttaaaaaatcagtctgaaagataattttgtcattaaaaaagaaaacccatgtcgtgtgtccatactcattgtctaccccttggtaggttatttaaatttgattttttggttaattttagactctttttgatcagaacaatgctgcaaaaaaagaagagtcagaaactgccaacaaaaatgattcttcaaagaagttgtctgttgagagagtgtatcagaagaagacacaacttgaacacattcttcttcgtcctgatacatatattgggtcagtggagccattgacgcagttcatgtgggtgtatgatgaagatgtaggaatgaattgcagggaggttacctttgtgccaggtttatacaagatctttgatgaaattttggttaatgctgctgacaataaacagagggataagaacatgacttgtattaaagtttctattgatcctgaatctaacattataagcatttggaataatgggaaaggcattccagtagtagaacacaaggtagagaaagtttatgttcctgctttaatttttggacagcttttaacatccagtaactatgatgatgatgagaaaaaagttacaggtggtcgtaatggttatggtgcaaaactttgtaatattttcagtacaaagtttacagtagaaacagcttgcaaagaatacaaacacagttttaagcagacatggatgaataatatgatgaagacttctgaagccaaaattaaacattttgatggtgaagattacacatgcataacattccaaccagatctgtccaaatttaagatggaaaaacttgacaaggatattgtggccctcatgactagaagggcatatgatttggctggttcgtgtagaggggtcaaggtcatgtttaatggaaagaaattgcctgtaaatggatttcgcagttatgtagatctttatgtgaaagacaaattggatgaaactggggtggccctgaaagttattcatgagcttgcaaatgaaagatgggatgtttgtctcacattgagtgaaaaaggattccagcaaatcagctttgtaaatagtattgcaactacaaaaggtggacggcacgtggattatgtggtagatcaagttgttggtaaactgattgaagtagttaagaaaaagaacaaagctggtgtatcagtgaaaccatttcaagtaaaaaaccatatatgggtttttattaattgccttattgaaaatccaacttttgattctcagactaaggaaaacatgactctgcagcccaaaagttttgggtctaaatgccagctgtcagaaaaattttttaaagcagcctctaattgtggcattgtagaaagtatcctgaactgggtgaaatttaaggctcagactcagctgaataagaagtgttcatcagtaaaatacagtaaaatcaaaggtattcccaaactggatgatgctaatgatgctggtggtaaacattccctggagtgtacactgatattaacagagggagactctgccaaatcactggctgtgtctggattaggtgtgattggacgagacagatacggagtttttccactcaggggcaaaattcttaatgtacgggaagcttctcataaacagatcatggaaaatgctgaaataaataatattattaaaatagttggtctacaatataagaaaagttacgatgatgcagaatctctgaaaaccttacgctatggaaagattatgattatgaccgatcaggatcaagatggttctcacataaaaggcctgcttattaatttcatccatcacaattggccatcacttttgaagcatggttttcttgaagagttcattactcctattgtaaaggcaagcaaaaataagcaggaactttccttctacagtattcctgaatttgacgaatggaaaaaacatatagaaaaccagaaagcctggaaaataaagtactataaaggattgggtactagtacagctaaagaagcaaaggaatattttgctgatatggaaaggcatcgcatcttgtttagatatgctggtcctgaagatgatgctgccattaccttggcatttagtaagaagaagattgatgacagaaaagaatggttaacaaattttatggaagaccggagacagcgtaggctacatggcttaccagagcaatttttatatggtactgcaacaaagcatttgacttataatgatttcatcaacaaggaattgattctcttctcaaactcagacaatgaaagatctataccatctcttgttgatggctttaaacctggccagcggaaagttttatttacctgtttcaagaggaatgataaacgtgaagtaaaagttgcccagttggctggctctgttgctgagatgtcggcttatcatcatggagaacaagcattgatgatgactattgtgaatttggctcagaactttgtgggaagtaacaacattaacttgcttcagcctattggtcagtttggaactcggcttcatggtggcaaagatgctgcaagccctcgttatattttcacaatgttaagcactttagcaaggctactttttcctgctgtggatgacaacctccttaagttcctttatgatgataatcaacgtgtagagcctgagtggtatattcctataattcccatggttttaataaatggtgctgagggcattggtactggatgggcttgtaaactacccaactatgatgctagggaaattgtgaacaatgtcagacgaatgctagatggcctggatcctcatcccatgcttccaaactacaaaaactttaaaggcacgattcaagaacttggtcaaaaccagtatgcagtcagtggtgaaatatttgtagtggacagaaacacagtagaaattacagagcttccagttagaacttggacacaggtatataaagaacaggttttagaacctatgctaaatggaacagataaaacaccagcattaatttctgattataaagaatatcatactgacacaactgtgaaatttgtggtgaaaatgactgaagagaaactagcacaagcagaagctgctggactgcataaagtttttaaacttcaaactactcttacttgtaattccatggtactttttgatcatatgggatgtctgaagaaatatgaaactgtgcaagacattctgaaagaattctttgatttacgattaagttattacggtttacgtaaggagtggcttgtgggaatgttgggagcagaatctacaaagcttaacaatcaagcccgtttcattttagagaagatacaagggaaaattactatagagaataggtcaaagaaagatttgattcaaatgttagtccagagaggttatgaatctgacccagtgaaagcctggaaagaagcacaagaaaaggcagcagaagaggatgaaacacaaaaccagcatgatgatagttcctccgattcaggaactccttcaggcccagattttaattatattttaaatatgtctctgtggtctcttactaaagaaaaagttgaagaactgattaaacagagagatgcaaaagggcgagaggtcaatgatcttaaaagaaaatctccttcagatctttggaaagaggatttagcggcatttgttgaagaactggataaagtggaatctcaagaacgagaagatgttctggctggaatgtctggaaaagcaattaaaggtaaagttggcaaacctaaggtgaagaaactccagttggaagagacaatgccctcaccttatggcagaagaataattcctgaaattacagctatgaaggcagatgccagcaaaaagttgctgaagaagaagaagggtgatcttgatactgcagcagtaaaagtggaatttgatgaagaattcagtggagcaccagtagaaggtgcaggagaagaggcattgactccatcagttcctataaataaaggtcccaaacctaagagggagaagaaggagcctggtaccagagtgagaaaaacacctacatcatctggtaaacctagtgcaaagaaagtgaagaaacggaatccttggtcagatgatgaatccaagtcagaaagtgatttggaagaaacagaacctgtggttattccaagagattctttgcttaggagagcagcagccgaaagacctaaatacacatttgatttctcagaagaagaggatgatgatgctgatgatgatgatgatgacaataatgatttagaggaattgaaagttaaagcatctcccataacaaatgatggggaagatgaatttgttccttcagatgggttagataaagatgaatatacattttcaccaggcaaatcaaaagccactccagaaaaatctttgcatgacaaaaaaagtcaggattttggaaatctcttctcatttccttcatattctcagaagtcagaagatgattcagctaaatttgacagtaatgaagaagattctgcttctgttttttcaccatcatttggtctgaaacagacagataaagttccaagtaaaacggtagctgctaaaaagggaaaaccgtcttcagatacagtccctaagcccaagagagccccaaaacagaagaaagtagtagaggctgtaaactctgactcggattcagaatttggcattccaaagaagactacaacaccaaaaggtaaaggccgaggggcaaagaaaaggaaagcatctggctctgaaaatgaaggcgattataaccctggcaggaaaacatccaaaacaacaagcaagaaaccgaagaagacatcttttgatcaggattcagatgtggacatcttcccctcagacttccctactgagccaccttctctgccacgaaccggtcgggctaggaaagaagtaaaatattttgcagagtctgatgaagaagaagatgatgttgattttgcaatgtttaattaagtgcccaaagagcacaaacatttttcaacaaatatcttgtgttgtccttttgtcttctctgtctcagacttttgtacatctggcttattttaatgtgatgatgtaattgacggttttttattattgtggtaggccttttaacattttgttcttacacatacagttttatgctcttttttactcattgaaatgtcacgtactgtctgattggcttgtagaattgttatagactgccgtgcattagcacagattttaattgtcatggttacaaactacagacctgctttttgaaatgaaatttaaacattaaaaatggaactgtgttctctgtctctttactgaagataaaggtgtagtaaaagctcccacacacctttaaaataaatatattttattctttgcagga

SEQ ID NO: 292406 - DNA, 5794 bp, Homo sapiens
gtgcggtgttatgccggacaagagggaggtgaccgtggcggcggcggcggcggctctgtttattgtccctctcggtgtgtgtgtgtgaggaaatcggggctgcagcgaggctaaggcggcctttgaagcagcggcggcgaccgggacgactactctggcgactcgagtggctggccttcgcggagtgtgagaaggacaaggcacctctgcgtcctcgccacgtccgagcgcctcgggctccccggccgccctcgcggctcgcacgcccgggcttcagcccggcctgcagcggcgcccgcgggcgggcgagaaggcaacgccgccgctcggccgccgccggtcgctccctgctttctcctcagccgccgcgctaggcccgggcgacgcggacgccgcgcctcgagtttgagggcagccggcggcgcggcctcctcagcgggctcggctggacgtccgctccggatcttcgcgatggggcgcgggggtcggcgcggctaggagtgcggcgagtggagcggtgggtgcggagcggcggggcccagcggcccgcagggaggcgggagcggcggctgcggcctcagggcctgtgagctggaggcactcgccatggccaagtcgggtggctgcggcgcgggagccggcgtgggcggcggcaacggggcactgacctgggtgaacaatgctgcaaaaaaagaagagtcagaaactgccaacaaaaatgattcttcaaagaagttgtctgttgagagagtgtatcagaagaagacacaacttgaacacattcttcttcgtcctgatacatatattgggtcagtggagccattgacgcagttcatgtgggtgtatgatgaagatgtaggaatgaattgcagggaggttacctttgtgccaggtttatacaagatctttgatgaaattttggttaatgctgctgacaataaacagagggataagaacatgacttgtattaaagtttctattgatcctgaatctaacattataagcatttggaataatgggaaaggcattccagtagtagaacacaaggtagagaaagtttatgttcctgctttaatttttggacagcttttaacatccagtaactatgatgatgatgagaaaaaagttacaggtggtcgtaatggttatggtgcaaaactttgtaatattttcagtacaaagtttacagtagaaacagcttgcaaagaatacaaacacagttttaagcagacatggatgaataatatgatgaagacttctgaagccaaaattaaacattttgatggtgaagattacacatgcataacattccaaccagatctgtccaaatttaagatggaaaaacttgacaaggatattgtggccctcatgactagaagggcatatgatttggctggttcgtgtagaggggtcaaggtcatgtttaatggaaagaaattgcctgtaaatggatttcgcagttatgtagatctttatgtgaaagacaaattggatgaaactggggtggccctgaaagttattcatgagcttgcaaatgaaagatgggatgtttgtctcacattgagtgaaaaaggattccagcaaatcagctttgtaaatagtattgcaactacaaaaggtggacggcacgtggattatgtggtagatcaagttgttggtaaactgattgaagtagttaagaaaaagaacaaagctggtgtatcagtgaaaccatttcaagtaaaaaaccatatatgggtttttattaattgccttattgaaaatccaacttttgattctcagactaaggaaaacatgactctgcagcccaaaagttttgggtctaaatgccagctgtcagaaaaattttttaaagcagcctctaattgtggcattgtagaaagtatcctgaactgggtgaaatttaaggctcagactcagctgaataagaagtgttcatcagtaaaatacagtaaaatcaaaggtattcccaaactggatgatgctaatgatgctggtggtaaacattccctggagtgtacactgatattaacagagggagactctgccaaatcactggctgtgtctggattaggtgtgattggacgagacagatacggagtttttccactcaggggcaaaattcttaatgtacgggaagcttctcataaacagatcatggaaaatgctgaaataaataatattattaaaatagttggtctacaatataagaaaagttacgatgatgcagaatctctgaaaaccttacgctatggaaagattatgattatgaccgatcaggatcaagatggttctcacataaaaggcctgcttattaatttcatccatcacaattggccatcacttttgaagcatggttttcttgaagagttcattactcctattgtaaaggcaagcaaaaataagcaggaactttccttctacagtattcctgaatttgacgaatggaaaaaacatatagaaaaccagaaagcctggaaaataaagtactataaaggattgggtactagtacagctaaagaagcaaaggaatattttgctgatatggaaaggcatcgcatcttgtttagatatgctggtcctgaagatgatgctgccattaccttggcatttagtaagaagaagattgatgacagaaaagaatggttaacaaattttatggaagaccggagacagcgtaggctacatggcttaccagagcaatttttatatggtactgcaacaaagcatttgacttataatgatttcatcaacaaggaattgattctcttctcaaactcagacaatgaaagatctataccatctcttgttgatggctttaaacctggccagcggaaagttttatttacctgtttcaagaggaatgataaacgtgaagtaaaagttgcccagttggctggctctgttgctgagatgtcggcttatcatcatggagaacaagcattgatgatgactattgtgaatttggctcagaactttgtgggaagtaacaacattaacttgcttcagcctattggtcagtttggaactcggcttcatggtggcaaagatgctgcaagccctcgttatattttcacaatgttaagcactttagcaaggctactttttcctgctgtggatgacaacctccttaagttcctttatgatgataatcaacgtgtagagcctgagtggtatattcctataattcccatggttttaataaatggtgctgagggcattggtactggatgggcttgtaaactacccaactatgatgctagggaaattgtgaacaatgtcagacgaatgctagatggcctggatcctcatcccatgcttccaaactacaaaaactttaaaggcacgattcaagaacttggtcaaaaccagtatgcagtcagtggtgaaatatttgtagtggacagaaacacagtagaaattacagagcttccagttagaacttggacacaggtatataaagaacaggttttagaacctatgctaaatggaacagataaaacaccagcattaatttctgattataaagaatatcatactgacacaactgtgaaatttgtggtgaaaatgactgaagagaaactagcacaagcagaagctgctggactgcataaagtttttaaacttcaaactactcttacttgtaattccatggtactttttgatcatatgggatgtctgaagaaatatgaaactgtgcaagacattctgaaagaattctttgatttacgattaagttattacggtttacgtaaggagtggcttgtgggaatgttgggagcagaatctacaaagcttaacaatcaagcccgtttcattttagagaagatacaagggaaaattactatagagaataggtcaaagaaagatttgattcaaatgttagtccagagaggttatgaatctgacccagtgaaagcctggaaagaagcacaagaaaaggcagcagaagaggatgaaacacaaaaccagcatgatgatagttcctccgattcaggaactccttcaggcccagattttaattatattttaaatatgtctctgtggtctcttactaaagaaaaagttgaagaactgattaaacagagagatgcaaaagggcgagaggtcaatgatcttaaaagaaaatctccttcagatctttggaaagaggatttagcggcatttgttgaagaactggataaagtggaatctcaagaacgagaagatgttctggctggaatgtctggaaaagcaattaaaggtaaagttggcaaacctaaggtgaagaaactccagttggaagagacaatgccctcaccttatggcagaagaataattcctgaaattacagctatgaaggcagatgccagcaaaaagttgctgaagaagaagaagggtgatcttgatactgcagcagtaaaagtggaatttgatgaagaattcagtggagcaccagtagaaggtgcaggagaagaggcattgactccatcagttcctataaataaaggtcccaaacctaagagggagaagaaggagcctggtaccagagtgagaaaaacacctacatcatctggtaaacctagtgcaaagaaagtgaagaaacggaatccttggtcagatgatgaatccaagtcagaaagtgatttggaagaaacagaacctgtggttattccaagagattctttgcttaggagagcagcagccgaaagacctaaatacacatttgatttctcagaagaagaggatgatgatgctgatgatgatgatgatgacaataatgatttagaggaattgaaagttaaagcatctcccataacaaatgatggggaagatgaatttgttccttcagatgggttagataaagatgaatatacattttcaccaggcaaatcaaaagccactccagaaaaatctttgcatgacaaaaaaagtcaggattttggaaatctcttctcatttccttcatattctcagaagtcagaagatgattcagctaaatttgacagtaatgaagaagattctgcttctgttttttcaccatcatttggtctgaaacagacagataaagttccaagtaaaacggtagctgctaaaaagggaaaaccgtcttcagatacagtccctaagcccaagagagccccaaaacagaagaaagtagtagaggctgtaaactctgactcggattcagaatttggcattccaaagaagactacaacaccaaaaggtaaaggccgaggggcaaagaaaaggaaagcatctggctctgaaaatgaaggcgattataaccctggcaggaaaacatccaaaacaacaagcaagaaaccgaagaagacatcttttgatcaggattcagatgtggacatcttcccctcagacttccctactgagccaccttctctgccacgaaccggtcgggctaggaaagaagtaaaatattttgcagagtctgatgaagaagaagatgatgttgattttgcaatgtttaattaagtgcccaaagagcacaaacatttttcaacaaatatcttgtgttgtccttttgtcttctctgtctcagacttttgtacatctggcttattttaatgtgatgatgtaattgacggttttttattattgtggtaggccttttaacattttgttcttacacatacagttttatgctctgacccatcctatcccctttcctctccattccaaacccctctctctttaaaaacccctgcattccccccacaaattgaagggtggaaatttttggaaagaatctcacccactccttcccttgttagcatggctaataaaatctccttta

SEQ ID NO: 292407 - DNA, 3556 bp, Homo sapiens
tctagttacatttaatatatagtattttcctttgcccttattttctgttaactgatggttaaatcagaggcgtgatcagatttgggttacatttgtttggcaaaaacatttcataggtagcgttgtgtgctttcatcaggaagcatctaatgtctactttgtctttagttgcttattaagattgatcacttagtataggtgttgccagcttgatccatctattacaacttttccaccagctttttacttgatggttttaaacagacattgatattcatgactcacttttatttttaaaattgtctgatatggaaaggcatcgcatcttgtttagatatgctggtcctgaagatgatgctgccattaccttggcatttagtaagaagaagattgatgacagaaaagaatggttaacaaattttatggaagaccggagacagcgtaggctacatggcttaccagagcaatttttatatggtactgcaacaaagcatttgacttataatgatttcatcaacaaggaattgattctcttctcaaactcagacaatgaaagatctataccatctcttgttgatggctttaaacctggccagcggaaagttttatttacctgtttcaagaggaatgataaacgtgaagtaaaagttgcccagttggctggctctgttgctgagatgtcggcttatcatcatggagaacaagcattgatgatgactattgtgaatttggctcagaactttgtgggaagtaacaacattaacttgcttcagcctattggtcagtttggaactcggcttcatggtggcaaagatgctgcaagccctcgttatattttcacaatgttaagcactttagcaaggctactttttcctgctgtggatgacaacctccttaagttcctttatgatgataatcaacgtgtagagcctgagtggtatattcctataattcccatggttttaataaatggtgctgagggcattggtactggatgggcttgtaaactacccaactatgatgctagggaaattgtgaacaatgtcagacgaatgctagatggcctggatcctcatcccatgcttccaaactacaaaaactttaaaggcacgattcaagaacttggtcaaaaccagtatgcagtcagtggtgaaatatttgtagtggacagaaacacagtagaaattacagagcttccagttagaacttggacacaggtatataaagaacaggttttagaacctatgctaaatggaacagataaaacaccagcattaatttctgattataaagaatatcatactgacacaactgtgaaatttgtggtgaaaatgactgaagagaaactagcacaagcagaagctgctggactgcataaagtttttaaacttcaaactactcttacttgtaattccatggtactttttgatcatatgggatgtctgaagaaatatgaaactgtgcaagacattctgaaagaattctttgatttacgattaagttattacggtttacgtaaggagtggcttgtgggaatgttgggagcagaatctacaaagcttaacaatcaagcccgtttcattttagagaagatacaagggaaaattactatagagaataggtcaaagaaagatttgattcaaatgttagtccagagaggttatgaatctgacccagtgaaagcctggaaagaagcacaagaaaaggcagcagaagaggatgaaacacaaaaccagcatgatgatagttcctccgattcaggaactccttcaggcccagattttaattatattttaaatatgtctctgtggtctcttactaaagaaaaagttgaagaactgattaaacagagagatgcaaaagggcgagaggtcaatgatcttaaaagaaaatctccttcagatctttggaaagaggatttagcggcatttgttgaagaactggataaagtggaatctcaagaacgagaagatgttctggctggaatgtctggaaaagcaattaaaggtaaagttggcaaacctaaggtgaagaaactccagttggaagagacaatgccctcaccttatggcagaagaataattcctgaaattacagctatgaaggcagatgccagcaaaaagttgctgaagaagaagaagggtgatcttgatactgcagcagtaaaagtggaatttgatgaagaattcagtggagcaccagtagaaggtgcaggagaagaggcattgactccatcagttcctataaataaaggtcccaaacctaagagggagaagaaggagcctggtaccagagtgagaaaaacacctacatcatctggtaaacctagtgcaaagaaagtgaagaaacggaatccttggtcagatgatgaatccaagtcagaaagtgatttggaagaaacagaacctgtggttattccaagagattctttgcttaggagagcagcagccgaaagacctaaatacacatttgatttctcagaagaagaggatgatgatgctgatgatgatgatgatgacaataatgatttagaggaattgaaagttaaagcatctcccataacaaatgatggggaagatgaatttgttccttcagatgggttagataaagatgaatatacattttcaccaggcaaatcaaaagccactccagaaaaatctttgcatgacaaaaaaagtcaggattttggaaatctcttctcatttccttcatattctcagaagtcagaagatgattcagctaaatttgacagtaatgaagaagattctgcttctgttttttcaccatcatttggtctgaaacagacagataaagttccaagtaaaacggtagctgctaaaaagggaaaaccgtcttcagatacagtccctaagcccaagagagccccaaaacagaagaaagtagtagaggctgtaaactctgactcggattcagaatttggcattccaaagaagactacaacaccaaaaggtaaaggccgaggggcaaagaaaaggaaagcatctggctctgaaaatgaaggcgattataaccctggcaggaaaacatccaaaacaacaagcaagaaaccgaagaagacatcttttgatcaggattcagatgtggacatcttcccctcagacttccctactgagccaccttctctgccacgaaccggtcgggctaggaaagaagtaaaatattttgcagagtctgatgaagaagaagatgatgttgattttgcaatgtttaattaagtgcccaaagagcacaaacatttttcaacaaatatcttgtgttgtccttttgtcttctctgtctcagacttttgtacatctggcttattttaatgtgatgatgtaattgacggttttttattattgtggtaggccttttaacattttgttcttacacatacagttttatgctcttttttactcattgaaatgtcacgtactgtctgattggcttgtagaattgttatagactgccgtgcattagcacagattttaattgtcatggttacaaactacagacctgctttttgaaatgaaatttaaacattaaaaatggaact

SEQ ID NO: 292408 - DNA, 3209 bp, Homo sapiens
tggagtagatggagatggcataaaaacatcttagtatatacctgcagatggctttctaggaaaaaacaaacaaacaaaacaaacgtgttagtatgtactcactttgttacagaatctcaagtaacaattttactggtgttcttgaaaagcaaattgtatctttgctttattcccctgaattgttacaactatatcttgaagtaacattttaaaagagctcttttaaaaataggctttaaacctggccagcggaaagttttatttacctgtttcaagaggaatgataaacgtgaagtaaaagttgcccagttggctggctctgttgctgagatgtcggcttatcatcatggagaacaagcattgatgatgactattgtgaatttggctcagaactttgtgggaagtaacaacattaacttgcttcagcctattggtcagtttggaactcggcttcatggtggcaaagatgctgcaagccctcgttatattttcacaatgttaagcactttagcaaggctactttttcctgctgtggatgacaacctccttaagttcctttatgatgataatcaacgtgtagagcctgagtggtatattcctataattcccatggttttaataaatggtgctgagggcattggtactggatgggcttgtaaactacccaactatgatgctagggaaattgtgaacaatgtcagacgaatgctagatggcctggatcctcatcccatgcttccaaactacaaaaactttaaaggcacgattcaagaacttggtcaaaaccagtatgcagtcagtggtgaaatatttgtagtggacagaaacacagtagaaattacagagcttccagttagaacttggacacaggtatataaagaacaggttttagaacctatgctaaatggaacagataaaacaccagcattaatttctgattataaagaatatcatactgacacaactgtgaaatttgtggtgaaaatgactgaagagaaactagcacaagcagaagctgctggactgcataaagtttttaaacttcaaactactcttacttgtaattccatggtactttttgatcatatgggatgtctgaagaaatatgaaactgtgcaagacattctgaaagaattctttgatttacgattaagttattacggtttacgtaaggagtggcttgtgggaatgttgggagcagaatctacaaagcttaacaatcaagcccgtttcattttagagaagatacaagggaaaattactatagagaataggtcaaagaaagatttgattcaaatgttagtccagagaggttatgaatctgacccagtgaaagcctggaaagaagcacaagaaaaggcagcagaagaggatgaaacacaaaaccagcatgatgatagttcctccgattcaggaactccttcaggcccagattttaattatattttaaatatgtctctgtggtctcttactaaagaaaaagttgaagaactgattaaacagagagatgcaaaagggcgagaggtcaatgatcttaaaagaaaatctccttcagatctttggaaagaggatttagcggcatttgttgaagaactggataaagtggaatctcaagaacgagaagatgttctggctggaatgtctggaaaagcaattaaaggtaaagttggcaaacctaaggtgaagaaactccagttggaagagacaatgccctcaccttatggcagaagaataattcctgaaattacagctatgaaggcagatgccagcaaaaagttgctgaagaagaagaagggtgatcttgatactgcagcagtaaaagtggaatttgatgaagaattcagtggagcaccagtagaaggtgcaggagaagaggcattgactccatcagttcctataaataaaggtcccaaacctaagagggagaagaaggagcctggtaccagagtgagaaaaacacctacatcatctggtaaacctagtgcaaagaaagtgaagaaacggaatccttggtcagatgatgaatccaagtcagaaagtgatttggaagaaacagaacctgtggttattccaagagattctttgcttaggagagcagcagccgaaagacctaaatacacatttgatttctcagaagaagaggatgatgatgctgatgatgatgatgatgacaataatgatttagaggaattgaaagttaaagcatctcccataacaaatgatggggaagatgaatttgttccttcagatgggttagataaagatgaatatacattttcaccaggcaaatcaaaagccactccagaaaaatctttgcatgacaaaaaaagtcaggattttggaaatctcttctcatttccttcatattctcagaagtcagaagatgattcagctaaatttgacagtaatgaagaagattctgcttctgttttttcaccatcatttggtctgaaacagacagataaagttccaagtaaaacggtagctgctaaaaagggaaaaccgtcttcagatacagtccctaagcccaagagagccccaaaacagaagaaagtagtagaggctgtaaactctgactcggattcagaatttggcattccaaagaagactacaacaccaaaaggtaaaggccgaggggcaaagaaaaggaaagcatctggctctgaaaatgaaggcgattataaccctggcaggaaaacatccaaaacaacaagcaagaaaccgaagaagacatcttttgatcaggattcagatgtggacatcttcccctcagacttccctactgagccaccttctctgccacgaaccggtcgggctaggaaagaagtaaaatattttgcagagtctgatgaagaagaagatgatgttgattttgcaatgtttaattaagtgcccaaagagcacaaacatttttcaacaaatatcttgtgttgtccttttgtcttctctgtctcagacttttgtacatctggcttattttaatgtgatgatgtaattgacggttttttattattgtggtaggccttttaacattttgttcttacacatacagttttatgctcttttttactcattgaaatgtcacgtactgtctgattggcttgtagaattgttatagactgccgtgcattagcacagattttaattgtcatggttacaaactacagacctgctttttgaaatgaaatttaaacattaaaaatggaact

SEQ ID NO: 292409 - DNA, 5681 bp, Homo sapiens
gtgcggtgttatgccggacaagagggaggtgaccgtggcggcggcggcggcggctctgtttattgtccctctcggtgtgtgtgtgtgaggaaatcggggctgcagcgaggctaaggcggcctttgaagcagcggcggcgaccgggacgactactctggcgactcgagtggctggccttcgcggagtgtgagaaggacaaggcacctctgcgtcctcgccacgtccgagcgcctcgggctccccggccgccctcgcggctcgcacgcccgggcttcagcccggcctgcagcggcgcccgcgggcgggcgagaaggcaacgccgccgctcggccgccgccggtcgctccctgctttctcctcagccgccgcgctaggcccgggcgacgcggacgccgcgcctcgagtttgagggcagccggcggcgcggcctcctcagcgggctcggctggacgtccgctccggatcttcgcgatggggcgcgggggtcggcgcggctaggagtgcggcgagtggagcggtgggtgcggagcggcggggcccagcggcccgcagggaggcgggagcggcggctgcggcctcagggcctgtgagctggaggcactcgccatggccaagtcgggtggctgcggcgcgggagccggcgtgggcggcggcaacggggcactgacctgggtgaacaatgctgcaaaaaaagaagagtcagaaactgccaacaaaaatgattcttcaaagaagttgtctgttgagagagtgtatcagaagaagacacaacttgaacacattcttcttcgtcctgatacatatattgggtcagtggagccattgacgcagttcatgtgggtgtatgatgaagatgtaggaatgaattgcagggaggttacctttgtgccaggtttatacaagatctttgatgaaattttggttaatgctgctgacaataaacagagggataagaacatgacttgtattaaagtttctattgatcctgaatctaacattataagcatttggaataatgggaaaggcattccagtagtagaacacaaggtagagaaagtttatgttcctgctttaatttttggacagcttttaacatccagtaactatgatgatgatgagaaaaaagttacaggtggtcgtaatggttatggtgcaaaactttgtaatattttcagtacaaagtttacagtagaaacagcttgcaaagaatacaaacacagttttaagcagacatggatgaataatatgatgaagacttctgaagccaaaattaaacattttgatggtgaagattacacatgcataacattccaaccagatctgtccaaatttaagatggaaaaacttgacaaggatattgtggccctcatgactagaagggcatatgatttggctggttcgtgtagaggggtcaaggtcatgtttaatggaaagaaattgcctgtaaatggatttcgcagttatgtagatctttatgtgaaagacaaattggatgaaactggggtggccctgaaagttattcatgagcttgcaaatgaaagatgggatgtttgtctcacattgagtgaaaaaggattccagcaaatcagctttgtaaatagtattgcaactacaaaaggtggacggcacgtggattatgtggtagatcaagttgttggtaaactgattgaagtagttaagaaaaagaacaaagctggtgtatcagtgaaaccatttcaagtaaaaaaccatatatgggtttttattaattgccttattgaaaatccaacttttgattctcagactaaggaaaacatgactctgcagcccaaaagttttgggtctaaatgccagctgtcagaaaaattttttaaagcagcctctaattgtggcattgtagaaagtatcctgaactgggtgaaatttaaggctcagactcagctgaataagaagtgttcatcagtaaaatacagtaaaatcaaaggtattcccaaactggatgatgctaatgatgctggtggtaaacattccctggagtgtacactgatattaacagagggagactctgccaaatcactggctgtgtctggattaggtgtgattggacgagacagatacggagtttttccactcaggggcaaaattcttaatgtacgggaagcttctcataaacagatcatggaaaatgctgaaataaataatattattaaaatagttggtctacaatataagaaaagttacgatgatgcagaatctctgaaaaccttacgctatggaaagattatgattatgaccgatcaggatcaagatggttctcacataaaaggcctgcttattaatttcatccatcacaattggccatcacttttgaagcatggttttcttgaagagttcattactcctattgtaaaggcaagcaaaaataagcaggaactttccttctacagtattcctgaatttgacgaatggaaaaaacatatagaaaaccagaaagcctggaaaataaagtactataaaggattgggtactagtacagctaaagaagcaaaggaatattttgctgatatggaaaggcatcgcatcttgtttagatatgctggtcctgaagatgatgctgccattaccttggcatttagtaagaagaagattgatgacagaaaagaatggttaacaaattttatggaagaccggagacagcgtaggctacatggcttaccagagcaatttttatatggtactgcaacaaagcatttgacttataatgatttcatcaacaaggaattgattctcttctcaaactcagacaatgaaagatctataccatctcttgttgatggctttaaacctggccagcggaaagttttatttacctgtttcaagaggaatgataaacgtgaagtaaaagttgcccagttggctggctctgttgctgagatgtcggcttatcatcatggagaacaagcattgatgatgactattgtgaatttggctcagaactttgtgggaagtaacaacattaacttgcttcagcctattggtcagtttggaactcggcttcatggtggcaaagatgctgcaagccctcgttatattttcacaatgttaagcactttagcaaggctactttttcctgctgtggatgacaacctccttaagttcctttatgatgataatcaacgtgtagagcctgagtggtatattcctataattcccatggttttaataaatggtgctgagggcattggtactggatgggcttgtaaactacccaactatgatgctagggaaattgtgaacaatgtcagacgaatgctagatggcctggatcctcatcccatgcttccaaactacaaaaactttaaaggcacgattcaagaacttggtcaaaaccagtatgcagtcagtggtgaaatatttgtagtggacagaaacacagtagaaattacagagcttccagttagaacttggacacaggtatataaagaacaggttttagaacctatgctaaatggaacagataaaacaccagcattaatttctgattataaagaatatcatactgacacaactgtgaaatttgtggtgaaaatgactgaagagaaactagcacaagcagaagctgctggactgcataaagtttttaaacttcaaactactcttacttgtaattccatggtactttttgatcatatgggatgtctgaagaaatatgaaactgtgcaagacattctgaaagaattctttgatttacgattaagttattacggtttacgtaaggagtggcttgtgggaatgttgggagcagaatctacaaagcttaacaatcaagcccgtttcattttagagaagatacaagggaaaattactatagagaataggtcaaagaaagatttgattcaaatgttagtccagagaggttatgaatctgacccagtgaaagcctggaaagaagcacaagaaaaggcagcagaagaggatgaaacacaaaaccagcatgatgatagttcctccgattcaggaactccttcaggcccagattttaattatattttaaatatgtctctgtggtctcttactaaagaaaaagttgaagaactgattaaacagagagatgcaaaagggcgagaggtcaatgatcttaaaagaaaatctccttcagatctttggaaagaggatttagcggcatttgttgaagaactggataaagtggaatctcaagaacgagaagatgttctggctggaatgtctggaaaagcaattaaaggtaaagttggcaaacctaaggtgaagaaactccagttggaagagacaatgccctcaccttatggcagaagaataattcctgaaattacagctatgaaggcagatgccagcaaaaagttgctgaagaagaagaagggtgatcttgatactgcagcagtaaaagtggaatttgatgaagaattcagtggagcaccagtagaaggtgcaggagaagaggcattgactccatcagttcctataaataaaggtcccaaacctaagagggagaagaaggagcctggtaccagagtgagaaaaacacctacatcatctggtaaacctagtgcaaagaaagtgaagaaacggaatccttggtcagatgatgaatccaagtcagaaagtgatttggaagaaacagaacctgtggttattccaagagattctttgcttaggagagcagcagccgaaagacctaaatacacatttgatttctcagaagaagaggatgatgatgctgatgatgatgatgatgacaataatgatttagaggaattgaaagttaaagcatctcccataacaaatgatggggaagatgaatttgttccttcagatgggttagataaagatgaatatacattttcaccaggcaaatcaaaagccactccagaaaaatctttgcatgacaaaaaaagtcaggattttggaaatctcttctcatttccttcatattctcagaagtcagaagatggaaaaccgtcttcagatacagtccctaagcccaagagagccccaaaacagaagaaagtagtagaggctgtaaactctgactcggattcagaatttggcattccaaagaagactacaacaccaaaaggtaaaggccgaggggcaaagaaaaggaaagcatctggctctgaaaatgaaggcgattataaccctggcaggaaaacatccaaaacaacaagcaagaaaccgaagaagacatcttttgatcaggattcagatgtggacatcttcccctcagacttccctactgagccaccttctctgccacgaaccggtcgggctaggaaagaagtaaaatattttgcagagtctgatgaagaagaagatgatgttgattttgcaatgtttaattaagtgcccaaagagcacaaacatttttcaacaaatatcttgtgttgtccttttgtcttctctgtctcagacttttgtacatctggcttattttaatgtgatgatgtaattgacggttttttattattgtggtaggccttttaacattttgttcttacacatacagttttatgctcttttttactcattgaaatgtcacgtactgtctgattggcttgtagaattgttatagactgccgtgcattagcacagattttaattgtcatggttacaaactacagacctgctttttgaaatgaaatttaaacattaaaaatggaact

SEQ ID NO: 292410 - DNA, 1944 bp, Homo sapiens
gcacttgtagaattttaaactaattattcaataaaattcaacattaatttgatactatacaagactttaatatacagtttgttattttttacaggcagcagaagaggatgaaacacaaaaccagcatgatgatagttcctccgattcaggaactccttcaggcccagattttaattatattttaaatatgtctctgtggtctcttactaaagaaaaagttgaagaactgattaaacagagagatgcaaaagggcgagaggtcaatgatcttaaaagaaaatctccttcagatctttggaaagaggatttagcggcatttgttgaagaactggataaagtggaatctcaagaacgagaagatgttctggctggaatgtctggaaaagcaattaaaggtaaagttggcaaacctaaggtgaagaaactccagttggaagagacaatgccctcaccttatggcagaagaataattcctgaaattacagctatgaaggcagatgccagcaaaaagttgctgaagaagaagaagggtgatcttgatactgcagcagtaaaagtggaatttgatgaagaattcagtggagcaccagtagaaggtgcaggagaagaggcattgactccatcagttcctataaataaaggtcccaaacctaagagggagaagaaggagcctggtaccagagtgagaaaaacacctacatcatctggtaaacctagtgcaaagaaagtgaagaaacggaatccttggtcagatgatgaatccaagtcagaaagtgatttggaagaaacagaacctgtggttattccaagagattctttgcttaggagagcagcagccgaaagacctaaatacacatttgatttctcagaagaagaggatgatgatgctgatgatgatgatgatgacaataatgatttagaggaattgaaagttaaagcatctcccataacaaatgatggggaagatgaatttgttccttcagatgggttagataaagatgaatatacattttcaccaggcaaatcaaaagccactccagaaaaatctttgcatgacaaaaaaagtcaggattttggaaatctcttctcatttccttcatattctcagaagtcagaagatgattcagctaaatttgacagtaatgaagaagattctgcttctgttttttcaccatcatttggtctgaaacagacagataaagttccaagtaaaacggtagctgctaaaaagggaaaaccgtcttcagatacagtccctaagcccaagagagccccaaaacagaagaaagtagtagaggctgtaaactctgactcggattcagaatttggcattccaaagaagactacaacaccaaaaggtaaaggccgaggggcaaagaaaaggaaagcatctggctctgaaaatgaaggcgattataaccctggcaggaaaacatccaaaacaacaagcaagaaaccgaagaagacatcttttgatcaggattcagatgtggacatcttcccctcagacttccctactgagccaccttctctgccacgaaccggtcgggctaggaaagaagtaaaatattttgcagagtctgatgaagaagaagatgatgttgattttgcaatgtttaattaagtgcccaaagagcacaaacatttttcaacaaatatcttgtgttgtccttttgtcttctctgtctcagacttttgtacatctggcttattttaatgtgatgatgtaattgacggttttttattattgtggtaggccttttaacattttgttcttacacatacagttttatgctcttttttactcattgaaatgtcacgtactgtctgattggcttgtagaattgttatagactgccgtgcattagcacagattttaattgtcatggttacaaactacagacctgctttttgaaatgaaatttaaacattaaaaatggaact

SEQ ID NO: 292411 - DNA, 5402 bp, Homo sapiens
gtgcggtgttatgccggacaagagggaggtgaccgtggcggcggcggcggcggctctgtttattgtccctctcggtgtgtgtgtgtgaggaaatcggggctgcagcgaggctaaggcggcctttgaagcagcggcggcgaccgggacgactactctggcgactcgagtggctggccttcgcggagtgtgagaaggacaaggcacctctgcgtcctcgccacgtccgagcgcctcgggctccccggccgccctcgcggctcgcacgcccgggcttcagcccggcctgcagcggcgcccgcgggcgggcgagaaggcaacgccgccgctcggccgccgccggtcgctccctgctttctcctcagccgccgcgctaggcccgggcgacgcggacgccgcgcctcgagtttgagggcagccggcggcgcggcctcctcagcgggctcggctggacgtccgctccggatcttcgcgatggggcgcgggggtcggcgcggctaggagtgcggcgagtggagcggtgggtgcggagcggcggggcccagcggcccgcagggaggcgggagcggcggctgcggcctcagggcctgtgagctggaggcactcgccatggccaagtcgggtggctgcggcgcgggagccggcgtgggcggcggcaacggggcactgacctgggtgaacaatgctgcaaaaaaagaagagtcagaaactgccaacaaaaatgattcttcaaagaagttgtctgttgagagagtgtatcagaagaagacacaacttgaacacattcttcttcgtcctgatacatatattgggtcagtggagccattgacgcagttcatgtgggtgtatgatgaagatgtaggaatgaattgcagggaggttacctttgtgccaggtttatacaagatctttgatgaaattttggttaatgctgctgacaataaacagagggataagaacatgacttgtattaaagtttctattgatcctgaatctaacattataagcatttggaataatgggaaaggcattccagtagtagaacacaaggtagagaaagtttatgttcctgctttaatttttggacagcttttaacatccagtaactatgatgatgatgagaaaaaagttacaggtggtcgtaatggttatggtgcaaaactttgtaatattttcagtacaaagtttacagtagaaacagcttgcaaagaatacaaacacagttttaagcagacatggatgaataatatgatgaagacttctgaagccaaaattaaacattttgatggtgaagattacacatgcataacattccaaccagatctgtccaaatttaagatggaaaaacttgacaaggatattgtggccctcatgactagaagggcatatgatttggctggttcgtgtagaggggtcaaggtcatgtttaatggaaagaaattgcctgtaaatggatttcgcagttatgtagatctttatgtgaaagacaaattggatgaaactggggtggccctgaaagttattcatgagcttgcaaatgaaagatgggatgtttgtctcacattgagtgaaaaaggattccagcaaatcagctttgtaaatagtattgcaactacaaaaggtggacggcacgtggattatgtggtagatcaagttgttggtaaactgattgaagtagttaagaaaaagaacaaagctggtgtatcagtgaaaccatttcaagtaaaaaaccatatatgggtttttattaattgccttattgaaaatccaacttttgattctcagactaaggaaaacatgactctgcagcccaaaagttttgggtctaaatgccagctgtcagaaaaattttttaaagcagcctctaattgtggcattgtagaaagtatcctgaactgggtgaaatttaaggctcagactcagctgaataagaagtgttcatcagtaaaatacagtaaaatcaaaggtattcccaaactggatgatgctaatgatgctggtggtaaacattccctggagtgtacactgatattaacagagggagactctgccaaatcactggctgtgtctggattaggtgtgattggacgagacagatacggagtttttccactcaggggcaaaattcttaatgtacgggaagcttctcataaacagatcatggaaaatgctgaaataaataatattattaaaatagttggtctacaatataagaaaagttacgatgatgcagaatctctgaaaaccttacgctatggaaagattatgattatgaccgatcaggatcaagatggttctcacataaaaggcctgcttattaatttcatccatcacaattggccatcacttttgaagcatggttttcttgaagagttcattactcctattgtaaaggcaagcaaaaataagcaggaactttccttctacagtattcctgaatttgacgaatggaaaaaacatatagaaaaccagaaagcctggaaaataaagtactataaaggattgggtactagtacagctaaagaagcaaaggaatattttgctgatatggaaaggcatcgcatcttgtttagatatgctggtcctgaagatgatgctgccattaccttggcatttagtaagaagaagattgatgacagaaaagaatggttaacaaattttatggaagaccggagacagcgtaggctacatggcttaccagagcaatttttatatggtactgcaacaaagcatttgacttataatgatttcatcaacaaggaattgattctcttctcaaactcagacaatgaaagatctataccatctcttgttgatggctttaaacctggccagcggaaagttttatttacctgtttcaagaggaatgataaacgtgaagtaaaagttgcccagttggctggctctgttgctgagatgtcggcttatcatcatggagaacaagcattgatgatgactattgtgaatttggctcagaactttgtgggaagtaacaacattaacttgcttcagcctattggtcagtttggaactcggcttcatggtggcaaagatgctgcaagccctcgttatattttcacaatgttaagcactttagcaaggctactttttcctgctgtggatgacaacctccttaagttcctttatgatgataatcaacgtgtagagcctgagtggtatattcctataattcccatggttttaataaatggtgctgagggcattggtactggatgggcttgtaaactacccaactatgatgctagggaaattgtgaacaatgtcagacgaatgctagatggcctggatcctcatcccatgcttccaaactacaaaaactttaaaggcacgattcaagaacttggtcaaaaccagtatgcagtcagtggtgaaatatttgtagtggacagaaacacagtagaaattacagagcttccagttagaacttggacacaggtatataaagaacaggttttagaacctatgctaaatggaacagataaaacaccagcattaatttctgattataaagaatatcatactgacacaactgtgaaatttgtggtgaaaatgactgaagagaaactagcacaagcagaagctgctggactgcataaagtttttaaacttcaaactactcttacttgtaattccatggtactttttgatcatatgggatgtctgaagaaatatgaaactgtgcaagacattctgaaagaattctttgatttacgattaagttattacggtttacgtaaggagtggcttgtgggaatgttgggagcagaatctacaaagcttaacaatcaagcccgtttcattttagagaagatacaagggaaaattactatagagaataggtcaaagaaagatttgattcaaatgttagtccagagaggttatgaatctgacccagtgaaagcctggaaagaagcacaagaaaaggcagcagaagaggatgaaacacaaaaccagcatgatgatagttcctccgattcaggaactccttcaggcccagattttaattatattttaaatatgtctctgtggtctcttactaaagaaaaagttgaagaactgattaaacagagagatgcaaaagggcgagaggtcaatgatcttaaaagaaaatctccttcagatctttggaaagaggatttagcggcatttgttgaagaactggataaagtggaatctcaagaacgagaagatgttctggctggaatgtctggaaaagcaattaaaggtaaagttggcaaacctaaggtgaagaaactccagttggaagagacaatgccctcaccttatggcagaagaataattcctgaaattacagctatgaaggcagatgccagcaaaaagttgctgaagaagaagaagggtgatcttgatactgcagcagtaaaagtggaatttgatgaagaattcagtggagcaccagtagaaggtgcaggagaagaggcattgactccatcagttcctataaataaaggtcccaaacctaagagggagaagaaggagcctggtaccagagtgagaaaaacacctacatcatctggtaaacctagtgcaaagaaagtgaagaaacggaatccttggtcagatgatgaatccaagtcagaaagtgatttggaagaaacagaacctgtggttattccaagagattctttgcttaggagagcagcagccgaaagacctaaatacacatttgatttctcagaagaagaggatgatgatgctgatgatgatgatgatgacaataatgatttagaggaattgaaagttaaagcatctcccataacaaatgatggggaagatgaatttgttccttcagatgggttagataaagatgaatatacattttcaccaggcaaatcaaaagccactccagaaaaatctttgcatgacaaaaaaagtcaggattttggaaatctcttctcatttccttcatattctcagaagtcagaagatgattcagctaaatttgacagtaatgaagaagattctgcttctgttttttcaccatcatttggtctgaaacagacagataaagttccaagtaaaacggtagctgctaaaaagggaaaaccgtcttcagatacagtccctaagcccaagagagccccaaaacagaagaaagtagtagaggctgtaaactctgactcggattcagaatttggcattccaaagaagactacaacaccaaaaggtaaaggccgaggggcaaagaaaaggaaagcatctggctctgaaaatgaaggcgattataaccctggcaggaaaacatccaaaacaacaagcaagcgtcttcagatacagtccctaagcccaagagagccccaaaacagaagaaagtagtagaggctgtaaactctgactcggattcagaattgggcatcccaaag

SEQ ID NO: 292412 - DNA, 5399 bp, Homo sapiens
gtgcggtgttatgccggacaagagggaggtgaccgtggcggcggcggcggcggctctgtttattgtccctctcggtgtgtgtgtgtgaggaaatcggggctgcagcgaggctaaggcggcctttgaagcagcggcggcgaccgggacgactactctggcgactcgagtggctggccttcgcggagtgtgagaaggacaaggcacctctgcgtcctcgccacgtccgagcgcctcgggctccccggccgccctcgcggctcgcacgcccgggcttcagcccggcctgcagcggcgcccgcgggcgggcgagaaggcaacgccgccgctcggccgccgccggtcgctccctgctttctcctcagccgccgcgctaggcccgggcgacgcggacgccgcgcctcgagtttgagggcagccggcggcgcggcctcctcagcgggctcggctggacgtccgctccggatcttcgcgatggggcgcgggggtcggcgcggctaggagtgcggcgagtggagcggtgggtgcggagcggcggggcccagcggcccgcagggaggcgggagcggcggctgcggcctcagggcctgtgagctggaggcactcgccatggccaagtcgggtggctgcggcgcgggagccggcgtgggcggcggcaacggggcactgacctgggtgaacaatgctgcaaaaaaagaagagtcagaaactgccaacaaaaatgattcttcaaagaagttgtctgttgagagagtgtatcagaagaagacacaacttgaacacattcttcttcgtcctgatacatatattgggtcagtggagccattgacgcagttcatgtgggtgtatgatgaagatgtaggaatgaattgcagggaggttacctttgtgccaggtttatacaagatctttgatgaaattttggttaatgctgctgacaataaacagagggataagaacatgacttgtattaaagtttctattgatcctgaatctaacattataagcatttggaataatgggaaaggcattccagtagtagaacacaaggtagagaaagtttatgttcctgctttaatttttggacagcttttaacatccagtaactatgatgatgatgagaaaaaagttacaggtggtcgtaatggttatggtgcaaaactttgtaatattttcagtacaaagtttacagtagaaacagcttgcaaagaatacaaacacagttttaagcagacatggatgaataatatgatgaagacttctgaagccaaaattaaacattttgatggtgaagattacacatgcataacattccaaccagatctgtccaaatttaagatggaaaaacttgacaaggatattgtggccctcatgactagaagggcatatgatttggctggttcgtgtagaggggtcaaggtcatgtttaatggaaagaaattgcctgtaaatggatttcgcagttatgtagatctttatgtgaaagacaaattggatgaaactggggtggccctgaaagttattcatgagcttgcaaatgaaagatgggatgtttgtctcacattgagtgaaaaaggattccagcaaatcagctttgtaaatagtattgcaactacaaaaggtggacggcacgtggattatgtggtagatcaagttgttggtaaactgattgaagtagttaagaaaaagaacaaagctggtgtatcagtgaaaccatttcaagtaaaaaaccatatatgggtttttattaattgccttattgaaaatccaacttttgattctcagactaaggaaaacatgactctgcagcccaaaagttttgggtctaaatgccagctgtcagaaaaattttttaaagcagcctctaattgtggcattgtagaaagtatcctgaactgggtgaaatttaaggctcagactcagctgaataagaagtgttcatcagtaaaatacagtaaaatcaaaggtattcccaaactggatgatgctaatgatgctggtggtaaacattccctggagtgtacactgatattaacagagggagactctgccaaatcactggctgtgtctggattaggtgtgattggacgagacagatacggagtttttccactcaggggcaaaattcttaatgtacgggaagcttctcataaacagatcatggaaaatgctgaaataaataatattattaaaatagttggtctacaatataagaaaagttacgatgatgcagaatctctgaaaaccttacgctatggaaagattatgattatgaccgatcaggatcaagatggttctcacataaaaggcctgcttattaatttcatccatcacaattggccatcacttttgaagcatggttttcttgaagagttcattactcctattgtaaaggcaagcaaaaataagcaggaactttccttctacagtattcctgaatttgacgaatggaaaaaacatatagaaaaccagaaagcctggaaaataaagtactataaaggattgggtactagtacagctaaagaagcaaaggaatattttgctgatatggaaaggcatcgcatcttgtttagatatgctggtcctgaagatgatgctgccattaccttggcatttagtaagaagaagattgatgacagaaaagaatggttaacaaattttatggaagaccggagacagcgtaggctacatggcttaccagagcaatttttatatggtactgcaacaaagcatttgacttataatgatttcatcaacaaggaattgattctcttctcaaactcagacaatgaaagatctataccatctcttgttgatggctttaaacctggccagcggaaagttttatttacctgtttcaagaggaatgataaacgtgaagtaaaagttgcccagttggctggctctgttgctgagatgtcggcttatcatcatggagaacaagcattgatgatgactattgtgaatttggctcagaactttgtgggaagtaacaacattaacttgcttcagcctattggtcagtttggaactcggcttcatggtggcaaagatgctgcaagccctcgttatattttcacaatgttaagcactttagcaaggctactttttcctgctgtggatgacaacctccttaagttcctttatgatgataatcaacgtgtagagcctgagtggtatattcctataattcccatggttttaataaatggtgctgagggcattggtactggatgggcttgtaaactacccaactatgatgctagggaaattgtgaacaatgtcagacgaatgctagatggcctggatcctcatcccatgcttccaaactacaaaaactttaaaggcacgattcaagaacttggtcaaaaccagtatgcagtcagtggtgaaatatttgtagtggacagaaacacagtagaaattacagagcttccagttagaacttggacacaggtatataaagaacaggttttagaacctatgctaaatggaacagataaaacaccagcattaatttctgattataaagaatatcatactgacacaactgtgaaatttgtggtgaaaatgactgaagagaaactagcacaagcagaagctgctggactgcataaagtttttaaacttcaaactactcttacttgtaattccatggtactttttgatcatatgggatgtctgaagaaatatgaaactgtgcaagacattctgaaagaattctttgatttacgattaagttattacggtttacgtaaggagtggcttgtgggaatgttgggagcagaatctacaaagcttaacaatcaagcccgtttcattttagagaagatacaagggaaaattactatagagaataggtcaaagaaagatttgattcaaatgttagtccagagaggttatgaatctgacccagtgaaagcctggaaagaagcacaagaaaaggcagcagaagaggatgaaacacaaaaccagcatgatgatagttcctccgattcaggaactccttcaggcccagattttaattatattttaaatatgtctctgtggtctcttactaaagaaaaagttgaagaactgattaaacagagagatgcaaaagggcgagaggtcaatgatcttaaaagaaaatctccttcagatctttggaaagaggatttagcggcatttgttgaagaactggataaagtggaatctcaagaacgagaagatgttctggctggaatgtctggaaaagcaattaaaggtaaagttggcaaacctaaggtgaagaaactccagttggaagagacaatgccctcaccttatggcagaagaataattcctgaaattacagctatgaaggcagatgccagcaaaaagttgctgaagaagaagaagggtgatcttgatactgcagcagtaaaagtggaatttgatgaagaattcagtggagcaccagtagaaggtgcaggagaagaggcattgactccatcagttcctataaataaaggtcccaaacctaagagggagaagaaggagcctggtaccagagtgagaaaaacacctacatcatctggtaaacctagtgcaaagaaagtgaagaaacggaatccttggtcagatgatgaatccaagtcagaaagtgatttggaagaaacagaacctgtggttattccaagagattctttgcttaggagagcagcagccgaaagacctaaatacacatttgatttctcagaagaagaggatgatgatgctgatgatgatgatgatgacaataatgatttagaggaattgaaagttaaagcatctcccataacaaatgatggggaagatgaatttgttccttcagatgggttagataaagatgaatatacattttcaccaggcaaatcaaaagccactccagaaaaatctttgcatgacaaaaaaagtcaggattttggaaatctcttctcatttccttcatattctcagaagtcagaagatgattcagctaaatttgacagtaatgaagaagattctgcttctgttttttcaccatcatttggtctgaaacagacagataaagttccaagtaaaacggtagctgctaaaaagggaaaaccgtcttcagatacagtccctaagcccaagagagccccaaaacagaagaaagtagtagaggctgtaaactctgactcggattcagaatttggcattccaaagaagactacaacaccaaaaggtaaaggccgaggggcaaagaaaaggaaagcatctggctctgaaaatgaaggcgattataaccctggcaggaaaacatccaaaacaacaagcaagaaggtaaccgggaacatcattgcatattagtgcatggctttttaaaaaaagatctgtaagtgacttagtttgcttatgactatagtcctggaacagct

SEQ ID NO: 292413 - DNA, 1410 bp, Homo sapiens
  misc_feature (34)..(34): n is a, c, g, or t
  misc_feature (68)..(68): n is a, c, g, or t
tgccagtaaacgttactgatacctgccagttgtnccgctatctctgtcaaaatggacgctgcattccnactcctgggagttaccggtgtgagtgcaacaaagggttccagctggacctccgtggggagtgtattgatgttgtaccagagtgagaaaaacacctacatcatctggtaaacctagtgcaaagaaagtgaagaaacggaatccttggtcagatgatgaatccaagtcagaaagtgatttggaagaaacagaacctgtggttattccaagagattctttgcttaggagagcagcagccgaaagacctaaatacacatttgatttctcagaagaagaggatgatgatgctgatgatgatgatgatgacaataatgatttagaggaattgaaagttaaagcatctcccataacaaatgatggggaagatgaatttgttccttcagatgggttagataaagatgaatatacattttcaccaggcaaatcaaaagccactccagaaaaatctttgcatgacaaaaaaagtcaggattttggaaatctcttctcatttccttcatattctcagaagtcagaagatgattcagctaaatttgacagtaatgaagaagattctgcttctgttttttcaccatcatttggtctgaaacagacagataaagttccaagtaaaacggtagctgctaaaaagggaaaaccgtcttcagatacagtccctaagcccaagagagccccaaaacagaagaaagtagtagaggctgtaaactctgactcggattcagaatttggcattccaaagaagactacaacaccaaaaggtaaaggccgaggggcaaagaaaaggaaagcatctggctctgaaaatgaaggcgattataaccctggcaggaaaacatccaaaacaacaagcaagaaaccgaagaagacatcttttgatcaggattcagatgtggacatcttcccctcagacttccctactgagccaccttctctgccacgaaccggtcgggctaggaaagaagtaaaatattttgcagagtctgatgaagaagaagatgatgttgattttgcaatgtttaattaagtgcccaaagagcacaaacatttttcaacaaatatcttgtgttgtccttttgtcttctctgtctcagacttttgtacatctggcttattttaatgtgatgatgtaattgacggttttttattattgtggtaggccttttaacattttgttcttacacatacagttttatgctcttttttactcattgaaatgtcacgtactgtctgattggcttgtagaattgttatagactgccgtgcattagcacagattttaattgtcatggttacaaactacagacctgctttttgaaatgaaatttaaacattaaaaatggaact

SEQ ID NO: 292414 - DNA, 1476 bp, Homo sapiens
ggggtgatctgtgacgtacgtgcagcaggttaaaattgtggcaatgtgtgtcatgtaacaagttcacgtggagacaccacgtgtagaagtgtgctaggagcaatgaggtacttgacctccattcaagttcgctactagaagtaaaggctcccagatcctgaagagggatcaagaaggagctcctggatagctacgagtatgatgaaatcatcatccatacagtcagtctggtaagacctacgtgtcatcagaatatgtgacacgcaaacggaatccttggtcagatgatgaatccaagtcagaaagtgatttggaagaaacagaacctgtggttattccaagagattctttgcttaggagagcagcagccgaaagacctaaatacacatttgatttctcagaagaagaggatgatgatgctgatgatgatgatgatgacaataatgatttagaggaattgaaagttaaagcatctcccataacaaatgatggggaagatgaatttgttccttcagatgggttagataaagatgaatatacattttcaccaggcaaatcaaaagccactccagaaaaatctttgcatgacaaaaaaagtcaggattttggaaatctcttctcatttccttcatattctcagaagtcagaagatgattcagctaaatttgacagtaatgaagaagattctgcttctgttttttcaccatcatttggtctgaaacagacagataaagttccaagtaaaacggtagctgctaaaaagggaaaaccgtcttcagatacagtccctaagcccaagagagccccaaaacagaagaaagtagtagaggctgtaaactctgactcggattcagaatttggcattccaaagaagactacaacaccaaaaggtaaaggccgaggggcaaagaaaaggaaagcatctggctctgaaaatgaaggcgattataaccctggcaggaaaacatccaaaacaacaagcaagaaaccgaagaagacatcttttgatcaggattcagatgtggacatcttcccctcagacttccctactgagccaccttctctgccacgaaccggtcgggctaggaaagaagtaaaatattttgcagagtctgatgaagaagaagatgatgttgattttgcaatgtttaattaagtgcccaaagagcacaaacatttttcaacaaatatcttgtgttgtccttttgtcttctctgtctcagacttttgtacatctggcttattttaatgtgatgatgtaattgacggttttttattattgtggtaggccttttaacattttgttcttacacatacagttttatgctcttttttactcattgaaatgtcacgtactgtctgattggcttgtagaattgttatagactgccgtgcattagcacagattttaattgtcatggttacaaactacagacctgctttttgaaatgaaatttaaacattaaaaatggaact

SEQ ID NO: 292415 - DNA, 5596 bp, Homo sapiens
gtgcggtgttatgccggacaagagggaggtgaccgtggcggcggcggcggcggctctgtttattgtccctctcggtgtgtgtgtgtgaggaaatcggggctgcagcgaggctaaggcggcctttgaagcagcggcggcgaccgggacgactactctggcgactcgagtggctggccttcgcggagtgtgagaaggacaaggcacctctgcgtcctcgccacgtccgagcgcctcgggctccccggccgccctcgcggctcgcacgcccgggcttcagcccggcctgcagcggcgcccgcgggcgggcgagaaggcaacgccgccgctcggccgccgccggtcgctccctgctttctcctcagccgccgcgctaggcccgggcgacgcggacgccgcgcctcgagtttgagggcagccggcggcgcggcctcctcagcgggctcggctggacgtccgctccggatcttcgcgatggggcgcgggggtcggcgcggctaggagtgcggcgagtggagcggtgggtgcggagcggcggggcccagcggcccgcagggaggcgggagcggcggctgcggcctcagggcctgtgagctggaggcactcgccatggccaagtcgggtggctgcggcgcgggagccggcgtgggcggcggcaacggggcactgacctgggtgaacaatgctgcaaaaaaagaagagtcagaaactgccaacaaaaatgattcttcaaagaagttgtctgttgagagagtgtatcagaagaagacacaacttgaacacattcttcttcgtcctgatacatatattgggtcagtggagccattgacgcagttcatgtgggtgtatgatgaagatgtaggaatgaattgcagggaggttacctttgtgccaggtttatacaagatctttgatgaaattttggttaatgctgctgacaataaacagagggataagaacatgacttgtattaaagtttctattgatcctgaatctaacattataagcatttggaataatgggaaaggcattccagtagtagaacacaaggtagagaaagtttatgttcctgctttaatttttggacagcttttaacatccagtaactatgatgatgatgagaaaaaagttacaggtggtcgtaatggttatggtgcaaaactttgtaatattttcagtacaaagtttacagtagaaacagcttgcaaagaatacaaacacagttttaagcagacatggatgaataatatgatgaagacttctgaagccaaaattaaacattttgatggtgaagattacacatgcataacattccaaccagatctgtccaaatttaagatggaaaaacttgacaaggatattgtggccctcatgactagaagggcatatgatttggctggttcgtgtagaggggtcaaggtcatgtttaatggaaagaaattgcctgtaaatggatttcgcagttatgtagatctttatgtgaaagacaaattggatgaaactggggtggccctgaaagttattcatgagcttgcaaatgaaagatgggatgtttgtctcacattgagtgaaaaaggattccagcaaatcagctttgtaaatagtattgcaactacaaaaggtggacggcacgtggattatgtggtagatcaagttgttggtaaactgattgaagtagttaagaaaaagaacaaagctggtgtatcagtgaaaccatttcaagtaaaaaaccatatatgggtttttattaattgccttattgaaaatccaacttttgattctcagactaaggaaaacatgactctgcagcccaaaagttttgggtctaaatgccagctgtcagaaaaattttttaaagcagcctctaattgtggcattgtagaaagtatcctgaactgggtgaaatttaaggctcagactcagctgaataagaagtgttcatcagtaaaatacagtaaaatcaaaggtattcccaaactggatgatgctaatgatgctggtggtaaacattccctggagtgtacactgatattaacagagggagactctgccaaatcactggctgtgtctggattaggtgtgattggacgagacagatacggagtttttccactcaggggcaaaattcttaatgtacgggaagcttctcataaacagatcatggaaaatgctgaaataaataatattattaaaatagttggtctacaatataagaaaagttacgatgatgcagaatctctgaaaaccttacgctatggaaagattatgattatgaccgatcaggatcaagatggttctcacataaaaggcctgcttattaatttcatccatcacaattggccatcacttttgaagcatggttttcttgaagagttcattactcctattgtaaaggcaagcaaaaataagcaggaactttccttctacagtattcctgaatttgacgaatggaaaaaacatatagaaaaccagaaagcctggaaaataaagtactataaaggattgggtactagtacagctaaagaagcaaaggaatattttgctgatatggaaaggcatcgcatcttgtttagatatgctggtcctgaagatgatgctgccattaccttggcatttagtaagaagaagattgatgacagaaaagaatggttaacaaattttatggaagaccggagacagcgtaggctacatggcttaccagagcaatttttatatggtactgcaacaaagcatttgacttataatgatttcatcaacaaggaattgattctcttctcaaactcagacaatgaaagatctataccatctcttgttgatggctttaaacctggccagcggaaagttttatttacctgtttcaagaggaatgataaacgtgaagtaaaagttgcccagttggctggctctgttgctgagatgtcggcttatcatcatggagaacaagcattgatgatgactattgtgaatttggctcagaactttgtgggaagtaacaacattaacttgcttcagcctattggtcagtttggaactcggcttcatggtggcaaagatgctgcaagccctcgttatattttcacaatgttaagcactttagcaaggctactttttcctgctgtggatgacaacctccttaagttcctttatgatgataatcaacgtgtagagcctgagtggtatattcctataattcccatggttttaataaatggtgctgagggcattggtactggatgggcttgtaaactacccaactatgatgctagggaaattgtgaacaatgtcagacgaatgctagatggcctggatcctcatcccatgcttccaaactacaaaaactttaaaggcacgattcaagaacttggtcaaaaccagtatgcagtcagtggtgaaatatttgtagtggacagaaacacagtagaaattacagagcttccagttagaacttggacacaggtatataaagaacaggttttagaacctatgctaaatggaacagataaaacaccagcattaatttctgattataaagaatatcatactgacacaactgtgaaatttgtggtgaaaatgactgaagagaaactagcacaagcagaagctgctggactgcataaagtttttaaacttcaaactactcttacttgtaattccatggtactttttgatcatatgggatgtctgaagaaatatgaaactgtgcaagacattctgaaagaattctttgatttacgattaagttattacggtttacgtaaggagtggcttgtgggaatgttgggagcagaatctacaaagcttaacaatcaagcccgtttcattttagagaagatacaagggaaaattactatagagaataggtcaaagaaagatttgattcaaatgttagtccagagaggttatgaatctgacccagtgaaagcctggaaagaagcacaagaaaaggcagcagaagaggatgaaacacaaaaccagcatgatgatagttcctccgattcaggaactccttcaggcccagattttaattatattttaaatatgtctctgtggtctcttactaaagaaaaagttgaagaactgattaaacagagagatgcaaaagggcgagaggtcaatgatcttaaaagaaaatctccttcagatctttggaaagaggatttagcggcatttgttgaagaactggataaagtggaatctcaagaacgagaagatgttctggctggaatgtctggaaaagcaattaaaggtaaagttggcaaacctaaggtgaagaaactccagttggaagagacaatgccctcaccttatggcagaagaataattcctgaaattacagctatgaaggcagatgccagcaaaaagttgctgaagaagaagaagggtgatcttgatactgcagcagtaaaagtggaatttgatgaagaattcagtggagcaccagtagaaggtgcaggagaagaggcattgactccatcagttcctataaataaaggtcccaaacctaagagggagaagaaggagcctggtaccagagtgagaaaaacacctacatcatctggtaaacctagtgcaaagaaagtgaagaaacggaatccttggtcagatgatgaatccaagtcagaaagtgatttggaagaaacagaacctgtggttattccaagagattctttgcttaggagagcagcagccgaaagacctaaatacacatttgatttctcagaagaagaggatgatgatgctgatgatgatgatgatgacaataatgatttagaggaattgaaagttaaagcatctcccataacaaatgatggggaagatgaatttgttccttcagatgggttagataaagatgaatatacattttcaccaggcaaatcaaaagccactccagaaaaatctttgcatgacaaaaaaagtcaggattttggaaatctcttctcatttccttcatattctcagaagtcagaagatgattcagctaaatttgacagtaatgaagaagattctgcttctgttttttcaccatcatttggtctgaaacagacagataaagttccaagtaaaacggtagctgctaaaaagggtatgtacttatatttgattgagttaagcattggatagagatagttaatgtaaaaggaaatgtaatttaatttgaaactatttgcatttttttatcataaaacaattaagaagtataagtgcttataaggagaacctctcgttttctagccatctgagggcgttaataaaatttctgtaagacttaattttaaagctgttgtaattataaaataatcccgtgcattactatctaaagatagctttctacaaaagctcccttgtggttaggttgtaatggagattaaaattttgtcttgctagtagcttgcttctgttatctatgttgatcatgactcaactccttatgtggagggattggtcagctcagttgaggtcctctttttctatgtgagtcatgcagcttctctctttttcacagccttagattggccacaaaacactttgagttgattaatgaatctcttactagtaccaagatatatgtaccgtggtctttttgaaagaggtcagtatt

SEQ ID NO: 292416 - DNA, 4940 bp, Homo sapiens
gtgcggtgttatgccggacaagagggaggtgaccgtggcggcggcggcggcggctctgtttattgtccctctcggtgtgtgtgtgtgaggaaatcggggctgcagcgaggctaaggcggcctttgaagcagcggcggcgaccgggacgactactctggcgactcgagtggctggccttcgcggagtgtgagaaggacaaggcacctctgcgtcctcgccacgtccgagcgcctcgggctccccggccgccctcgcggctcgcacgcccgggcttcagcccggcctgcagcggcgcccgcgggcgggcgagaaggcaacgccgccgctcggccgccgccggtcgctccctgctttctcctcagccgccgcgctaggcccgggcgacgcggacgccgcgcctcgagtttgagggcagccggcggcgcggcctcctcagcgggctcggctggacgtccgctccggatcttcgcgatggggcgcgggggtcggcgcggctaggagtgcggcgagtggagcggtgggtgcggagcggcggggcccagcggcccgcagggaggcgggagcggcggctgcggcctcagggcctgtgagctggaggcactcgccatggccaagtcgggtggctgcggcgcgggagccggcgtgggcggcggcaacggggcactgacctgggtgaacaatgctgcaaaaaaagaagagtcagaaactgccaacaaaaatgattcttcaaagaagttgtctgttgagagagtgtatcagaagaagacacaacttgaacacattcttcttcgtcctgatacatatattgggtcagtggagccattgacgcagttcatgtgggtgtatgatgaagatgtaggaatgaattgcagggaggttacctttgtgccaggtttatacaagatctttgatgaaattttggttaatgctgctgacaataaacagagggataagaacatgacttgtattaaagtttctattgatcctgaatctaacattataagcatttggaataatgggaaaggcattccagtagtagaacacaaggtagagaaagtttatgttcctgctttaatttttggacagcttttaacatccagtaactatgatgatgatgagaaaaaagttacaggtggtcgtaatggttatggtgcaaaactttgtaatattttcagtacaaagtttacagtagaaacagcttgcaaagaatacaaacacagttttaagcagacatggatgaataatatgatgaagacttctgaagccaaaattaaacattttgatggtgaagattacacatgcataacattccaaccagatctgtccaaatttaagatggaaaaacttgacaaggatattgtggccctcatgactagaagggcatatgatttggctggttcgtgtagaggggtcaaggtcatgtttaatggaaagaaattgcctgtaaatggatttcgcagttatgtagatctttatgtgaaagacaaattggatgaaactggggtggccctgaaagttattcatgagcttgcaaatgaaagatgggatgtttgtctcacattgagtgaaaaaggattccagcaaatcagctttgtaaatagtattgcaactacaaaaggtggacggcacgtggattatgtggtagatcaagttgttggtaaactgattgaagtagttaagaaaaagaacaaagctggtgtatcagtgaaaccatttcaagtaaaaaaccatatatgggtttttattaattgccttattgaaaatccaacttttgattctcagactaaggaaaacatgactctgcagcccaaaagttttgggtctaaatgccagctgtcagaaaaattttttaaagcagcctctaattgtggcattgtagaaagtatcctgaactgggtgaaatttaaggctcagactcagctgaataagaagtgttcatcagtaaaatacagtaaaatcaaaggtattcccaaactggatgatgctaatgatgctggtggtaaacattccctggagtgtacactgatattaacagagggagactctgccaaatcactggctgtgtctggattaggtgtgattggacgagacagatacggagtttttccactcaggggcaaaattcttaatgtacgggaagcttctcataaacagatcatggaaaatgctgaaataaataatattattaaaatagttggtctacaatataagaaaagttacgatgatgcagaatctctgaaaaccttacgctatggaaagattatgattatgaccgatcaggatcaagatggttctcacataaaaggcctgcttattaatttcatccatcacaattggccatcacttttgaagcatggttttcttgaagagttcattactcctattgtaaaggcaagcaaaaataagcaggaactttccttctacagtattcctgaatttgacgaatggaaaaaacatatagaaaaccagaaagcctggaaaataaagtactataaaggattgggtactagtacagctaaagaagcaaaggaatattttgctgatatggaaaggcatcgcatcttgtttagatatgctggtcctgaagatgatgctgccattaccttggcatttagtaagaagaagattgatgacagaaaagaatggttaacaaattttatggaagaccggagacagcgtaggctacatggcttaccagagcaatttttatatggtactgcaacaaagcatttgacttataatgatttcatcaacaaggaattgattctcttctcaaactcagacaatgaaagatctataccatctcttgttgatggctttaaacctggccagcggaaagttttatttacctgtttcaagaggaatgataaacgtgaagtaaaagttgcccagttggctggctctgttgctgagatgtcggcttatcatcatggagaacaagcattgatgatgactattgtgaatttggctcagaactttgtgggaagtaacaacattaacttgcttcagcctattggtcagtttggaactcggcttcatggtggcaaagatgctgcaagccctcgttatattttcacaatgttaagcactttagcaaggctactttttcctgctgtggatgacaacctccttaagttcctttatgatgataatcaacgtgtagagcctgagtggtatattcctataattcccatggttttaataaatggtgctgagggcattggtactggatgggcttgtaaactacccaactatgatgctagggaaattgtgaacaatgtcagacgaatgctagatggcctggatcctcatcccatgcttccaaactacaaaaactttaaaggcacgattcaagaacttggtcaaaaccagtatgcagtcagtggtgaaatatttgtagtggacagaaacacagtagaaattacagagcttccagttagaacttggacacaggtatataaagaacaggttttagaacctatgctaaatggaacagataaaacaccagcattaatttctgattataaagaatatcatactgacacaactgtgaaatttgtggtgaaaatgactgaagagaaactagcacaagcagaagctgctggactgcataaagtttttaaacttcaaactactcttacttgtaattccatggtactttttgatcatatgggatgtctgaagaaatatgaaactgtgcaagacattctgaaagaattctttgatttacgattaagttattacggtttacgtaaggagtggcttgtgggaatgttgggagcagaatctacaaagcttaacaatcaagcccgtttcattttagagaagatacaagggaaaattactatagagaataggtcaaagaaagatttgattcaaatgttagtccagagaggttatgaatctgacccagtgaaagcctggaaagaagcacaagaaaaggcagcagaagaggatgaaacacaaaaccagcatgatgatagttcctccgattcaggaactccttcaggcccagattttaattatattttaaatatgtctctgtggtctcttactaaagaaaaagttgaagaactgattaaacagagagatgcaaaagggcgagaggtcaatgatcttaaaagaaaatctccttcagatctttggaaagaggatttagcggcatttgttgaagaactggataaagtggaatctcaagaacgagaagatgttctggctggaatgtctggaaaagcaattaaaggtaaagttggcaaacctaaggtgaagaaactccagttggaagagacaatgccctcaccttatggcagaagaataattcctgaaattacagctatgaaggcagatgccagcaaaaagttgctgaagaagaagaagggtgatcttgatactgcagcagtaaaagtggaatttgatgaagaattcagtggagcaccagtagaaggtgcaggagaagaggcattgactccatcagttcctataaataaaggtcccaaacctaagagggagaagaaggagcctggtaccagagtgagaaaaacacctacatcatctggtaaacctagtgcaaagaaagtgaagaaacggaatccttggtcagatgatgaatccaagtcagaaagtgatttggaagaaacagaacctgtggttattccaagagattctttgcttaggagagcagcagccgaaagacctaaatacacatttgatttctcagaagaagaggatgatgatgctgatgggacaatcttgctcccatcagaaatgattccctctgatgaagaggaggaggacgacgaagaagaggaggaggaagaagaacctaggctcaccattaaccaaagggaagatgaagatggcatggctaatgaagatgagttagacaacacctacactgggtcaggggatgaggacgccctatctgatgggacgaagatgcg

SEQ ID NO: 292417 - DNA, 847 bp, Homo sapiens
  misc_feature (48)..(48): n is a, c, g, or t
tgtgagatgtggctttcacctccccccatgattgtgaggccttcccanccacgtattctgcttctgttttttcaccatcatttggtctgaaacagacagataaagttccaagtaaaacggtagctgctaaaaagggaaaaccgtcttcagatacagtccctaagcccaagagagccccaaaacagaagaaagtagtagaggctgtaaactctgactcggattcagaatttggcattccaaagaagactacaacaccaaaaggtaaaggccgaggggcaaagaaaaggaaagcatctggctctgaaaatgaaggcgattataaccctggcaggaaaacatccaaaacaacaagcaagaaaccgaagaagacatcttttgatcaggattcagatgtggacatcttcccctcagacttccctactgagccaccttctctgccacgaaccggtcgggctaggaaagaagtaaaatattttgcagagtctgatgaagaagaagatgatgttgattttgcaatgtttaattaagtgcccaaagagcacaaacatttttcaacaaatatcttgtgttgtccttttgtcttctctgtctcagacttttgtacatctggcttattttaatgtgatgatgtaattgacggttttttattattgtggtaggccttttaacattttgttcttacacatacagttttatgctcttttttactcattgaaatgtcacgtactgtctgattggcttgtagaattgttatagactgccgtgcattagcacagattttaattgtcatggttacaaactacagacctgctttttgaaatgaaatttaaacattaaaaatggaact

SEQ ID NO: 292418 - DNA, 3962 bp, Homo sapiens
gtgcggtgttatgccggacaagagggaggtgaccgtggcggcggcggcggcggctctgtttattgtccctctcggtgtgtgtgtgtgaggaaatcggggctgcagcgaggctaaggcggcctttgaagcagcggcggcgaccgggacgactactctggcgactcgagtggctggccttcgcggagtgtgagaaggacaaggcacctctgcgtcctcgccacgtccgagcgcctcgggctccccggccgccctcgcggctcgcacgcccgggcttcagcccggcctgcagcggcgcccgcgggcgggcgagaaggcaacgccgccgctcggccgccgccggtcgctccctgctttctcctcagccgccgcgctaggcccgggcgacgcggacgccgcgcctcgagtttgagggcagccggcggcgcggcctcctcagcgggctcggctggacgtccgctccggatcttcgcgatggggcgcgggggtcggcgcggctaggagtgcggcgagtggagcggtgggtgcggagcggcggggcccagcggcccgcagggaggcgggagcggcggctgcggcctcagggcctgtgagctggaggcactcgccatggccaagtcgggtggctgcggcgcgggagccggcgtgggcggcggcaacggggcactgacctgggtgaacaatgctgcaaaaaaagaagagtcagaaactgccaacaaaaatgattcttcaaagaagttgtctgttgagagagtgtatcagaagaagacacaacttgaacacattcttcttcgtcctgatacatatattgggtcagtggagccattgacgcagttcatgtgggtgtatgatgaagatgtaggaatgaattgcagggaggttacctttgtgccaggtttatacaagatctttgatgaaattttggttaatgctgctgacaataaacagagggataagaacatgacttgtattaaagtttctattgatcctgaatctaacattataagcatttggaataatgggaaaggcattccagtagtagaacacaaggtagagaaagtttatgttcctgctttaatttttggacagcttttaacatccagtaactatgatgatgatgagaaaaaagttacaggtggtcgtaatggttatggtgcaaaactttgtaatattttcagtacaaagtttacagtagaaacagcttgcaaagaatacaaacacagttttaagcagacatggatgaataatatgatgaagacttctgaagccaaaattaaacattttgatggtgaagattacacatgcataacattccaaccagatctgtccaaatttaagatggaaaaacttgacaaggatattgtggccctcatgactagaagggcatatgatttggctggttcgtgtagaggggtcaaggtcatgtttaatggaaagaaattgcctgtaaatggatttcgcagttatgtagatctttatgtgaaagacaaattggatgaaactggggtggccctgaaagttattcatgagcttgcaaatgaaagatgggatgtttgtctcacattgagtgaaaaaggattccagcaaatcagctttgtaaatagtattgcaactacaaaaggtggacggcacgtggattatgtggtagatcaagttgttggtaaactgattgaagtagttaagaaaaagaacaaagctggtgtatcagtgaaaccatttcaagtaaaaaaccatatatgggtttttattaattgccttattgaaaatccaacttttgattctcagactaaggaaaacatgactctgcagcccaaaagttttgggtctaaatgccagctgtcagaaaaattttttaaagcagcctctaattgtggcattgtagaaagtatcctgaactgggtgaaatttaaggctcagactcagctgaataagaagtgttcatcagtaaaatacagtaaaatcaaaggtattcccaaactggatgatgctaatgatgctggtggtaaacattccctggagtgtacactgatattaacagagggagactctgccaaatcactggctgtgtctggattaggtgtgattggacgagacagatacggagtttttccactcaggggcaaaattcttaatgtacgggaagcttctcataaacagatcatggaaaatgctgaaataaataatattattaaaatagttggtctacaatataagaaaagttacgatgatgcagaatctctgaaaaccttacgctatggaaagattatgattatgaccgatcaggatcaagatggttctcacataaaaggcctgcttattaatttcatccatcacaattggccatcacttttgaagcatggttttcttgaagagttcattactcctattgtaaaggcaagcaaaaataagcaggaactttccttctacagtattcctgaatttgacgaatggaaaaaacatatagaaaaccagaaagcctggaaaataaagtactataaaggattgggtactagtacagctaaagaagcaaaggaatattttgctgatatggaaaggcatcgcatcttgtttagatatgctggtcctgaagatgatgctgccattaccttggcatttagtaagaagaagattgatgacagaaaagaatggttaacaaattttatggaagaccggagacagcgtaggctacatggcttaccagagcaatttttatatggtactgcaacaaagcatttgacttataatgatttcatcaacaaggaattgattctcttctcaaactcagacaatgaaagatctataccatctcttgttgatggctttaaacctggccagcggaaagttttatttacctgtttcaagaggaatgataaacgtgaagtaaaagttgcccagttggctggctctgttgctgagatgtcggcttatcatcatggagaacaagcattgatgatgactattgtgaatttggctcagaactttgtgggaagtaacaacattaacttgcttcagcctattggtcagtttggaactcggcttcatggtggcaaagatgctgcaagccctcgttatattttcacaatgttaagcactttagcaaggctactttttcctgctgtggatgacaacctccttaagttcctttatgatgataatcaacgtgtagagcctgagtggtatattcctataattcccatggttttaataaatggtgctgagggcattggtactggatgggcttgtaaactacccaactatgatgctagggaaattgtgaacaatgtcagacgaatgctagatggcctggatcctcatcccatgcttccaaactacaaaaactttaaaggcacgattcaagaacttggtcaaaaccagtatgcagtcagtggtgaaatatttgtagtggacagaaacacagtagaaattacagagcttccagttagaacttggacacaggtatataaagaacaggttttagaacctatgctaaatggaacagataaaacaccagcattaatttctgattataaagaatatcatactgacacaactgtgaaatttgtggtgaaaatgactgaagagaaactagcacaagcagaagctgctggactgcataaagtttttaaacttcaaactactcttacttgtaattccatggtactttttgatcatatgggatgtctgaagaaatatgaaactgtgcaagacattctgaaagaattctttgatttacgattaagttattacggtttacgtaaggagtggcttgtgggaatgttgggagcagaatctacaaagcttaacaatcaagcccgtttcattttagagaagatacaagggaaaattactatagagaataggtcaaagaaagatttgattcaaatgttagtccagagaggttatgaatctgacccagtgaaagcctggaaagaagcacaagaaaaggtaatcatttgcagaaaaag

SEQ ID NO: 292419 - DNA, 3870 bp, Homo sapiens
gtgcggtgttatgccggacaagagggaggtgaccgtggcggcggcggcggcggctctgtttattgtccctctcggtgtgtgtgtgtgaggaaatcggggctgcagcgaggctaaggcggcctttgaagcagcggcggcgaccgggacgactactctggcgactcgagtggctggccttcgcggagtgtgagaaggacaaggcacctctgcgtcctcgccacgtccgagcgcctcgggctccccggccgccctcgcggctcgcacgcccgggcttcagcccggcctgcagcggcgcccgcgggcgggcgagaaggcaacgccgccgctcggccgccgccggtcgctccctgctttctcctcagccgccgcgctaggcccgggcgacgcggacgccgcgcctcgagtttgagggcagccggcggcgcggcctcctcagcgggctcggctggacgtccgctccggatcttcgcgatggggcgcgggggtcggcgcggctaggagtgcggcgagtggagcggtgggtgcggagcggcggggcccagcggcccgcagggaggcgggagcggcggctgcggcctcagggcctgtgagctggaggcactcgccatggccaagtcgggtggctgcggcgcgggagccggcgtgggcggcggcaacggggcactgacctgggtgaacaatgctgcaaaaaaagaagagtcagaaactgccaacaaaaatgattcttcaaagaagttgtctgttgagagagtgtatcagaagaagacacaacttgaacacattcttcttcgtcctgatacatatattgggtcagtggagccattgacgcagttcatgtgggtgtatgatgaagatgtaggaatgaattgcagggaggttacctttgtgccaggtttatacaagatctttgatgaaattttggttaatgctgctgacaataaacagagggataagaacatgacttgtattaaagtttctattgatcctgaatctaacattataagcatttggaataatgggaaaggcattccagtagtagaacacaaggtagagaaagtttatgttcctgctttaatttttggacagcttttaacatccagtaactatgatgatgatgagaaaaaagttacaggtggtcgtaatggttatggtgcaaaactttgtaatattttcagtacaaagtttacagtagaaacagcttgcaaagaatacaaacacagttttaagcagacatggatgaataatatgatgaagacttctgaagccaaaattaaacattttgatggtgaagattacacatgcataacattccaaccagatctgtccaaatttaagatggaaaaacttgacaaggatattgtggccctcatgactagaagggcatatgatttggctggttcgtgtagaggggtcaaggtcatgtttaatggaaagaaattgcctgtaaatggatttcgcagttatgtagatctttatgtgaaagacaaattggatgaaactggggtggccctgaaagttattcatgagcttgcaaatgaaagatgggatgtttgtctcacattgagtgaaaaaggattccagcaaatcagctttgtaaatagtattgcaactacaaaaggtggacggcacgtggattatgtggtagatcaagttgttggtaaactgattgaagtagttaagaaaaagaacaaagctggtgtatcagtgaaaccatttcaagtaaaaaaccatatatgggtttttattaattgccttattgaaaatccaacttttgattctcagactaaggaaaacatgactctgcagcccaaaagttttgggtctaaatgccagctgtcagaaaaattttttaaagcagcctctaattgtggcattgtagaaagtatcctgaactgggtgaaatttaaggctcagactcagctgaataagaagtgttcatcagtaaaatacagtaaaatcaaaggtattcccaaactggatgatgctaatgatgctggtggtaaacattccctggagtgtacactgatattaacagagggagactctgccaaatcactggctgtgtctggattaggtgtgattggacgagacagatacggagtttttccactcaggggcaaaattcttaatgtacgggaagcttctcataaacagatcatggaaaatgctgaaataaataatattattaaaatagttggtctacaatataagaaaagttacgatgatgcagaatctctgaaaaccttacgctatggaaagattatgattatgaccgatcaggatcaagatggttctcacataaaaggcctgcttattaatttcatccatcacaattggccatcacttttgaagcatggttttcttgaagagttcattactcctattgtaaaggcaagcaaaaataagcaggaactttccttctacagtattcctgaatttgacgaatggaaaaaacatatagaaaaccagaaagcctggaaaataaagtactataaaggattgggtactagtacagctaaagaagcaaaggaatattttgctgatatggaaaggcatcgcatcttgtttagatatgctggtcctgaagatgatgctgccattaccttggcatttagtaagaagaagattgatgacagaaaagaatggttaacaaattttatggaagaccggagacagcgtaggctacatggcttaccagagcaatttttatatggtactgcaacaaagcatttgacttataatgatttcatcaacaaggaattgattctcttctcaaactcagacaatgaaagatctataccatctcttgttgatggctttaaacctggccagcggaaagttttatttacctgtttcaagaggaatgataaacgtgaagtaaaagttgcccagttggctggctctgttgctgagatgtcggcttatcatcatggagaacaagcattgatgatgactattgtgaatttggctcagaactttgtgggaagtaacaacattaacttgcttcagcctattggtcagtttggaactcggcttcatggtggcaaagatgctgcaagccctcgttatattttcacaatgttaagcactttagcaaggctactttttcctgctgtggatgacaacctccttaagttcctttatgatgataatcaacgtgtagagcctgagtggtatattcctataattcccatggttttaataaatggtgctgagggcattggtactggatgggcttgtaaactacccaactatgatgctagggaaattgtgaacaatgtcagacgaatgctagatggcctggatcctcatcccatgcttccaaactacaaaaactttaaaggcacgattcaagaacttggtcaaaaccagtatgcagtcagtggtgaaatatttgtagtggacagaaacacagtagaaattacagagcttccagttagaacttggacacaggtatataaagaacaggttttagaacctatgctaaatggaacagataaaacaccagcattaatttctgattataaagaatatcatactgacacaactgtgaaatttgtggtgaaaatgactgaagagaaactagcacaagcagaagctgctggactgcataaagtttttaaacttcaaactactcttacttgtaattccatggtactttttgatcatatgggatgtctgaagaaatatgaaactgtgcaagacattctgaaagaattctttgatttacgattaagttattacggtttacgtaaggagtggcttgtgggaatgttgggagcagaatctacaaagcttaacaatcaagcccgtttcattttagagaagatacaagggaaaattactataggtaagatacaacctttaaaa

SEQ ID NO: 292420 - DNA, 4070 bp, Homo sapiens
gtgcggtgttatgccggacaagagggaggtgaccgtggcggcggcggcggcggctctgtttattgtccctctcggtgtgtgtgtgtgaggaaatcggggctgcagcgaggctaaggcggcctttgaagcagcggcggcgaccgggacgactactctggcgactcgagtggctggccttcgcggagtgtgagaaggacaaggcacctctgcgtcctcgccacgtccgagcgcctcgggctccccggccgccctcgcggctcgcacgcccgggcttcagcccggcctgcagcggcgcccgcgggcgggcgagaaggcaacgccgccgctcggccgccgccggtcgctccctgctttctcctcagccgccgcgctaggcccgggcgacgcggacgccgcgcctcgagtttgagggcagccggcggcgcggcctcctcagcgggctcggctggacgtccgctccggatcttcgcgatggggcgcgggggtcggcgcggctaggagtgcggcgagtggagcggtgggtgcggagcggcggggcccagcggcccgcagggaggcgggagcggcggctgcggcctcagggcctgtgagctggaggcactcgccatggccaagtcgggtggctgcggcgcgggagccggcgtgggcggcggcaacggggcactgacctgggtgaacaatgctgcaaaaaaagaagagtcagaaactgccaacaaaaatgattcttcaaagaagttgtctgttgagagagtgtatcagaagaagacacaacttgaacacattcttcttcgtcctgatacatatattgggtcagtggagccattgacgcagttcatgtgggtgtatgatgaagatgtaggaatgaattgcagggaggttacctttgtgccaggtttatacaagatctttgatgaaattttggttaatgctgctgacaataaacagagggataagaacatgacttgtattaaagtttctattgatcctgaatctaacattataagcatttggaataatgggaaaggcattccagtagtagaacacaaggtagagaaagtttatgttcctgctttaatttttggacagcttttaacatccagtaactatgatgatgatgagaaaaaagttacaggtggtcgtaatggttatggtgcaaaactttgtaatattttcagtacaaagtttacagtagaaacagcttgcaaagaatacaaacacagttttaagcagacatggatgaataatatgatgaagacttctgaagccaaaattaaacattttgatggtgaagattacacatgcataacattccaaccagatctgtccaaatttaagatggaaaaacttgacaaggatattgtggccctcatgactagaagggcatatgatttggctggttcgtgtagaggggtcaaggtcatgtttaatggaaagaaattgcctgtaaatggatttcgcagttatgtagatctttatgtgaaagacaaattggatgaaactggggtggccctgaaagttattcatgagcttgcaaatgaaagatgggatgtttgtctcacattgagtgaaaaaggattccagcaaatcagctttgtaaatagtattgcaactacaaaaggtggacggcacgtggattatgtggtagatcaagttgttggtaaactgattgaagtagttaagaaaaagaacaaagctggtgtatcagtgaaaccatttcaagtaaaaaaccatatatgggtttttattaattgccttattgaaaatccaacttttgattctcagactaaggaaaacatgactctgcagcccaaaagttttgggtctaaatgccagctgtcagaaaaattttttaaagcagcctctaattgtggcattgtagaaagtatcctgaactgggtgaaatttaaggctcagactcagctgaataagaagtgttcatcagtaaaatacagtaaaatcaaaggtattcccaaactggatgatgctaatgatgctggtggtaaacattccctggagtgtacactgatattaacagagggagactctgccaaatcactggctgtgtctggattaggtgtgattggacgagacagatacggagtttttccactcaggggcaaaattcttaatgtacgggaagcttctcataaacagatcatggaaaatgctgaaataaataatattattaaaatagttggtctacaatataagaaaagttacgatgatgcagaatctctgaaaaccttacgctatggaaagattatgattatgaccgatcaggatcaagatggttctcacataaaaggcctgcttattaatttcatccatcacaattggccatcacttttgaagcatggttttcttgaagagttcattactcctattgtaaaggcaagcaaaaataagcaggaactttccttctacagtattcctgaatttgacgaatggaaaaaacatatagaaaaccagaaagcctggaaaataaagtactataaaggattgggtactagtacagctaaagaagcaaaggaatattttgctgatatggaaaggcatcgcatcttgtttagatatgctggtcctgaagatgatgctgccattaccttggcatttagtaagaagaagattgatgacagaaaagaatggttaacaaattttatggaagaccggagacagcgtaggctacatggcttaccagagcaatttttatatggtactgcaacaaagcatttgacttataatgatttcatcaacaaggaattgattctcttctcaaactcagacaatgaaagatctataccatctcttgttgatggctttaaacctggccagcggaaagttttatttacctgtttcaagaggaatgataaacgtgaagtaaaagttgcccagttggctggctctgttgctgagatgtcggcttatcatcatggagaacaagcattgatgatgactattgtgaatttggctcagaactttgtgggaagtaacaacattaacttgcttcagcctattggtcagtttggaactcggcttcatggtggcaaagatgctgcaagccctcgttatattttcacaatgttaagcactttagcaaggctactttttcctgctgtggatgacaacctccttaagttcctttatgatgataatcaacgtgtagagcctgagtggtatattcctataattcccatggttttaataaatggtgctgagggcattggtactggatgggcttgtaaactacccaactatgatgctagggaaattgtgaacaatgtcagacgaatgctagatggcctggatcctcatcccatgcttccaaactacaaaaactttaaaggcacgattcaagaacttggtcaaaaccagtatgcagtcagtggtgaaatatttgtagtggacagaaacacagtagaaattacagagcttccagttagaacttggacacaggtatataaagaacaggttttagaacctatgctaaatggaacagataaaacaccagcattaatttctgattataaagaatatcatactgacacaactgtgaaatttgtggtgaaaatgactgaagagaaactagcacaagcagaagctgctggactgcataaagtttttaaacttcaaactactcttacttgtaattccatggtactttttgatcatatgggatgtctgaagaaatatgaaactgtgcaagacattctgaaagaattctttgatttacgattaagttattacggtttacgtaaggagtggcttgtgggaatgttgggagcagaatctacaaagcttaacaatcaagcccgtttcattttagagaagatacaagggaaaattactataggcagcagaagaggattattttacttgtaggtggagaggaaattatacaattgacttgatatcaaatttaagaatttgaacagaaactagtttttaattaattaattaatttatttatttatttttgagatggagtctcgctctgtgcccagactgaagtgcagttgcgcgatcccagctcactgcactccagcctgggtgattaagagagactccatctc

SEQ ID NO: 292421 - DNA, 1192 bp, Homo sapiens
gcatgtgctgagtctaggtctgagaaggaatatgtatttgacattttatagttaatactggtggttctcatatggtgccacttaatgtgggatatgcaattggttgttactagtctttgataagtaaaacggagtaaacatttagacctttataataatgtgttactaaaacagcatgtgattacattttttagtaatttgtgttctatggtatttttaaaagtattggcccatgacaaattagaaatgaaaaaaaatatttaaatcccatgtaatttaagaagtactcttccaagatatttccttttcaggctcaaggaccaaatagcaaatacaaatgttttatgtatgaagggattcatcattaaaatttgtctttgggactttcccactagtttaaatgtatttgtcaaaaagtctttggtcatgtcaaccccagaattgaaatgctactgccaaattgtttataatcactcatagtaagagatcaggactgcaatgctccactgattgggcatgccaaagaaataaactacaatgttgtggcatttatctttttatattgcacttaaccacggaagaaaaaaccttttgtatcattttaaggtaaaggccgaggggcaaagaaaaggaaagcatctggctctgaaaatgaaggcgattataaccctggcaggaaaacatccaaaacaacaagcaagaaaccgaagaagacatcttttgatcaggattcagatgtggacatcttcccctcagacttccctactgagccaccttctctgccacgaaccggtcgggctaggaaagaagtaaaatattttgcagagtctgatgaagaagaagatgatgttgattttgcaatgtttaattaagtgcccaaagagcacaaacatttttcaacaaatatcttgtgttgtccttttgtcttctctgtctcagacttttgtacatctggcttattttaatgtgatgatgtaattgacggttttttattattgtggtaggccttttaacattttgttcttacacatacagttttatgctcttttttactcattgaaatgtcacgtactgtctgattggcttgtagaattgttatagactgccgtgcattagcacagattttaattgtcatggttacaaactacagacctgctttttgaaatgaaatttaaacattaaaaatggaact

SEQ ID NO: 292422 - DNA, 3493 bp, Homo sapiens
gtgcggtgttatgccggacaagagggaggtgaccgtggcggcggcggcggcggctctgtttattgtccctctcggtgtgtgtgtgtgaggaaatcggggctgcagcgaggctaaggcggcctttgaagcagcggcggcgaccgggacgactactctggcgactcgagtggctggccttcgcggagtgtgagaaggacaaggcacctctgcgtcctcgccacgtccgagcgcctcgggctccccggccgccctcgcggctcgcacgcccgggcttcagcccggcctgcagcggcgcccgcgggcgggcgagaaggcaacgccgccgctcggccgccgccggtcgctccctgctttctcctcagccgccgcgctaggcccgggcgacgcggacgccgcgcctcgagtttgagggcagccggcggcgcggcctcctcagcgggctcggctggacgtccgctccggatcttcgcgatggggcgcgggggtcggcgcggctaggagtgcggcgagtggagcggtgggtgcggagcggcggggcccagcggcccgcagggaggcgggagcggcggctgcggcctcagggcctgtgagctggaggcactcgccatggccaagtcgggtggctgcggcgcgggagccggcgtgggcggcggcaacggggcactgacctgggtgaacaatgctgcaaaaaaagaagagtcagaaactgccaacaaaaatgattcttcaaagaagttgtctgttgagagagtgtatcagaagaagacacaacttgaacacattcttcttcgtcctgatacatatattgggtcagtggagccattgacgcagttcatgtgggtgtatgatgaagatgtaggaatgaattgcagggaggttacctttgtgccaggtttatacaagatctttgatgaaattttggttaatgctgctgacaataaacagagggataagaacatgacttgtattaaagtttctattgatcctgaatctaacattataagcatttggaataatgggaaaggcattccagtagtagaacacaaggtagagaaagtttatgttcctgctttaatttttggacagcttttaacatccagtaactatgatgatgatgagaaaaaagttacaggtggtcgtaatggttatggtgcaaaactttgtaatattttcagtacaaagtttacagtagaaacagcttgcaaagaatacaaacacagttttaagcagacatggatgaataatatgatgaagacttctgaagccaaaattaaacattttgatggtgaagattacacatgcataacattccaaccagatctgtccaaatttaagatggaaaaacttgacaaggatattgtggccctcatgactagaagggcatatgatttggctggttcgtgtagaggggtcaaggtcatgtttaatggaaagaaattgcctgtaaatggatttcgcagttatgtagatctttatgtgaaagacaaattggatgaaactggggtggccctgaaagttattcatgagcttgcaaatgaaagatgggatgtttgtctcacattgagtgaaaaaggattccagcaaatcagctttgtaaatagtattgcaactacaaaaggtggacggcacgtggattatgtggtagatcaagttgttggtaaactgattgaagtagttaagaaaaagaacaaagctggtgtatcagtgaaaccatttcaagtaaaaaaccatatatgggtttttattaattgccttattgaaaatccaacttttgattctcagactaaggaaaacatgactctgcagcccaaaagttttgggtctaaatgccagctgtcagaaaaattttttaaagcagcctctaattgtggcattgtagaaagtatcctgaactgggtgaaatttaaggctcagactcagctgaataagaagtgttcatcagtaaaatacagtaaaatcaaaggtattcccaaactggatgatgctaatgatgctggtggtaaacattccctggagtgtacactgatattaacagagggagactctgccaaatcactggctgtgtctggattaggtgtgattggacgagacagatacggagtttttccactcaggggcaaaattcttaatgtacgggaagcttctcataaacagatcatggaaaatgctgaaataaataatattattaaaatagttggtctacaatataagaaaagttacgatgatgcagaatctctgaaaaccttacgctatggaaagattatgattatgaccgatcaggatcaagatggttctcacataaaaggcctgcttattaatttcatccatcacaattggccatcacttttgaagcatggttttcttgaagagttcattactcctattgtaaaggcaagcaaaaataagcaggaactttccttctacagtattcctgaatttgacgaatggaaaaaacatatagaaaaccagaaagcctggaaaataaagtactataaaggattgggtactagtacagctaaagaagcaaaggaatattttgctgatatggaaaggcatcgcatcttgtttagatatgctggtcctgaagatgatgctgccattaccttggcatttagtaagaagaagattgatgacagaaaagaatggttaacaaattttatggaagaccggagacagcgtaggctacatggcttaccagagcaatttttatatggtactgcaacaaagcatttgacttataatgatttcatcaacaaggaattgattctcttctcaaactcagacaatgaaagatctataccatctcttgttgatggctttaaacctggccagcggaaagttttatttacctgtttcaagaggaatgataaacgtgaagtaaaagttgcccagttggctggctctgttgctgagatgtcggcttatcatcatggagaacaagcattgatgatgactattgtgaatttggctcagaactttgtgggaagtaacaacattaacttgcttcagcctattggtcagtttggaactcggcttcatggtggcaaagatgctgcaagccctcgttatattttcacaatgttaagcactttagcaaggctactttttcctgctgtggatgacaacctccttaagttcctttatgatgataatcaacgtgtagagcctgagtggtatattcctataattcccatggttttaataaatggtgctgagggcattggtactggatgggcttgtaaactacccaactatgatgctagggaaattgtgaacaatgtcagacgaatgctagatggcctggatcctcatcccatgcttccaaactaacaaaaacactcaacacggcaccgatacacgaactcgggtccaaacccagtatgcacgccagcggtgacaatatcgtcagcggaccagaacaacagtagaacatcacaagagctacccggagcaacaggacacaggttactaccgacacggtaacaacccagag

SEQ ID NO: 292423 - DNA, 3252 bp, Homo sapiens
gtgcggtgttatgccggacaagagggaggtgaccgtggcggcggcggcggcggctctgtttattgtccctctcggtgtgtgtgtgtgaggaaatcggggctgcagcgaggctaaggcggcctttgaagcagcggcggcgaccgggacgactactctggcgactcgagtggctggccttcgcggagtgtgagaaggacaaggcacctctgcgtcctcgccacgtccgagcgcctcgggctccccggccgccctcgcggctcgcacgcccgggcttcagcccggcctgcagcggcgcccgcgggcgggcgagaaggcaacgccgccgctcggccgccgccggtcgctccctgctttctcctcagccgccgcgctaggcccgggcgacgcggacgccgcgcctcgagtttgagggcagccggcggcgcggcctcctcagcgggctcggctggacgtccgctccggatcttcgcgatggggcgcgggggtcggcgcggctaggagtgcggcgagtggagcggtgggtgcggagcggcggggcccagcggcccgcagggaggcgggagcggcggctgcggcctcagggcctgtgagctggaggcactcgccatggccaagtcgggtggctgcggcgcgggagccggcgtgggcggcggcaacggggcactgacctgggtgaacaatgctgcaaaaaaagaagagtcagaaactgccaacaaaaatgattcttcaaagaagttgtctgttgagagagtgtatcagaagaagacacaacttgaacacattcttcttcgtcctgatacatatattgggtcagtggagccattgacgcagttcatgtgggtgtatgatgaagatgtaggaatgaattgcagggaggttacctttgtgccaggtttatacaagatctttgatgaaattttggttaatgctgctgacaataaacagagggataagaacatgacttgtattaaagtttctattgatcctgaatctaacattataagcatttggaataatgggaaaggcattccagtagtagaacacaaggtagagaaagtttatgttcctgctttaatttttggacagcttttaacatccagtaactatgatgatgatgagaaaaaagttacaggtggtcgtaatggttatggtgcaaaactttgtaatattttcagtacaaagtttacagtagaaacagcttgcaaagaatacaaacacagttttaagcagacatggatgaataatatgatgaagacttctgaagccaaaattaaacattttgatggtgaagattacacatgcataacattccaaccagatctgtccaaatttaagatggaaaaacttgacaaggatattgtggccctcatgactagaagggcatatgatttggctggttcgtgtagaggggtcaaggtcatgtttaatggaaagaaattgcctgtaaatggatttcgcagttatgtagatctttatgtgaaagacaaattggatgaaactggggtggccctgaaagttattcatgagcttgcaaatgaaagatgggatgtttgtctcacattgagtgaaaaaggattccagcaaatcagctttgtaaatagtattgcaactacaaaaggtggacggcacgtggattatgtggtagatcaagttgttggtaaactgattgaagtagttaagaaaaagaacaaagctggtgtatcagtgaaaccatttcaagtaaaaaaccatatatgggtttttattaattgccttattgaaaatccaacttttgattctcagactaaggaaaacatgactctgcagcccaaaagttttgggtctaaatgccagctgtcagaaaaattttttaaagcagcctctaattgtggcattgtagaaagtatcctgaactgggtgaaatttaaggctcagactcagctgaataagaagtgttcatcagtaaaatacagtaaaatcaaaggtattcccaaactggatgatgctaatgatgctggtggtaaacattccctggagtgtacactgatattaacagagggagactctgccaaatcactggctgtgtctggattaggtgtgattggacgagacagatacggagtttttccactcaggggcaaaattcttaatgtacgggaagcttctcataaacagatcatggaaaatgctgaaataaataatattattaaaatagttggtctacaatataagaaaagttacgatgatgcagaatctctgaaaaccttacgctatggaaagattatgattatgaccgatcaggatcaagatggttctcacataaaaggcctgcttattaatttcatccatcacaattggccatcacttttgaagcatggttttcttgaagagttcattactcctattgtaaaggcaagcaaaaataagcaggaactttccttctacagtattcctgaatttgacgaatggaaaaaacatatagaaaaccagaaagcctggaaaataaagtactataaaggattgggtactagtacagctaaagaagcaaaggaatattttgctgatatggaaaggcatcgcatcttgtttagatatgctggtcctgaagatgatgctgccattaccttggcatttagtaagaagaagattgatgacagaaaagaatggttaacaaattttatggaagaccggagacagcgtaggctacatggcttaccagagcaatttttatatggtactgcaacaaagcatttgacttataatgatttcatcaacaaggaattgattctcttctcaaactcagacaatgaaagatctataccatctcttgttgatggctttaaacctggccagcggaaagttttatttacctgtttcaagaggaatgataaacgtgaagtaaaagttgcccagttggctggctctgttgctgagatgtcggcttatcatcatggagaacaagcattgatgatgactattgtgaatttggctcagaactttgtgggaagtaacaacattaacttgcttcagcctattggtcagtttggaactcggcttcatggtggcaaagatgctgcaagccctcgttatattttcacaatgttaagcactttagcaaggctactttttcctgctgtggatgacaacctccttaagttcctttatgatgataatcaacgtgtagagcctgagtggtatattcctataagcccatccagtaccaatgccctcagcaccatttataaaccatgggattataggatataccactca

SEQ ID NO: 292424 - DNA, 702 bp, Homo sapiens
ccaccaaggtggtgaattactgtatgtaatctttttcctccaaaaaataagataactggtcttacacttaggttagcattatgattctaattttaaaagcaccattatttgtaatacttcctaaacataagcgaagtttaaggagtgatagttcttaatactagtctttacttcctttcataacttttaaatctattgaaaaaaaatctagaaaccgaagaagacatcttttgatcaggattcagatgtggacatcttcccctcagacttccctactgagccaccttctctgccacgaaccggtcgggctaggaaagaagtaaaatattttgcagagtctgatgaagaagaagatgatgttgattttgcaatgtttaattaagtgcccaaagagcacaaacatttttcaacaaatatcttgtgttgtccttttgtcttctctgtctcagacttttgtacatctggcttattttaatgtgatgatgtaattgacggttttttattattgtggtaggccttttaacattttgttcttacacatacagttttatgctcttttttactcattgaaatgtcacgtactgtctgattggcttgtagaattgttatagactgccgtgcattagcacagattttaattgtcatggttacaaactacagacctgctttttgaaatgaaatttaaacattaaaaatggaact

SEQ ID NO: 292425 - DNA, 577 bp, Homo sapiens
  misc_feature (1)..(1): n is a, c, g, or t
nctggtggaactcgggggcacgcttgggggctacggctctgaagtgaaggcgatataccctggcttttacatccagacaatccgctaaaccgaagaagacatcttttgatcaggattcagatgtggacatcttcccctcagacttccctactgagccaccttctctgccacgaaccggtcgggctaggaaagaagtaaaatattttgcagagtctgatgaagaagaagatgatgttgattttgcaatgtttaattaagtgcccaaagagcacaaacatttttcaacaaatatcttgtgttgtccttttgtcttctctgtctcagacttttgtacatctggcttattttaatgtgatgatgtaattgacggttttttattattgtggtaggccttttaacattttgttcttacacatacagttttatgctcttttttactcattgaaatgtcacgtactgtctgattggcttgtagaattgttatagactgccgtgcattagcacagattttaattgtcatggttacaaactacagacctgctttttgaaatgaaatttaaacattaaaaatggaact

SEQ ID NO: 292426 - DNA, 2880 bp, Homo sapiens
gtgcggtgttatgccggacaagagggaggtgaccgtggcggcggcggcggcggctctgtttattgtccctctcggtgtgtgtgtgtgaggaaatcggggctgcagcgaggctaaggcggcctttgaagcagcggcggcgaccgggacgactactctggcgactcgagtggctggccttcgcggagtgtgagaaggacaaggcacctctgcgtcctcgccacgtccgagcgcctcgggctccccggccgccctcgcggctcgcacgcccgggcttcagcccggcctgcagcggcgcccgcgggcgggcgagaaggcaacgccgccgctcggccgccgccggtcgctccctgctttctcctcagccgccgcgctaggcccgggcgacgcggacgccgcgcctcgagtttgagggcagccggcggcgcggcctcctcagcgggctcggctggacgtccgctccggatcttcgcgatggggcgcgggggtcggcgcggctaggagtgcggcgagtggagcggtgggtgcggagcggcggggcccagcggcccgcagggaggcgggagcggcggctgcggcctcagggcctgtgagctggaggcactcgccatggccaagtcgggtggctgcggcgcgggagccggcgtgggcggcggcaacggggcactgacctgggtgaacaatgctgcaaaaaaagaagagtcagaaactgccaacaaaaatgattcttcaaagaagttgtctgttgagagagtgtatcagaagaagacacaacttgaacacattcttcttcgtcctgatacatatattgggtcagtggagccattgacgcagttcatgtgggtgtatgatgaagatgtaggaatgaattgcagggaggttacctttgtgccaggtttatacaagatctttgatgaaattttggttaatgctgctgacaataaacagagggataagaacatgacttgtattaaagtttctattgatcctgaatctaacattataagcatttggaataatgggaaaggcattccagtagtagaacacaaggtagagaaagtttatgttcctgctttaatttttggacagcttttaacatccagtaactatgatgatgatgagaaaaaagttacaggtggtcgtaatggttatggtgcaaaactttgtaatattttcagtacaaagtttacagtagaaacagcttgcaaagaatacaaacacagttttaagcagacatggatgaataatatgatgaagacttctgaagccaaaattaaacattttgatggtgaagattacacatgcataacattccaaccagatctgtccaaatttaagatggaaaaacttgacaaggatattgtggccctcatgactagaagggcatatgatttggctggttcgtgtagaggggtcaaggtcatgtttaatggaaagaaattgcctgtaaatggatttcgcagttatgtagatctttatgtgaaagacaaattggatgaaactggggtggccctgaaagttattcatgagcttgcaaatgaaagatgggatgtttgtctcacattgagtgaaaaaggattccagcaaatcagctttgtaaatagtattgcaactacaaaaggtggacggcacgtggattatgtggtagatcaagttgttggtaaactgattgaagtagttaagaaaaagaacaaagctggtgtatcagtgaaaccatttcaagtaaaaaaccatatatgggtttttattaattgccttattgaaaatccaacttttgattctcagactaaggaaaacatgactctgcagcccaaaagttttgggtctaaatgccagctgtcagaaaaattttttaaagcagcctctaattgtggcattgtagaaagtatcctgaactgggtgaaatttaaggctcagactcagctgaataagaagtgttcatcagtaaaatacagtaaaatcaaaggtattcccaaactggatgatgctaatgatgctggtggtaaacattccctggagtgtacactgatattaacagagggagactctgccaaatcactggctgtgtctggattaggtgtgattggacgagacagatacggagtttttccactcaggggcaaaattcttaatgtacgggaagcttctcataaacagatcatggaaaatgctgaaataaataatattattaaaatagttggtctacaatataagaaaagttacgatgatgcagaatctctgaaaaccttacgctatggaaagattatgattatgaccgatcaggatcaagatggttctcacataaaaggcctgcttattaatttcatccatcacaattggccatcacttttgaagcatggttttcttgaagagttcattactcctattgtaaaggcaagcaaaaataagcaggaactttccttctacagtattcctgaatttgacgaatggaaaaaacatatagaaaaccagaaagcctggaaaataaagtactataaaggattgggtactagtacagctaaagaagcaaaggaatattttgctgatatggaaaggcatcgcatcttgtttagatatgctggtcctgaagatgatgctgccattaccttggtaattaagttaattttttaaaagcttttgttagccatccccctaccttctattcctttcctcccagtcctggttccctatgataagtctcttttgaatgctcaagctagttaattttaatttttcccccagatgatgctgtgcttgtataaacttctttaattgaaagaccttagtttaaatgtgtttttgattaaaatattgtaaaataacctaatttttccagaaattaagaattagttattggccacttatacattttaattttgtaat

SEQ ID NO: 292427 - DNA, 1147 bp, Homo sapiens
gtgcggtgttatgccggacaagagggaggtgaccgtggcggcggcggcggcggctctgtttattgtccctctcggtgtgtgtgtgtgaggaaatcggggctgcagcgaggctaaggcggcctttgaagcagcggcggcgaccgggacgactactctggcgactcgagtggctggccttcgcggagtgtgagaaggacaaggcacctctgcgtcctcgccacgtccgagcgcctcgggctccccggccgccctcgcggctcgcacgcccgggcttcagcccggcctgcagcggcgcccgcgggcgggcgagaaggcaacgccgccgctcggccgccgccggtcgctccctgctttctcctcagccgccgcgctaggcccgggcgacgcggacgccgcgcctcgagtttgagggcagccggcggcgcggcctcctcagcgggctcggctggacgtccgctccggatcttcgcgatggggcgcgggggtcggcgcggctaggagtgcggcgagtggagcggtgggtgcggagcggcggggcccagcggcccgcagggaggcgggagcggcggctgcggcctcagggcctgtgagctggaggcactcgccatggccaagtcgggtggctgcggcgcgggagccggcgtgggcggcggcaacggggcactgacctgggtgaacaatgctgcaaaaaaagaagagtcagaaactgccaacaaaaatgattcttcaaagaagttgtctgttgagagagtgtatcagaagaagacacaacttgaacacattcttcttcgtcctgatacatatattgggtcagtggagccattgacgcaggtaattattgctaaaattgattgaaattaggagatgtgcatctatatttactttttaatatgttgataaaattattgtaattacttgctttggaaatttgtaatttcatctgtcatagtcaaagtagggtgaaagatctagaagtagaaatgtatttacttctttttggggattaaaaaccgtcagaagaggctgagcgcagtggctcacacctgtaatcccagcactttgggaggccgaggcgggtggatcacaaggtcaggagatcgaaaccatcctggctaacatggtgaaactctgtctctaataaaaatac

SEQ ID NO: 292428 - DNA, 382 bp, Homo sapiens
tgaatctaacattataagcatttggaataatgggaaaggcattccagtagtagaacacaaggtagagaaagtttatgttcctgctttaatttttggacagcttttaacatccagtaactatgatgatgatgagaaaaaagttacaggtaaagtctgaatggaattttggttgaaaaatactgttttcttaatataaaatgtataacttactaaggaaattgtgcagttttggtgtgagaaaatcattgtcagaattaatatttataaactatcatgtataaatattgtcttggtaatagtttaacagtgacatttaaaaaccttaagactgatagtacattgactttatgttagaactgctggaagtttaacttggctgaca

SEQ ID NO: 292429 - DNA, 3180 bp, Homo sapiens
gtgcggtgttatgccggacaagagggaggtgaccgtggcggcggcggcggcggctctgtttattgtccctctcggtgtgtgtgtgtgaggaaatcggggctgcagcgaggctaaggcggcctttgaagcagcggcggcgaccgggacgactactctggcgactcgagtggctggccttcgcggagtgtgagaaggacaaggcacctctgcgtcctcgccacgtccgagcgcctcgggctccccggccgccctcgcggctcgcacgcccgggcttcagcccggcctgcagcggcgcccgcgggcgggcgagaaggcaacgccgccgctcggccgccgccggtcgctccctgctttctcctcagccgccgcgctaggcccgggcgacgcggacgccgcgcctcgagtttgagggcagccggcggcgcggcctcctcagcgggctcggctggacgtccgctccggatcttcgcgatggggcgcgggggtcggcgcggctaggagtgcggcgagtggagcggtgggtgcggagcggcggggcccagcggcccgcagggaggcgggagcggcggctgcggcctcagggcctgtgagctggaggcactcgccatggccaagtcgggtggctgcggcgcgggagccggcgtgggcggcggcaacggggcactgacctgggtgaacaatgctgcaaaaaaagaagagtcagaaactgccaacaaaaatgattcttcaaagaagttgtctgttgagagagtgtatcagaagaagacacaacttgaacacattcttcttcgtcctgatacatatattgggtcagtggagccattgacgcagttcatgtgggtgtatgatgaagatgtaggaatgaattgcagggaggttacctttgtgccaggtttatacaagatctttgatgaaattttggttaatgctgctgacaataaacagagggataagaacatgacttgtattaaagtttctattgatcctgaatctaacattataagcatttggaataatgggaaaggcattccagtagtagaacacaaggtagagaaagtttatgttcctgctttaatttttggacagcttttaacatccagtaactatgatgatgatgagaaaaaagttacaggtggtcgtaatggttatggtgcaaaactttgtaatattttcagtacaaagtttacagtagaaacagcttgcaaagaatacaaacacagttttaagcagacatggatgaataatatgatgaagacttctgaagccaaaattaaacattttgatggtgaagattacacatgcataacattccaaccagatctgtccaaatttaagatggaaaaacttgacaaggatattgtggccctcatgactagaagggcatatgatttggctggttcgtgtagaggggtcaaggtcatgtttaatggaaagaaattgcctgtaaatggatttcgcagttatgtagatctttatgtgaaagacaaattggatgaaactggggtggccctgaaagttattcatgagcttgcaaatgaaagatgggatgtttgtctcacattgagtgaaaaaggattccagcaaatcagctttgtaaatagtattgcaactacaaaaggtggacggcacgtggattatgtggtagatcaagttgttggtaaactgattgaagtagttaagaaaaagaacaaagctggtgtatcagtgaaaccatttcaagtaaaaaaccatatatgggtttttattaattgccttattgaaaatccaacttttgattctcagactaaggaaaacatgactctgcagcccaaaagttttgggtctaaatgccagctgtcagaaaaattttttaaagcagcctctaattgtggcattgtagaaagtatcctgaactgggtgaaatttaaggctcagactcagctgaataagaagtgttcatcagtaaaatacagtaaaatcaaaggtattcccaaactggatgatgctaatgatgctggtggtaaacattccctggagtgtacactgatattaacagagggagactctgccaaatcactggctgtgtctggattaggtgtgattggacgagacagatacggagtttttccactcaggggcaaaattcttaatgtacgggaagcttctcataaacagatcatggaaaatgctgaaataaataatattattaaaatagttggtctacaatataagaaaagttacgatgatgcagaatctctgaaaaccttacgctatggaaagattatgattatgaccgatcaggatcaagatggttctcacataaaaggcctgcttattaatttcatccatcacaattggccatcacttttgaagcatggttttcttgaagagttcattactcctattgtaaaggcaagcaaaaataagcaggaactttccttctacagtattcctgaatttgacgaatggaaaaaacatatagaaaaccagaaagcctggaaaataaagtactataaaggattgggtactagtacagctaaagaagcaaaggaatattttgctgatatggaaaggcatcgcatcttgtttagatatgctggtcctgaagatgatgctgccattaccttggcatttagtaagaagaagattgatgacagaaaagaatggttaacaaattttatggaagaccggagacagcgtaggctacatggcttaccagagcaatttttatatggtactgcaacaaagcatttgacttataatgatttcatcaacaaggaattgattctcttctcaaactcagacaatgaaagatctataccatctcttgttgatggctttaaacctggccagcggaaagttttatttacctgtttcaagaggaatgataaacgtgaagtaaaagttgcccagttggctggctctgttgctgagatgtcggcttatcatcatggagaacaagcattgatgatgactattgtgaatttggctcagaactttattattgtggtaggccttttaacattttgttcttacacatacagttttatgctcttttttactcattgaaatgtcacgtactgtctgattggcttgtagaattgttatagactgccgtgcattagcacagattttaattgtcatggttacaaactacagacctgctttttgaaatgaaatttaaacattaaaaatggaact

SEQ ID NO: 292430 - DNA, 673 bp, Homo sapiens
cggccttttccaggttaaatggtaacccagtcaggggttttttccccccagctttgaaacttaagctgcagggctttttttatttaccccccgtaccgatatttaagaaactgtttgaagaaggtttaaacattcaaaagcaaagattacgagacctaagaaactatgccaaagaaaagcgagatgaacaaaggagacgccaccaggatgaactggactccatggagaactactataaggaccagttttcattgctggcagaagccatatcacaggaacatcaagaacttaaagccagagagaaatctcaggcccagacattacataaggtgaagagggagctgagatctaagatggagaaggaaattcagcagctgcaggacatgataacacagaatgatgatgatgttttcttccgggaactggaagctgagcgcttcagatctcggcttcagctggcttcctttcagtacagtaaaagtccctccctatgaggccagacttgataatagtaggtgaaggttctggaggcctttaccaggacagagctagaatcgagccagtaaacagtctaagccagaaaaataattttcaaatgctttacctgtattttcattccagtactttttatgattttttaaataaaaattgttttctaaaagcttaaaaaaat

SEQ ID NO: 292431 - DNA, 1047 bp, Homo sapiens
agtttgagaccagcctgggcaacatggcaaaaccccatctctacaaaaaataaaagattagccaggcttggtggcatatgcctgtaatcccagctactcaagtggttgagatgggaggatcactggaacccagtaggcagaggttacagtgagcccagctagcaccactgcactccagcctgggtgacagagtgagatcctgtctcaaaataaaagtaaataattaaacatgcataagcgtctgaaaacttgttattagtgactgtcaaaggaagcttttttaaaggtctgcctactcctacgaatttacattctgctgaaatcagtgaaagatgttgaaaagaattttctcaatagatgttaaaaagtgctctgggtgatcggattaaagaaaagactgaccataaagaagaaaatactggaaatgaggaggtagaggatggaactgaggagacactgtctcagcacagtgatggcatcgtggagtatgggccaaagaagtcaaggccaggactttccatgcgtagaaagccaccctacagatcccattcgctctctccatctccagttaacaaacacaaacagttccacttggagagaaaaaggcagcgcaagccaagagaaacagatgtccgccaattccaagcacaggcgtttactgaagcatttgaaagggaactaagaagacataaagttcaagagaatattggacctctaagaatacatgagaaggaggaggaaacagtgggtaaaagtctccactgtaataaatgccatttgatcagatgagtgggaagtacaaagatgatctttttaaaagaagaaggggccaacagggccttaatcatgagctctttaggaaaaggcaggatttcatgtcatgatacaggacttgcttattaataaggcattcaggttgctaaaatatgacgagacatggttccaaagaaaagtagtgtttttccgctacttaaaacttcccatcagtttttaagggtttatttgacttagcagttcaccaggggcttaaaaactactctaggctga

SEQ ID NO: 292432 - DNA, 469 bp, Homo sapiens
gtctagaggaccccgttcaatctctacaccaagatacaaggccctctgaggcaagacttacctctctgtactgcctatgagctctacaaaggaatctctgttcataactaagcattcatgatggaaaggcaagagtatgaaaacagatatcacatatctgaaataacaatacagctagagggaagacaagaaaaaaccagttaagagggacatggaaataaatattcacattaaacatgaggtgcaagtccatggttcaataatacattgggggtttttgcttagcacctatttggaagtaatcgggtaatgtaactttgaaatggaaatctaaatcatgtttttatatatgttggtgataacatagactgttatggagagtaatttcttttttttttttttttgggcggggacggagtctcactcttgtcgcccaggctggagtgcagtggtgcgatctcggctcact

SEQ ID NO: 292433 - DNA, 384 bp, Homo sapiens
tcatacaactgtagaccctgtttttaaagcaatattcttgtttctttgttactcgaataatacatgctcattacaggtgatttggttctttctgattgcactttcactagaaccctgtttaccatggcaagttaggggtgcctcactgtccttacctttccctgcctcttacatagaaaaagtagtattcacttaggggttttttggtattgtttttatctgttctgaacaggtgaaactgaacagtattttaaagaatctgatcgaggagaacgtttggaagagccagaaagtactaaagaatctaaatcatcatggaaaagagtttcttttgggaggtagcacttagtgtctctgaatttgatgaaaacaagttacgctttt

SEQ ID NO: 292434 - DNA, 2878 bp, Homo sapiens
tctctaaacttcccaaaccgcccccgtttcacgtcctgtgaaaggaagtgctcctctgatgaccaatcagcggcgagaagctcttttaacgtccgtccttctttcacgcctccttccccgcgctttggttcgtgcgtccgcgccccagtgtcgggtctgcgtggatcggtccttccaggacaccgtcgccttcccggccgcgtcggagtccggcggcgacctgcctctgaaacatggcaggctcggatgctgagtgggtaaccattgccaataaccttctttttaagtgtcatatacatctgagaatacatgaacttcaagactgtgatgctaatgtttttattgctctttatcagtctattttgggagaaaaggtaccagacctcatagttattcctaggagtcaagaagatgatgcacacaatgtacaagcagtaattgattcactggccttggactacttgcaggtcagcttgtctcacataacaggagaaaatatagtgaaaggagataaagaatctattaagaatctcctggaaatatttgatggtttgttggagtatcttacagaacgcatcagtgaaacatctcatgagaaaagtgaaactgaacagtattttaaagaatctgatcgaggagaacgtttggaagagccagaaagtactaaagaatctaaatcatcatggaaaagagtttcttttgggaggtgctccttgtcttctgagatgttgggcccctcttgggatggagatgaagcagaatccactggtgaaatcattagacttggagacacagcacacaccttttctctaagaagtaatggtgctcaatgtcctaatgaaatgctgtctaaaaaagccttagcctcaccaagttctaaatcacatgaagatatgttgtaccctcctagtgttttgtccaagagtaggacatcctttgttgaagacacggaaaccctttctgtgagtgggattccaaatgctaggaagctaggggagcctatccgagcagctattcctttacatccaccctaccacccttcagagcctcgagcaccctgccccataggaaaagaatacttgcattcaagtcactgctccccagccgtaaattctactggagagcatacggaattttctggggatctagatgatggacttttcttaatttccaagttgcctaaaggcagcaaatgggaagtatatccagctcaggtccaagggcctaggacaaggaagcctcccaaaggaaaaagaaatgaaaacagagctacagcctcatcctgcaattcacctttcccccagaggccaagaaagagattaacagaacaagaattacatgatgtatcagaaaaactctctcagcggctttctgaactagattggatgttaaaaagtgctctgggtgatcggattaaagaaaagactgaccataaagaagaaaatactggaaatgaggaggtagaggatggaactgaggagacactgtctcagcacagtgatggcatcgtggagtatgggccaaagaagtcaaggccaggactttccatgcgtagaaagccaccctacagatcccattcgctctctccatctccagttaacaaacacaaacagttccacttggagagaaaaaggcagcgcaagccaagagaaacagatgtccgccaattccaagcacaggcgtttactgaagcatttgaaagggaactaagaagacataaagttcaagagaatattggacctctaagaatacatgagaaggaggaggaaacagaaaaaatatacagaggagaagctgttcgtaaaggaactccagaatgtagtcagccctggaagatttactctagaaaaaccacaacgcagagtctaagaggtggcctcccaaagccaaataaagcagttccaatgaaagtaagtgaacacagtctcctgccccttatgctggagcagtttccgtttctttatgtttctggcccaacactaagcaaaatgtggaaacagcaaattgcacaggttgaacagcttaagaaagaagcatgtagagaaaatcgatcaaagaagaaactccaagatgaaatagaagaagccctaagaaggcatgacctccttactacccttgtcaagaaagaatatgaacataacaagagactgcaagacttcaaggactgcattcgtaggcaaaggttgacccaatcaaagataaaagaaaatcgacagcaaatcgttcgtgctcgaaaatattatgatgattatagagttcagttgtgtgcaaaaatgatgagaatgaggacccgggaagaaatgatatttaagaaactgtttgaagaaggtttaaacattcaaaagcaaagattacgagacctaagaaactatgccaaagaaaagcgagatgaacaaaggagacgccaccaggatgaactggactccatggagaactactataaggaccagttttcattgctggcagaagccatatcacaggaacatcaagaacttaaagccagagagaaatctcaggcccagacattacataaggtgaagagggagctgagatctaagatggagaaggaaattcagcagctgcaggacatgataacacagaatgatgatgatgttttcttccgggaactggaagctgagcgcttcagatctcggcttcagctggcttcctttcagtacagtaaaagtccctccctatgaggccagacttgataatagtaggtgaaggttctggaggcctttaccaggacagagctagaatcgagccagtaaacagtctaagccagaaaaataattttcaaatgctttacctgtattttcattccagtactttttatgattttttaaataaaaattgttttctaaaagcttaaaaaaat

SEQ ID NO: 292435 - DNA, 3694 bp, Homo sapiens
tctctaaacttcccaaaccgcccccgtttcacgtcctgtgaaaggaagtgctcctctgatgaccaatcagcggcgagaagctcttttaacgtccgtccttctttcacgcctccttccccgcgctttggttcgtgcgtccgcgccccagtgtcgggtctgcgtggatcggtccttccaggacaccgtcgccttcccggccgcgtcggagtccggcggcgacctgcctctgaaacatggcaggctcggatgctgagtgggtaaccattgccaataaccttctttttaagtgtcatatacatctgagaatacatgaacttcaagactgtgatgctaatgtttttattgctctttatcagtctattttgggagaaaaggtaccagacctcatagttattcctaggagtcaagaagatgatgcacacaatgtacaagcagtaattgattcactggccttggactacttgcaggtcagcttgtctcacataacaggagaaaatatagtgaaaggagataaagaatctattaagaatctcctggaaatatttgatggtttgttggagtatcttacagaacgcatcagtgaaacatctcatgagaaaagtgaaactgaacagtattttaaagaatctgatcgaggagaacgtttggaagagccagaaagtactaaagaatctaaatcatcatggaaaagagtttcttttgggaggtgctccttgtcttctgagatgttgggcccctcttgggatggagatgaagcagaatccactggtgaaatcattagacttggagacacagcacacaccttttctctaagaagtaatggtgctcaatgtcctaatgaaatgctgtctaaaaaagccttagcctcaccaagttctaaatcacatgaagatatgttgtaccctcctagtgttttgtccaagagtaggacatcctttgttgaagacacggaaaccctttctgtgagtgggattccaaatgctaggaagctaggggagcctatccgagcagctattcctttacatccaccctaccacccttcagagcctcgagcaccctgccccataggaaaagaatacttgcattcaagtcactgctccccagccgtaaattctactggagagcatacggaattttctggggatctagatgatggacttttcttaatttccaagttgcctaaaggcagcaaatgggaagtatatccagctcaggtccaagggcctaggacaaggaagcctcccaaaggaaaaagaaatgaaaacagagctacagcctcatcctgcaattcacctttcccccagaggccaagaaagagattaacagaacaagaattacatgatgtatcagaaaaactctctcagcggctttctgaactagattggatgttaaaaagtgctctgggtgatcggattaaagaaaagactgaccataaagaagaaaatactggaaatgaggaggtagaggatggaactgaggagacactgtctcagcacagtgatggcatcgtggagtatgggccaaagaagtcaaggccaggactttccatgcgtagaaagccaccctacagatcccattcgctctctccatctccagttaacaaacacaaacagttccacttggagagaaaaaggcagcgcaagccaagagaaacagatgtccgccaattccaagcacaggcgtttactgaagcatttgaaagggaactaagaagacataaagttcaagagaatattggacctctaagaatacatgagaaggaggaggaaacagaaaaaatatacagaggagaagctgttcgtaaaggaactccagaatgtagtcagccctggaagatttactctagaaaaaccacaacgcagagtctaagaggtggcctcccaaagccaaataaagcagttccaagtaagaaccacagaattgtactttatggaaaactggcaacctttgaaagcatgtgcaacattccaaggacacagcactgaaagctaacatccaccagttagccgaagaaagttttttttttttcccaatcactgccatgtggctggttttccgtagagggctaaaactcttcaataaggaagtacttcagggaggcctatatattggcacccaaggaatgccaggactgccacctgctgctccagcgttagcctcactcgtgtgcttactcactttgactgcctttttgtctatttctgggaggttggtagaatgaaagggatgctccaaggcaagcagatggcctgtccacctcctatatattgacagtgccaatgagtgtagagtcttgttacaagaaacaaagtcatgagaaatgccaggcttcctgttacacccaaagactgctggccctcctactctatcctttagaccagaaactttttcttctaagcacttgcctaccgggaaggttgaggagtcttgttttaccgtacgtagagaatctacccacaggcactgaagcggctgagcaattaggatggacttcccaggaccagcatggcatcaatccagaactattgagcttatttttatccttaccagtagttggcttactccaatcagaggagtaatgcaaattattataagtacatttagaattgttcttttcaggatcaaaaccacatcacttacataagctttgatctaccagggatgttggatgacagttcttgtccacgtctcagattaagaacatcttattttaccttgcagtgaaagtaagtgaacacagtctcctgccccttatgctggagcagtttccgtttctttatgtttctggcccaacactaagcaaaatgtggaaacagcaaattgcacaggttgaacagcttaagaaagaagcatgtagagaaaatcgatcaaagaagaaactccaagatgaaatagaagaagccctaagaaggcatgacctccttactacccttgtcaagaaagaatatgaacataacaagagactgcaagacttcaaggactgcattcgtaggcaaaggttgacccaatcaaagataaaagaaaatcgacagcaaatcgttcgtgctcgaaaatattatgatgattatagagttcagttgtgtgcaaaaatgatgagaatgaggacccgggaagaaatgatatttaagaaactgtttgaagaaggtttaaacattcaaaagcaaagattacgagacctaagaaactatgccaaagaaaagcgagatgaacaaaggagacgccaccaggatgaactggactccatggagaactactataaggaccagttttcattgctggcagaagccatatcacaggaacatcaagaacttaaagccagagagaaatctcaggcccagacattacataaggtgaagagggagctgagatctaagatggagaaggaaattcagcagctgcaggacatgataacacagaatgatgatgatgttttcttccgggaactggaagctgagcgcttcagatctcggcttcagctggcttcctttcagtacagtaaaagtccctccctatgaggccagacttgataatagtaggtgaaggttctggaggcctttaccaggacagagctagaatcgagccagtaaacagtctaagccagaaaaataattttcaaatgctttacctgtattttcattccagtactttttatgattttttaaataaaaattgttttctaaaagcttaaaaaaat

SEQ ID NO: 292436 - DNA, 3588 bp, Homo sapiens
tctctaaacttcccaaaccgcccccgtttcacgtcctgtgaaaggaagtgctcctctgatgaccaatcagcggcgagaagctcttttaacgtccgtccttctttcacgcctccttccccgcgctttggttcgtgcgtccgcgccccagtgtcgggtctgcgtggatcggtccttccaggacaccgtcgccttcccggccgcgtcggagtccggcggcgacctgcctctgaaacatggcaggctcggatgctgagtgggtaaccattgccaataaccttctttttaagtgtcatatacatctgagaatacatgaacttcaagactgtgatgctaatgtttttattgctctttatcagtctattttgggagaaaaggtaccagacctcatagttattcctaggagtcaagaagatgatgcacacaatgtacaagcagtaattgattcactggccttggactacttgcaggtcagcttgtctcacataacaggagaaaatatagtgaaaggagataaagaatctattaagaatctcctggaaatatttgatggtttgttggagtatcttacagaacgcatcagtgaaacatctcatgagaaaagtgctccttgtcttctgagatgttgggcccctcttgggatggagatgaagcagaatccactggtgaaatcattagacttggagacacagcacacaccttttctctaagaagtaatggtgctcaatgtcctaatgaaatgctgtctaaaaaagccttagcctcaccaagttctaaatcacatgaagatatgttgtaccctcctagtgttttgtccaagagtaggacatcctttgttgaagacacggaaaccctttctgtgagtgggattccaaatgctaggaagctaggggagcctatccgagcagctattcctttacatccaccctaccacccttcagagcctcgagcaccctgccccataggaaaagaatacttgcattcaagtcactgctccccagccgtaaattctactggagagcatacggaattttctggggatctagatgatggacttttcttaatttccaagttgcctaaaggcagcaaatgggaagtatatccagctcaggtccaagggcctaggacaaggaagcctcccaaaggaaaaagaaatgaaaacagagctacagcctcatcctgcaattcacctttcccccagaggccaagaaagagattaacagaacaagaattacatgatgtatcagaaaaactctctcagcggctttctgaactagattggatgttaaaaagtgctctgggtgatcggattaaagaaaagactgaccataaagaagaaaatactggaaatgaggaggtagaggatggaactgaggagacactgtctcagcacagtgatggcatcgtggagtatgggccaaagaagtcaaggccaggactttccatgcgtagaaagccaccctacagatcccattcgctctctccatctccagttaacaaacacaaacagttccacttggagagaaaaaggcagcgcaagccaagagaaacagatgtccgccaattccaagcacaggcgtttactgaagcatttgaaagggaactaagaagacataaagttcaagagaatattggacctctaagaatacatgagaaggaggaggaaacagaaaaaatatacagaggagaagctgttcgtaaaggaactccagaatgtagtcagccctggaagatttactctagaaaaaccacaacgcagagtctaagaggtggcctcccaaagccaaataaagcagttccaagtaagaaccacagaattgtactttatggaaaactggcaacctttgaaagcatgtgcaacattccaaggacacagcactgaaagctaacatccaccagttagccgaagaaagttttttttttttcccaatcactgccatgtggctggttttccgtagagggctaaaactcttcaataaggaagtacttcagggaggcctatatattggcacccaaggaatgccaggactgccacctgctgctccagcgttagcctcactcgtgtgcttactcactttgactgcctttttgtctatttctgggaggttggtagaatgaaagggatgctccaaggcaagcagatggcctgtccacctcctatatattgacagtgccaatgagtgtagagtcttgttacaagaaacaaagtcatgagaaatgccaggcttcctgttacacccaaagactgctggccctcctactctatcctttagaccagaaactttttcttctaagcacttgcctaccgggaaggttgaggagtcttgttttaccgtacgtagagaatctacccacaggcactgaagcggctgagcaattaggatggacttcccaggaccagcatggcatcaatccagaactattgagcttatttttatccttaccagtagttggcttactccaatcagaggagtaatgcaaattattataagtacatttagaattgttcttttcaggatcaaaaccacatcacttacataagctttgatctaccagggatgttggatgacagttcttgtccacgtctcagattaagaacatcttattttaccttgcagtgaaagtaagtgaacacagtctcctgccccttatgctggagcagtttccgtttctttatgtttctggcccaacactaagcaaaatgtggaaacagcaaattgcacaggttgaacagcttaagaaagaagcatgtagagaaaatcgatcaaagaagaaactccaagatgaaatagaagaagccctaagaaggcatgacctccttactacccttgtcaagaaagaatatgaacataacaagagactgcaagacttcaaggactgcattcgtaggcaaaggttgacccaatcaaagataaaagaaaatcgacagcaaatcgttcgtgctcgaaaatattatgatgattatagagttcagttgtgtgcaaaaatgatgagaatgaggacccgggaagaaatgatatttaagaaactgtttgaagaaggtttaaacattcaaaagcaaagattacgagacctaagaaactatgccaaagaaaagcgagatgaacaaaggagacgccaccaggatgaactggactccatggagaactactataaggaccagttttcattgctggcagaagccatatcacaggaacatcaagaacttaaagccagagagaaatctcaggcccagacattacataaggtgaagagggagctgagatctaagatggagaaggaaattcagcagctgcaggacatgataacacagaatgatgatgatgttttcttccgggaactggaagctgagcgcttcagatctcggcttcagctggcttcctttcagtacagtaaaagtccctccctatgaggccagacttgataatagtaggtgaaggttctggaggcctttaccaggacagagctagaatcgagccagtaaacagtctaagccagaaaaataattttcaaatgctttacctgtattttcattccagtactttttatgattttttaaataaaaattgttttctaaaagcttaaaaaaat

SEQ ID NO: 292437 - DNA, 3544 bp, Homo sapiens
tgacccaaaaacgggatttattgggggcccagtcatcacctggaagtcaaaaggcgttgaagtttcggggggattttcatgatgagcaggaacagggctcattatggcaggactgtggatcggtccttccaggacaccgtcgccttcccggccgcgtcggagtccggcggcgacctgcctctgaaacatggcaggctcggatgctgtctattttgggagaaaaggtaccagacctcatagttattcctaggagtcaagaagatgatgcacacaatgtacaagcagtaattgattcactggccttggactacttgcaggtcagcttgtctcacataacaggagaaaatatagtgaaaggagataaagaatctattaagaatctcctggaaatatttgatggtttgttggagtatcttacagaacgcatcagtgaaacatctcatgagaaaagtgaaactgaacagtattttaaagaatctgatcgaggagaacgtttggaagagccagaaagtactaaagaatctaaatcatcatggaaaagagtttcttttgggaggtgctccttgtcttctgagatgttgggcccctcttgggatggagatgaagcagaatccactggtgaaatcattagacttggagacacagcacacaccttttctctaagaagtaatggtgctcaatgtcctaatgaaatgctgtctaaaaaagccttagcctcaccaagttctaaatcacatgaagatatgttgtaccctcctagtgttttgtccaagagtaggacatcctttgttgaagacacggaaaccctttctgtgagtgggattccaaatgctaggaagctaggggagcctatccgagcagctattcctttacatccaccctaccacccttcagagcctcgagcaccctgccccataggaaaagaatacttgcattcaagtcactgctccccagccgtaaattctactggagagcatacggaattttctggggatctagatgatggacttttcttaatttccaagttgcctaaaggcagcaaatgggaagtatatccagctcaggtccaagggcctaggacaaggaagcctcccaaaggaaaaagaaatgaaaacagagctacagcctcatcctgcaattcacctttcccccagaggccaagaaagagattaacagaacaagaattacatgatgtatcagaaaaactctctcagcggctttctgaactagattggatgttaaaaagtgctctgggtgatcggattaaagaaaagactgaccataaagaagaaaatactggaaatgaggaggtagaggatggaactgaggagacactgtctcagcacagtgatggcatcgtggagtatgggccaaagaagtcaaggccaggactttccatgcgtagaaagccaccctacagatcccattcgctctctccatctccagttaacaaacacaaacagttccacttggagagaaaaaggcagcgcaagccaagagaaacagatgtccgccaattccaagcacaggcgtttactgaagcatttgaaagggaactaagaagacataaagttcaagagaatattggacctctaagaatacatgagaaggaggaggaaacagaaaaaatatacagaggagaagctgttcgtaaaggaactccagaatgtagtcagccctggaagatttactctagaaaaaccacaacgcagagtctaagaggtggcctcccaaagccaaataaagcagttccaagtaagaaccacagaattgtactttatggaaaactggcaacctttgaaagcatgtgcaacattccaaggacacagcactgaaagctaacatccaccagttagccgaagaaagttttttttttttcccaatcactgccatgtggctggttttccgtagagggctaaaactcttcaataaggaagtacttcagggaggcctatatattggcacccaaggaatgccaggactgccacctgctgctccagcgttagcctcactcgtgtgcttactcactttgactgcctttttgtctatttctgggaggttggtagaatgaaagggatgctccaaggcaagcagatggcctgtccacctcctatatattgacagtgccaatgagtgtagagtcttgttacaagaaacaaagtcatgagaaatgccaggcttcctgttacacccaaagactgctggccctcctactctatcctttagaccagaaactttttcttctaagcacttgcctaccgggaaggttgaggagtcttgttttaccgtacgtagagaatctacccacaggcactgaagcggctgagcaattaggatggacttcccaggaccagcatggcatcaatccagaactattgagcttatttttatccttaccagtagttggcttactccaatcagaggagtaatgcaaattattataagtacatttagaattgttcttttcaggatcaaaaccacatcacttacataagctttgatctaccagggatgttggatgacagttcttgtccacgtctcagattaagaacatcttattttaccttgcagtgaaagtaagtgaacacagtctcctgccccttatgctggagcagtttccgtttctttatgtttctggcccaacactaagcaaaatgtggaaacagcaaattgcacaggttgaacagcttaagaaagaagcatgtagagaaaatcgatcaaagaagaaactccaagatgaaatagaagaagccctaagaaggcatgacctccttactacccttgtcaagaaagaatatgaacataacaagagactgcaagacttcaaggactgcattcgtaggcaaaggttgacccaatcaaagataaaagaaaatcgacagcaaatcgttcgtgctcgaaaatattatgatgattatagagttcagttgtgtgcaaaaatgatgagaatgaggacccgggaagaaatgatatttaagaaactgtttgaagaaggtttaaacattcaaaagcaaagattacgagacctaagaaactatgccaaagaaaagcgagatgaacaaaggagacgccaccaggatgaactggactccatggagaactactataaggaccagttttcattgctggcagaagccatatcacaggaacatcaagaacttaaagccagagagaaatctcaggcccagacattacataaggtgaagagggagctgagatctaagatggagaaggaaattcagcagctgcaggacatgataacacagaatgatgatgatgttttcttccgggaactggaagctgagcgcttcagatctcggcttcagctggcttcctttcagtacagtaaaagtccctccctatgaggccagacttgataatagtaggtgaaggttctggaggcctttaccaggacagagctagaatcgagccagtaaacagtctaagccagaaaaataattttcaaatgctttacctgtattttcattccagtactttttatgattttttaaataaaaattgttttctaaaagcttaaaaaaat

SEQ ID NO: 292438 - DNA, 3277 bp, Homo sapiens
tgaaacaattgaaggatatttaatgcaaagttagcatcccacccccttcactcccacaccctagagtcaccagtatttgctgttctcctatacatttaatcgttgacactttatatacagctatttctaccattcatatatcagtgaaaacaaaacataagcagcaagacatgctaagcagcaaaagggagagtcttttcctttttctgcacccagcagctctccaggtcctcaggggaagggccctctggtcaggctgggccctgagtgaaggagggaacttttccaggtgctccttgtcttctgagatgttgggcccctcttgggatggagatgaagcagaatccactggtgaaatcattagacttggagacacagcacacaccttttctctaagaagtaatggtgctcaatgtcctaatgaaatgctgtctaaaaaagccttagcctcaccaagttctaaatcacatgaagatatgttgtaccctcctagtgttttgtccaagagtaggacatcctttgttgaagacacggaaaccctttctgtgagtgggattccaaatgctaggaagctaggggagcctatccgagcagctattcctttacatccaccctaccacccttcagagcctcgagcaccctgccccataggaaaagaatacttgcattcaagtcactgctccccagccgtaaattctactggagagcatacggaattttctggggatctagatgatggacttttcttaatttccaagttgcctaaaggcagcaaatgggaagtatatccagctcaggtccaagggcctaggacaaggaagcctcccaaaggaaaaagaaatgaaaacagagctacagcctcatcctgcaattcacctttcccccagaggccaagaaagagattaacagaacaagaattacatgatgtatcagaaaaactctctcagcggctttctgaactagattggatgttaaaaagtgctctgggtgatcggattaaagaaaagactgaccataaagaagaaaatactggaaatgaggaggtagaggatggaactgaggagacactgtctcagcacagtgatggcatcgtggagtatgggccaaagaagtcaaggccaggactttccatgcgtagaaagccaccctacagatcccattcgctctctccatctccagttaacaaacacaaacagttccacttggagagaaaaaggcagcgcaagccaagagaaacagatgtccgccaattccaagcacaggcgtttactgaagcatttgaaagggaactaagaagacataaagttcaagagaatattggacctctaagaatacatgagaaggaggaggaaacagaaaaaatatacagaggagaagctgttcgtaaaggaactccagaatgtagtcagccctggaagatttactctagaaaaaccacaacgcagagtctaagaggtggcctcccaaagccaaataaagcagttccaagtaagaaccacagaattgtactttatggaaaactggcaacctttgaaagcatgtgcaacattccaaggacacagcactgaaagctaacatccaccagttagccgaagaaagttttttttttttcccaatcactgccatgtggctggttttccgtagagggctaaaactcttcaataaggaagtacttcagggaggcctatatattggcacccaaggaatgccaggactgccacctgctgctccagcgttagcctcactcgtgtgcttactcactttgactgcctttttgtctatttctgggaggttggtagaatgaaagggatgctccaaggcaagcagatggcctgtccacctcctatatattgacagtgccaatgagtgtagagtcttgttacaagaaacaaagtcatgagaaatgccaggcttcctgttacacccaaagactgctggccctcctactctatcctttagaccagaaactttttcttctaagcacttgcctaccgggaaggttgaggagtcttgttttaccgtacgtagagaatctacccacaggcactgaagcggctgagcaattaggatggacttcccaggaccagcatggcatcaatccagaactattgagcttatttttatccttaccagtagttggcttactccaatcagaggagtaatgcaaattattataagtacatttagaattgttcttttcaggatcaaaaccacatcacttacataagctttgatctaccagggatgttggatgacagttcttgtccacgtctcagattaagaacatcttattttaccttgcagtgaaagtaagtgaacacagtctcctgccccttatgctggagcagtttccgtttctttatgtttctggcccaacactaagcaaaatgtggaaacagcaaattgcacaggttgaacagcttaagaaagaagcatgtagagaaaatcgatcaaagaagaaactccaagatgaaatagaagaagccctaagaaggcatgacctccttactacccttgtcaagaaagaatatgaacataacaagagactgcaagacttcaaggactgcattcgtaggcaaaggttgacccaatcaaagataaaagaaaatcgacagcaaatcgttcgtgctcgaaaatattatgatgattatagagttcagttgtgtgcaaaaatgatgagaatgaggacccgggaagaaatgatatttaagaaactgtttgaagaaggtttaaacattcaaaagcaaagattacgagacctaagaaactatgccaaagaaaagcgagatgaacaaaggagacgccaccaggatgaactggactccatggagaactactataaggaccagttttcattgctggcagaagccatatcacaggaacatcaagaacttaaagccagagagaaatctcaggcccagacattacataaggtgaagagggagctgagatctaagatggagaaggaaattcagcagctgcaggacatgataacacagaatgatgatgatgttttcttccgggaactggaagctgagcgcttcagatctcggcttcagctggcttcctttcagtacagtaaaagtccctccctatgaggccagacttgataatagtaggtgaaggttctggaggcctttaccaggacagagctagaatcgagccagtaaacagtctaagccagaaaaataattttcaaatgctttacctgtattttcattccagtactttttatgattttttaaataaaaattgttttctaaaagcttaaaaaaat

SEQ ID NO: 292439 - DNA, 3601 bp, Homo sapiens
tctctaaacttcccaaaccgcccccgtttcacgtcctgtgaaaggaagtgctcctctgatgaccaatcagcggcgagaagctcttttaacgtccgtccttctttcacgcctccttccccgcgctttggttcgtgcgtccgcgccccagtgtcgggtctgcgtggatcggtccttccaggacaccgtcgccttcccggccgcgtcggagtccggcggcgacctgcctctgaaacatggcaggctcggatgctgagtgggtaaccattgccaataaccttctttttaagtgtcatatacatctgagaatacatgaacttcaagactgtgatgctaatgtttttattgctctttatcagtctattttgggagaaaaggtaccagacctcatagttattcctaggagtcaagaagatgatgcacacaatgtacaagcagtaattgattcactggccttggactacttgcaggtcagcttgtctcacataacaggagaaaatatagtgaaaggagataaagaatctattaagaatctcctggaaatatttgatggtttgttggagtatcttacagaacgcatcagtgaaacatctcatgagaaaagtgaaactgaacagtattttaaagaatctgatcgaggagaacgtttggaagagccagaaagtactaaagaatctaaatcatcatggaaaagagtttcttttgggaggtgctccttgtcttctgagatgttgggcccctcttgggatggagatgaagcagaatccactggtgaaatcattagacttggagacacagcacacaccttttctctaagaagtaatggtgctcaatgtcctaatgaaatgctgtctaaaaaagccttagcctcaccaagttctaaatcacatgaagatatgttgtaccctcctagtgttttgtccaagagtaggacatcctttgttgaagacacggaaaccctttctgtgagtgggattccaaatgctaggaagctaggggagcctatccgagcagctattcctttacatccaccctaccacccttcagagcctcgagcaccctgccccataggaaaagaatacttgcattcaagtcactgctccccagccgtaaattctactggagagcatacggaattttctggggatctagatgatggacttttcttaatttccaagttgcctaaaggcagcaaatgggaagtatatccagctcaggtccaagggcctaggacaaggaagcctcccaaaggaaaaagaaatgaaaacagagctacagcctcatcctgcaattcacctttcccccagaggccaagaaagagattaacagaacaagaattacatgatgtatcagaaaaactctctcagcggctttctgaactagattggatgttaaaaagtgctctgggtgatcggattaaagaaaagactgaccataaagaagaaaatactggaaatgaggaggtagaggatggaactgaggagacactgtctcagcacagtgatggcatcgtggagtatgggccaaagaagtcaaggccaggactttccatgcgtagaaagccaccctacagatcccattcgctctctccatctccagttaacaaacacaaacagttccacttggagagaaaaaggcagcgcaagccaagagaaacagatgtccgccaattccaagcacaggaaaaaatatacagaggagaagctgttcgtaaaggaactccagaatgtagtcagccctggaagatttactctagaaaaaccacaacgcagagtctaagaggtggcctcccaaagccaaataaagcagttccaagtaagaaccacagaattgtactttatggaaaactggcaacctttgaaagcatgtgcaacattccaaggacacagcactgaaagctaacatccaccagttagccgaagaaagttttttttttttcccaatcactgccatgtggctggttttccgtagagggctaaaactcttcaataaggaagtacttcagggaggcctatatattggcacccaaggaatgccaggactgccacctgctgctccagcgttagcctcactcgtgtgcttactcactttgactgcctttttgtctatttctgggaggttggtagaatgaaagggatgctccaaggcaagcagatggcctgtccacctcctatatattgacagtgccaatgagtgtagagtcttgttacaagaaacaaagtcatgagaaatgccaggcttcctgttacacccaaagactgctggccctcctactctatcctttagaccagaaactttttcttctaagcacttgcctaccgggaaggttgaggagtcttgttttaccgtacgtagagaatctacccacaggcactgaagcggctgagcaattaggatggacttcccaggaccagcatggcatcaatccagaactattgagcttatttttatccttaccagtagttggcttactccaatcagaggagtaatgcaaattattataagtacatttagaattgttcttttcaggatcaaaaccacatcacttacataagctttgatctaccagggatgttggatgacagttcttgtccacgtctcagattaagaacatcttattttaccttgcagtgaaagtaagtgaacacagtctcctgccccttatgctggagcagtttccgtttctttatgtttctggcccaacactaagcaaaatgtggaaacagcaaattgcacaggttgaacagcttaagaaagaagcatgtagagaaaatcgatcaaagaagaaactccaagatgaaatagaagaagccctaagaaggcatgacctccttactacccttgtcaagaaagaatatgaacataacaagagactgcaagacttcaaggactgcattcgtaggcaaaggttgacccaatcaaagataaaagaaaatcgacagcaaatcgttcgtgctcgaaaatattatgatgattatagagttcagttgtgtgcaaaaatgatgagaatgaggacccgggaagaaatgatatttaagaaactgtttgaagaaggtttaaacattcaaaagcaaagattacgagacctaagaaactatgccaaagaaaagcgagatgaacaaaggagacgccaccaggatgaactggactccatggagaactactataaggaccagttttcattgctggcagaagccatatcacaggaacatcaagaacttaaagccagagagaaatctcaggcccagacattacataaggtgaagagggagctgagatctaagatggagaaggaaattcagcagctgcaggacatgataacacagaatgatgatgatgttttcttccgggaactggaagctgagcgcttcagatctcggcttcagctggcttcctttcagtacagtaaaagtccctccctatgaggccagacttgataatagtaggtgaaggttctggaggcctttaccaggacagagctagaatcgagccagtaaacagtctaagccagaaaaataattttcaaatgctttacctgtattttcattccagtactttttatgattttttaaataaaaattgttttctaaaagcttaaaaaaat

SEQ ID NO: 292440 - DNA, 3102 bp, Homo sapiens
ctttcatggtgtgtgaaagttaagtgctccttgtcttctgagatgttgggcccctcttgggatggagatgaagcagaatccactggtgaaatcattagacttggagacacagcacacaccttttctctaagaagtaatggtcttgctctgtcacccagggtggagtgcggtggcgcaatctcggctcactgcaacctctgcctcagcctctcaagcggctgggattacaagtgctcaatgtcctaatgaaatgctgtctaaaaaagccttagcctcaccaagttctaaatcacatgaagatatgttgtaccctcctagtgttttgtccaagagtaggacatcctttgttgaagacacggaaaccctttctgtgagtgggattccaaatgctaggaagctaggggagcctatccgagcagctattcctttacatccaccctaccacccttcagagcctcgagcaccctgccccataggaaaagaatacttgcattcaagtcactgctccccagccgtaaattctactggagagcatacggaattttctggggatctagatgatggacttttcttaatttccaagttgcctaaaggcagcaaatgggaagtatatccagctcaggtccaagggcctaggacaaggaagcctcccaaaggaaaaagaaatgaaaacagagctacagcctcatcctgcaattcacctttcccccagaggccaagaaagagattaacagaacaagaattacatgatgtatcagaaaaactctctcagcggctttctgaactagattggatgttaaaaagtgctctgggtgatcggattaaagaaaagactgaccataaagaagaaaatactggaaatgaggaggtagaggatggaactgaggagacactgtctcagcacagtgatggcatcgtggagtatgggccaaagaagtcaaggccaggactttccatgcgtagaaagccaccctacagatcccattcgctctctccatctccagttaacaaacacaaacagttccacttggagagaaaaaggcagcgcaagccaagagaaacagatgtccgccaattccaagcacaggcgtttactgaagcatttgaaagggaactaagaagacataaagttcaagagaatattggacctctaagaatacatgagaaggaggaggaaacagaaaaaatatacagaggagaagctgttcgtaaaggaactccagaatgtagtcagccctggaagatttactctagaaaaaccacaacgcagagtctaagaggtggcctcccaaagccaaataaagcagttccaagtaagaaccacagaattgtactttatggaaaactggcaacctttgaaagcatgtgcaacattccaaggacacagcactgaaagctaacatccaccagttagccgaagaaagttttttttttttcccaatcactgccatgtggctggttttccgtagagggctaaaactcttcaataaggaagtacttcagggaggcctatatattggcacccaaggaatgccaggactgccacctgctgctccagcgttagcctcactcgtgtgcttactcactttgactgcctttttgtctatttctgggaggttggtagaatgaaagggatgctccaaggcaagcagatggcctgtccacctcctatatattgacagtgccaatgagtgtagagtcttgttacaagaaacaaagtcatgagaaatgccaggcttcctgttacacccaaagactgctggccctcctactctatcctttagaccagaaactttttcttctaagcacttgcctaccgggaaggttgaggagtcttgttttaccgtacgtagagaatctacccacaggcactgaagcggctgagcaattaggatggacttcccaggaccagcatggcatcaatccagaactattgagcttatttttatccttaccagtagttggcttactccaatcagaggagtaatgcaaattattataagtacatttagaattgttcttttcaggatcaaaaccacatcacttacataagctttgatctaccagggatgttggatgacagttcttgtccacgtctcagattaagaacatcttattttaccttgcagtgaaagtaagtgaacacagtctcctgccccttatgctggagcagtttccgtttctttatgtttctggcccaacactaagcaaaatgtggaaacagcaaattgcacaggttgaacagcttaagaaagaagcatgtagagaaaatcgatcaaagaagaaactccaagatgaaatagaagaagccctaagaaggcatgacctccttactacccttgtcaagaaagaatatgaacataacaagagactgcaagacttcaaggactgcattcgtaggcaaaggttgacccaatcaaagataaaagaaaatcgacagcaaatcgttcgtgctcgaaaatattatgatgattatagagttcagttgtgtgcaaaaatgatgagaatgaggacccgggaagaaatgatatttaagaaactgtttgaagaaggtttaaacattcaaaagcaaagattacgagacctaagaaactatgccaaagaaaagcgagatgaacaaaggagacgccaccaggatgaactggactccatggagaactactataaggaccagttttcattgctggcagaagccatatcacaggaacatcaagaacttaaagccagagagaaatctcaggcccagacattacataaggtgaagagggagctgagatctaagatggagaaggaaattcagcagctgcaggacatgataacacagaatgatgatgatgttttcttccgggaactggaagctgagcgcttcagatctcggcttcagctggcttcctttcagtacagtaaaagtccctccctatgaggccagacttgataatagtaggtgaaggttctggaggcctttaccaggacagagctagaatcgagccagtaaacagtctaagccagaaaaataattttcaaatgctttacctgtattttcattccagtactttttatgattttttaaataaaaattgttttctaaaagcttaaaaaaat

SEQ ID NO: 292441 - DNA, 4616 bp, Homo sapiens
tctctaaacttcccaaaccgcccccgtttcacgtcctgtgaaaggaagtgctcctctgatgaccaatcagcggcgagaagctcttttaacgtccgtccttctttcacgcctccttccccgcgctttggttcgtgcgtccgcgccccagtgtcgggtctgcgtggatcggtccttccaggacaccgtcgccttcccggccgcgtcggagtccggcggcgacctgcctctgaaacatggcaggctcggatgctgagtgggtaaccattgccaataaccttctttttaagtgtcatatacatctgagaatacatgaacttcaagactgtgatgctaatgtttttattgctctttatcagtctattttgggagaaaaggtaccagacctcatagttattcctaggagtcaagaagatgatgcacacaatgtacaagcagtaattgattcactggccttggactacttgcaggtcagcttgtctcacataacaggagaaaatatagtgaaaggagataaagaatctattaagaatctcctggaaatatttgatggtttgttggagtatcttacagaacgcatcagtgaaacatctcatgagaaaagtgaaactgaacagtattttaaagaatctgatcgaggagaacgtttggaagagccagaaagtactaaagaatctaaatcatcatggaaaagagtttcttttgggaggtgctccttgtcttctgagatgttgggcccctcttgggatggagatgaagcagaatccactggtgaaatcattagacttggagacacagcacacaccttttctctaagaagtaatggtgctcaatgtcctaatgaaatgctgtctaaaaaagccttagcctcaccaagttctaaatcacatgaagatatgttgtaccctcctagtgttttgtccaagagtaggacatcctttgttgaagacacggaaaccctttctgtgagtgggattccaaatgctaggaagctaggggagcctatccgagcagctattcctttacatccaccctaccacccttcagagcctcgagcaccctgccccataggaaaagaatacttgcattcaagtcactgctccccagccgtaaattctactggagagcatacggaattttctggggatctagatgatggacttttcttaatttccaagttgcctaaaggcagcaaatgggaagtatatccagctcaggtccaagggcctaggacaaggaagcctcccaaaggaaaaagaaatgaaaacagagctacagcctcatcctgcaattcacctttcccccagaggccaagaaagagattaacagaacaagaattacatgatgtatcagaaaaactctctcagcggctttctgaactagattggatgttaaaaagtgctctgggtgatcggattaaagaaaagactgaccataaagaagaaaatactggaaatgaggaggtagaggatggaactgaggagacactgtctcagcacagtgatggcatcgtggagtatgggccaaagaagtcaaggccaggactttccatgcgtagaaagccaccctacagatcccattcgctctctccatctccagttaacaaacacaaacagttccacttggagagaaaaaggcagcgcaagccaagagaaacagatgtccgccaattccaagcacaggcgtttactgaagcatttgaaagggaactaagaagacataaagttcaagagaatattggacctctaagaatacatgagaaggaggaggaaacagaaaaaatatacagaggagaagctgttcgtaaaggaactccagaatgtagtcagccctggaagatttactctagaaaaaccacaacgcagagtctaagaggtggcctcccaaagccaaataaagcagttccaagtaagaaccacagaattgtactttatggaaaactggcaacctttgaaagcatgtgcaacattccaaggacacagcactgaaagctaacatccaccagttagccgaagaaagttttttttttttcccaatcactgccatgtggctggttttccgtagagggctaaaactcttcaataaggaagtacttcagggaggcctatatattggcacccaaggaatgccaggactgccacctgctgctccagcgttagcctcactcgtgtgcttactcactttgactgcctttttgtctatttctgggaggttggtagaatgaaagggatgctccaaggcaagcagatggcctgtccacctcctatatattgacagtgccaatgagtgtagagtcttgttacaagaaacaaagtcatgagaaatgccaggcttcctgttacacccaaagactgctggccctcctactctatcctttagaccagaaactttttcttctaagcacttgcctaccgggaaggttgaggagtcttgttttaccgtacgtagagaatctacccacaggcactgaagcggctgagcaattaggatggacttcccaggaccagcatggcatcaatccagaactattgagcttatttttatccttaccagtagttggcttactccaatcagaggagtaatgcaaattattataagtacatttagaattgttcttttcaggatcaaaaccacatcacttacataagctttgatctaccagggatgttggatgacagttcttgtccacgtctcagattaagaacatcttattttaccttgcagtgaaagtaagtgaacacagtctcctgccccttatgctggagcagtttccgtttctttatgtttctggcccaacactaagcaaaatgtggaaacagcaaattgcacaggttgaacagcttaagaaagaagcatgtagagaaaatcgatcaaagaagaaactccaagatgaaatagaagaagccctaagaaggcatgacctccttactacccttgtcaagaaagaatatgaacataacaagagactgcaagacttcaaggactgcattcgtaggcaaaggttgacccaatcaaagataaaagaaaatcgacagcaaatcgttcgtgctcgaaaatattatgatgattatagagttcagttgtgtgcaaaaatgatgagaatgaggacccgggaagaaatgatatttaagaaactgtttgaagaaggtttaaacattcaaaagcaaagattacgagacctaagaaactatgccaaagaaaagcgagatgaacaaaggagacgccaccaggatgaactggactccatggagaactactataaggaccagttttcattgctggcagaagccatatcacaggaacatcaagaacttaaagccagagagaaatctcaggcccaggtactaccaactgagcagtcaccacggccggagaaaacgggcaccttccctgctctgcgaggagacagaaagctgagctctgcaacatgacagaggcatcaactcaggatggcatgtgttcttgaacttttcattttgtgactcatgttgtcaccctccatagagccaaccataaatgttttcaaaacgattcattacaaactcaatattctttaaaaacgttgatgctgtgacagtgcaaacagcattgattttattgctcgacttcggcatgggcacatacatagttaatttttaaaaaccatttatacagatgttactgataaagctcatgtaacaaatgaatgaaaatacaaagaatatcaaagctaaaacactctgtaataaatacaaatacaatgaaaatgataaaactttgtttttaaagtcagtctgagagaagaatattacataaagtgaactaattacatctagaaataaaacaactcagcatttggaacaatcatcctaacatgttaaataccacaaatggcacccgttgactgtacgcttagaaaacaagcagaaggagccactctcccaaactaaggatggttggaacagcctctaactcccaacaatccaatcagtccaatgcactggaaattcaaagcccagatttagtgttgtaaagtaaagcgaattacattgtatttgaaagaagagaatcttgtgctccggactgtaaatacatgaaagaaaaaaaggcttggtaaaaaacccattcggggcaacaaactatgtgcaaaacaaaatgtacactatacactatacactatgcactatttaaaaactacaccaagatacaaggccctctgaggcaagacttacctctctgtactgcctatgagctctacaaaggaatctctgttcataactaagcattcatgatggaaaggcaagagtatgaaaacagatatcacatatctgaaataacaatacagctagagggaagacaagaaaaaaccagttaagagggacatggaaataaatattcacattaaacatgaggtgcaagtccatggttcaataatacattgggggtttttgcttagcacctatttggaagtaatcgggtaatgtaactttgaaatggaaatctaaatcatgtttttatatatgttggtgataacatagactgttatggagagtaatttcttttttttttttttttgggcggggacggagtctcactcttgtcgcccaggctggagtgcagtggtgcgatctcggctcact

SEQ ID NO: 292442 - DNA, 2666 bp, Homo sapiens
agtttgagaccagcctgggcaacatggcaaaaccccatctctacaaaaaataaaagattagccaggcttggtggcatatgcctgtaatcccagctactcaagtggttgagatgggaggatcactggaacccagtaggcagaggttacagtgagcccagctagcaccactgcactccagcctgggtgacagagtgagatcctgtctcaaaataaaagtaaataattaaacatgcataagcgtctgaaaacttgttattagtgactgtcaaaggaagcttttttaaaggtctgcctactcctacgaatttacattctgctgaaatcagtgaaagatgttgaaaagaattttctcaatagatgttaaaaagtgctctgggtgatcggattaaagaaaagactgaccataaagaagaaaatactggaaatgaggaggtagaggatggaactgaggagacactgtctcagcacagtgatggcatcgtggagtatgggccaaagaagtcaaggccaggactttccatgcgtagaaagccaccctacagatcccattcgctctctccatctccagttaacaaacacaaacagttccacttggagagaaaaaggcagcgcaagccaagagaaacagatgtccgccaattccaagcacaggcgtttactgaagcatttgaaagggaactaagaagacataaagttcaagagaatattggacctctaagaatacatgagaaggaggaggaaacagaaaaaatatacagaggagaagctgttcgtaaaggaactccagaatgtagtcagccctggaagatttactctagaaaaaccacaacgcagagtctaagaggtggcctcccaaagccaaataaagcagttccaagtaagaaccacagaattgtactttatggaaaactggcaacctttgaaagcatgtgcaacattccaaggacacagcactgaaagctaacatccaccagttagccgaagaaagttttttttttttcccaatcactgccatgtggctggttttccgtagagggctaaaactcttcaataaggaagtacttcagggaggcctatatattggcacccaaggaatgccaggactgccacctgctgctccagcgttagcctcactcgtgtgcttactcactttgactgcctttttgtctatttctgggaggttggtagaatgaaagggatgctccaaggcaagcagatggcctgtccacctcctatatattgacagtgccaatgagtgtagagtcttgttacaagaaacaaagtcatgagaaatgccaggcttcctgttacacccaaagactgctggccctcctactctatcctttagaccagaaactttttcttctaagcacttgcctaccgggaaggttgaggagtcttgttttaccgtacgtagagaatctacccacaggcactgaagcggctgagcaattaggatggacttcccaggaccagcatggcatcaatccagaactattgagcttatttttatccttaccagtagttggcttactccaatcagaggagtaatgcaaattattataagtacatttagaattgttcttttcaggatcaaaaccacatcacttacataagctttgatctaccagggatgttggatgacagttcttgtccacgtctcagattaagaacatcttattttaccttgcagtgaaagtaagtgaacacagtctcctgccccttatgctggagcagtttccgtttctttatgtttctggcccaacactaagcaaaatgtggaaacagcaaattgcacaggttgaacagcttaagaaagaagcatgtagagaaaatcgatcaaagaagaaactccaagatgaaatagaagaagccctaagaaggcatgacctccttactacccttgtcaagaaagaatatgaacataacaagagactgcaagacttcaaggactgcattcgtaggcaaaggttgacccaatcaaagataaaagaaaatcgacagcaaatcgttcgtgctcgaaaatattatgatgattatagagttcagttgtgtgcaaaaatgatgagaatgaggacccgggaagaaatgatatttaagaaactgtttgaagaaggtttaaacattcaaaagcaaagattacgagacctaagaaactatgccaaagaaaagcgagatgaacaaaggagacgccaccaggatgaactggactccatggagaactactataaggaccagttttcattgctggcagaagccatatcacaggaacatcaagaacttaaagccagagagaaatctcaggcccagacattacataaggtgaagagggagctgagatctaagatggagaaggaaattcagcagctgcaggacatgataacacagaatgatgatgatgttttcttccgggaactggaagctgagcgcttcagatctcggcttcagctggcttcctttcagtacagtaaaagtccctccctatgaggccagacttgataatagtaggtgaaggttctggaggcctttaccaggacagagctagaatcgagccagtaaacagtctaagccagaaaaataattttcaaatgctttacctgtattttcattccagtactttttatgattttttaaataaaaattgttttctaaaagcttaaaaaaat

SEQ ID NO: 292443 - DNA, 2515 bp, Homo sapiens
atacgaatcgagccgttacccgatgagtaatctggccgatgagtaaatctggcgatgagtaaatcttggcgatgagtaaatcttggcgatgagtaaatctggcgatgagtaaatctttcccccagaggccaagaaagagattaacagaacaagaattacatgatgtatcagaaaaactctctcagcggctttctgaactagattggatgttaaaaagtgctctgggtgatcggattaaagaaaagactgaccataaagaagaaaatactggaaatgaggaggtagaggatggaactgaggagacactgtctcagcacagtgatggcatcgtggagtatgggccaaagaagtcaaggccaggactttccatgcgtagaaagccaccctacagatcccattcgctctctccatctccagttaacaaacacaaacagttccacttggagagaaaaaggcagcgcaagccaagagaaacagatgtccgccaattccaagcacaggcgtttactgaagcatttgaaagggaactaagaagacataaagttcaagagaatattggacctctaagaatacatgagaaggaggaggaaacagaaaaaatatacagaggagaagctgttcgtaaaggaactccagaatgtagtcagccctggaagatttactctagaaaaaccacaacgcagagtctaagaggtggcctcccaaagccaaataaagcagttccaagtaagaaccacagaattgtactttatggaaaactggcaacctttgaaagcatgtgcaacattccaaggacacagcactgaaagctaacatccaccagttagccgaagaaagttttttttttttcccaatcactgccatgtggctggttttccgtagagggctaaaactcttcaataaggaagtacttcagggaggcctatatattggcacccaaggaatgccaggactgccacctgctgctccagcgttagcctcactcgtgtgcttactcactttgactgcctttttgtctatttctgggaggttggtagaatgaaagggatgctccaaggcaagcagatggcctgtccacctcctatatattgacagtgccaatgagtgtagagtcttgttacaagaaacaaagtcatgagaaatgccaggcttcctgttacacccaaagactgctggccctcctactctatcctttagaccagaaactttttcttctaagcacttgcctaccgggaaggttgaggagtcttgttttaccgtacgtagagaatctacccacaggcactgaagcggctgagcaattaggatggacttcccaggaccagcatggcatcaatccagaactattgagcttatttttatccttaccagtagttggcttactccaatcagaggagtaatgcaaattattataagtacatttagaattgttcttttcaggatcaaaaccacatcacttacataagctttgatctaccagggatgttggatgacagttcttgtccacgtctcagattaagaacatcttattttaccttgcagtgaaagtaagtgaacacagtctcctgccccttatgctggagcagtttccgtttctttatgtttctggcccaacactaagcaaaatgtggaaacagcaaattgcacaggttgaacagcttaagaaagaagcatgtagagaaaatcgatcaaagaagaaactccaagatgaaatagaagaagccctaagaaggcatgacctccttactacccttgtcaagaaagaatatgaacataacaagagactgcaagacttcaaggactgcattcgtaggcaaaggttgacccaatcaaagataaaagaaaatcgacagcaaatcgttcgtgctcgaaaatattatgatgattatagagttcagttgtgtgcaaaaatgatgagaatgaggacccgggaagaaatgatatttaagaaactgtttgaagaaggtttaaacattcaaaagcaaagattacgagacctaagaaactatgccaaagaaaagcgagatgaacaaaggagacgccaccaggatgaactggactccatggagaactactataaggaccagttttcattgctggcagaagccatatcacaggaacatcaagaacttaaagccagagagaaatctcaggcccagacattacataaggtgaagagggagctgagatctaagatggagaaggaaattcagcagctgcaggacatgataacacagaatgatgatgatgttttcttccgggaactggaagctgagcgcttcagatctcggcttcagctggcttcctttcagtacagtaaaagtccctccctatgaggccagacttgataatagtaggtgaaggttctggaggcctttaccaggacagagctagaatcgagccagtaaacagtctaagccagaaaaataattttcaaatgctttacctgtattttcattccagtactttttatgattttttaaataaaaattgttttctaaaagcttaaaaaaat

SEQ ID NO: 292444 - DNA, 5558 bp, Homo sapiens
tctctaaacttcccaaaccgcccccgtttcacgtcctgtgaaaggaagtgctcctctgatgaccaatcagcggcgagaagctcttttaacgtccgtccttctttcacgcctccttccccgcgctttggttcgtgcgtccgcgccccagtgtcgggtctgcgtggatcggtccttccaggacaccgtcgccttcccggccgcgtcggagtccggcggcgacctgcctctgaaacatggcaggctcggatgctgagtgggtaaccattgccaataaccttctttttaagtgtcatatacatctgagaatacatgaacttcaagactgtgatgctaatgtttttattgctctttatcagtctattttgggagaaaaggtaccagacctcatagttattcctaggagtcaagaagatgatgcacacaatgtacaagcagtaattgattcactggccttggactacttgcaggtcagcttgtctcacataacaggagaaaatatagtgaaaggagataaagaatctattaagaatctcctggaaatatttgatggtttgttggagtatcttacagaacgcatcagtgaaacatctcatgagaaaagtgaaactgaacagtattttaaagaatctgatcgaggagaacgtttggaagagccagaaagtactaaagaatctaaatcatcatggaaaagagtttcttttgggaggtgctccttgtcttctgagatgttgggcccctcttgggatggagatgaagcagaatccactggtgaaatcattagacttggagacacagcacacaccttttctctaagaagtaatggtgctcaatgtcctaatgaaatgctgtctaaaaaagccttagcctcaccaagttctaaatcacatgaagatatgttgtaccctcctagtgttttgtccaagagtaggacatcctttgttgaagacacggaaaccctttctgtgagtgggattccaaatgctaggaagctaggggagcctatccgagcagctattcctttacatccaccctaccacccttcagagcctcgagcaccctgccccataggaaaagaatacttgcattcaagtcactgctccccagccgtaaattctactggagagcatacggaattttctggggatctagatgatggacttttcttaatttccaagttgcctaaaggcagcaaatgggaagtatatccagctcaggtccaagggcctaggacaaggaagcctcccaaaggaaaaagaaatgaaaacagagctacagcctcatcctgcaattcacctttcccccagaggccaagaaagagattaacagaacaagaattacatgatgtatcagaaaaactctctcagcggctttctgaactagattggatgttaaaaagtgctctgggtgatcggattaaagaaaagactgaccataaagaagaaaatactggaaatgaggaggtagaggatggaactgaggagacactgtctcagcacagtgatggcatcgtggagtatgggccaaagaagtcaaggccaggactttccatgcgtagaaagccaccctacagatcccattcgctctctccatctccagttaacaaacacaaacagttccacttggagagaaaaaggcagcgcaagccaagagaaacagatgtccgccaattccaagcacaggcgtttactgaagcatttgaaagggaactaagaagacataaagttcaagagaatattggacctctaagaatacatgagaaggaggaggaaacagaaaaaatatacagaggagaagctgttcgtaaaggaactccagaatgtagtcagccctggaagatttactctagaaaaaccacaacgcagagtctaagaggtggcctcccaaagccaaataaagcagttccaagtaagaaccacagaattgtactttatggaaaactggcaacctttgaaagcatgtgcaacattccaaggacacagcactgaaagctaacatccaccagttagccgaagaaagttttttttttttcccaatcactgccatgtggctggttttccgtagagggctaaaactcttcaataaggaagtacttcagggaggcctatatattggcacccaaggaatgccaggactgccacctgctgctccagcgttagcctcactcgtgtgcttactcactttgactgcctttttgtctatttctgggaggttggtagaatgaaagggatgctccaaggcaagcagatggcctgtccacctcctatatattgacagtgccaatgagtgtagagtcttgttacaagaaacaaagtcatgagaaatgccaggcttcctgttacacccaaagactgctggccctcctactctatcctttagaccagaaactttttcttctaagcacttgcctaccgggaaggttgaggagtcttgttttaccgtacgtagagaatctacccacaggcactgaagcggctgagcaattaggatggacttcccaggaccagcatggcatcaatccagaactattgagcttatttttatccttaccagtagttggcttactccaatcagaggagtaatgcaaattattataagtacatttagaattgttcttttcaggatcaaaaccacatcacttacataagctttgatctaccagggatgttggatgacagttcttgtccacgtctcagattaagaacatcttattttaccttgcagtgaaagtaagtgaacacagtctcctgccccttatgctggagcagtttccgtttctttatgtttctggcccaacactaagcaaaatgtggaaacagcaaattgcacaggttgaacagcttaagaaagaagcatgtagagaaaatcgatcaaagaagaaactccaagatgaaatagaagaagccctaagaaggcatgacctccttactacccttgtcaagaaagaatatgaacataacaagagactgcaagacttcaaggactgcattcgtaggcaaaggttgacccaatcaaagataaaagaaaatcgacagcaaatcgttcgtgctcgaaaatattatgatgattatagagttcagttgtgtgcaaaaatgatgagaatgaggacccgggaagaaatggtaagtctgacttttctgtccagccctgttaagaaggtgaactttgttatctttcaggaccaccttctttgttcgtgactcttgtccaaatttgaatccaaaatctaaactgaagtcctatagtgctggccctgagttctgcttggccacacttcattttcttactccattgtgcattcccgtccattctcagtctccgtgtccctcatcttaatgtgaagtcttacttcctccctgcctcctacacataacaggtacttctccagtaaaactactttagaggtttgggaacatgtgagagacaaatttagtgtgataacatgaccttgcattccacataaaatcaggactagtgtccagctgtgctgtgaggggttttccacaaggatgacatttgctatgtcatcctaatcaggctgtgaaatgattaaccttttgagatcccaagctagcaataaatttcatctgtaaaatattttagtaattatagtttactaaagacttggacatatttctagaggaaggctttgaggagagcgtaagtaacttgtctgtagctcatgaatgcgtcgccgtcagaaccagtttttctatccagaatttacactgatgaagggaggacaagtgcgcatatccaagccctttgagcagtgtgttttccggtggcctccccaaatgatcactccccctcctcagtgatgtacatgtgtaggtgtggcatgtttctgctcttggcgttcttaccctatgtacatggctgcttgacactgcttttctgaaggttgtaaagaacctctgtgatacatgaaaagataatgaacaccttcgtcattagggaaatacgactcagaaccacagttagaggacgagtgttggcaaggatgtggagaacttggggctgtaaaatggtgcagctgctttggaaaacaatctagcagttcctcagaaggttaccaaaaggtcatatagagttaccctatgacccagcaatttcactcctagctatataatcacacaaaaaacacaaatgttcatagcattacttataatagcctaaaaggggaaacaacccaaagtgtccatcagttaatgaatggataaagagtgtgcattcattcatacagtaggatgttacttggcaataaaaaggaatgaagtattcatacatactgcagtatagatgaaccttgaaaacatgcggagtgaaagaaaccaaatacgaaaggccacgaattacatgattccatttttaggaagtgtccagaatatgcaaatccatggagacagaaagtacagactggtgactgctaaggatgggacagggggaatgagcactagtcagtatacggtttctttttggggtggtaaaaatgttctgtagtggtgatggttgcacaactgagtataataaaacatactgaattatttattttaaaagggtaaggctggactcagtggctcacgcctgtaatcccagcactttgggaagctgaggtgcaaggattgcttgggaccagcctgggcaacatagtgagacgtcatctctccaaaaaattaaaaatttagccaggcgtggtggcacatgcctatagtcccagctatttgggtagccaaggtgggagaattgcttgagcctgggaggtcaaggctgcagtgagttgtgactgccccactacactccagcctgggtgacagagcaataacctgtctcagaaaaaggaggtacattttatggtatgtcaaaacatctgaataaaactagtatttaaaaaaaaaaaaccttgggaaatacaatcagtatatacctctagttggccaaaatgatattcctcaatgactatttttacgattaaataactgacagatatttaagaaactgtttgaagaaggtttaaacattcaaaagcaaagattacgagacctaagaaactatgccaaagaaaagcgagatgaacaaaggagacgccaccaggatgaactggactccatggagaactactataaggaccagttttcattgctggcagaagccatatcacaggaacatcaagaacttaaagccagagagaaatctcaggcccagacattacataaggtgaagagggagctgagatctaagatggagaaggaaattcagcagctgcaggacatgataacacagaatgatgatgatgttttcttccgggaactggaagctgagcgcttcagatctcggcttcagctggcttcctttcagtacagtaaaagtccctccctatgaggccagacttgataatagtaggtgaaggttctggaggcctttaccaggacagagctagaatcgagccagtaaacagtctaagccagaaaaataattttcaaatgctttacctgtattttcattccagtactttttatgattttttaaataaaaattgttttctaaaagcttaaaaaaat

SEQ ID NO: 292445 - DNA, 4449 bp, Homo sapiens
tctctaaacttcccaaaccgcccccgtttcacgtcctgtgaaaggaagtgctcctctgatgaccaatcagcggcgagaagctcttttaacgtccgtccttctttcacgcctccttccccgcgctttggttcgtgcgtccgcgccccagtgtcgggtctgcgtggatcggtccttccaggacaccgtcgccttcccggccgcgtcggagtccggcggcgacctgcctctgaaacatggcaggctcggatgctgagtgggtaaccattgccaataaccttctttttaagtgtcatatacatctgagaatacatgaacttcaagactgtgatgctaatgtttttattgctctttatcagtctattttgggagaaaaggtaccagacctcatagttattcctaggagtcaagaagatgatgcacacaatgtacaagcagtaattgattcactggccttggactacttgcaggtcagcttgtctcacataacaggagaaaatatagtgaaaggagataaagaatctattaagaatctcctggaaatatttgatggtttgttggagtatcttacagaacgcatcagtgaaacatctcatgagaaaagtgaaactgaacagtattttaaagaatctgatcgaggagaacgtttggaagagccagaaagtactaaagaatctaaatcatcatggaaaagagtttcttttgggaggtgctccttgtcttctgagatgttgggcccctcttgggatggagatgaagcagaatccactggtgaaatcattagacttggagacacagcacacaccttttctctaagaagtaatggtgctcaatgtcctaatgaaatgctgtctaaaaaagccttagcctcaccaagttctaaatcacatgaagatatgttgtaccctcctagtgttttgtccaagagtaggacatcctttgttgaagacacggaaaccctttctgtgagtgggattccaaatgctaggaagctaggggagcctatccgagcagctattcctttacatccaccctaccacccttcagagcctcgagcaccctgccccataggaaaagaatacttgcattcaagtcactgctccccagccgtaaattctactggagagcatacggaattttctggggatctagatgatggacttttcttaatttccaagttgcctaaaggcagcaaatgggaagtatatccagctcaggtccaagggcctaggacaaggaagcctcccaaaggaaaaagaaatgaaaacagagctacagcctcatcctgcaattcacctttcccccagaggccaagaaagagattaacagaacaagaattacatgatgtatcagaaaaactctctcagcggctttctgaactagattggatgttaaaaagtgctctgggtgatcggattaaagaaaagactgaccataaagaagaaaatactggaaatgaggaggtagaggatggaactgaggagacactgtctcagcacagtgatggcatcgtggagtatgggccaaagaagtcaaggccaggactttccatgcgtagaaagccaccctacagatcccattcgctctctccatctccagttaacaaacacaaacagttccacttggagagaaaaaggcagcgcaagccaagagaaacagatgtccgccaattccaagcacaggcgtttactgaagcatttgaaagggaactaagaagacataaagttcaagagaatattggacctctaagaatacatgagaaggaggaggaaacagaaaaaatatacagaggagaagctgttcgtaaaggaactccagaatgtagtcagccctggaagatttactctagaaaaaccacaacgcagagtctaagaggtggcctcccaaagccaaataaagcagttccaagtaagaaccacagaattgtactttatggaaaactggcaacctttgaaagcatgtgcaacattccaaggacacagcactgaaagctaacatccaccagttagccgaagaaagttttttttttttcccaatcactgccatgtggctggttttccgtagagggctaaaactcttcaataaggaagtacttcagggaggcctatatattggcacccaaggaatgccaggactgccacctgctgctccagcgttagcctcactcgtgtgcttactcactttgactgcctttttgtctatttctgggaggttggtagaatgaaagggatgctccaaggcaagcagatggcctgtccacctcctatatattgacagtgccaatgagtgtagagtcttgttacaagaaacaaagtcatgagaaatgccaggcttcctgttacacccaaagactgctggccctcctactctatcctttagaccagaaactttttcttctaagcacttgcctaccgggaaggttgaggagtcttgttttaccgtacgtagagaatctacccacaggcactgaagcggctgagcaattaggatggacttcccaggaccagcatggcatcaatccagaactattgagcttatttttatccttaccagtagttggcttactccaatcagaggagtaatgcaaattattataagtacatttagaattgttcttttcaggatcaaaaccacatcacttacataagctttgatctaccagggatgttggatgacagttcttgtccacgtctcagattaagaacatcttattttaccttgcagtgaaagtaagtgaacacagtctcctgccccttatgctggagcagtttccgtttctttatgtttctggcccaacactaagcaaaatgtggaaacagcaaattgcacaggttgaacagcttaagaaagaagcatgtagagaaaatcgatcaaagaagaaactccaagatgaaatagaagaagccctaagaaggcatgacctccttactacccttgtcaagaaagaatatgaacataacaagagactgcaagacttcaaggactgcattcgtaggcaaaggttgacccaatcaaagataaaagaaaatcgacagcaaatcgttcgtgctcgaaaatattatgatgattatagagttcagttgtgtgcaaaaatgatgagaatgaggacccgggaagaaatgatatttaagaaactgtttgaagaaggtttaaacattcaaaagcaaagattacgagacctaagaaactatgccaaagaaaagcgagatgaacaaaggagacgccaccaggatgaactggactccatggagaactactataaggaccagttttcattgctggcagaagccatatcacaggaacatcaagaacttaaagccagagagaaatctcaggcccaggtactaccaactgagcagtcaccacggccggagaaaacgggcaccttccctgctctgcgaggagacagaaagctgagctctgcaacatgacagaggcatcaactcaggatggcatgtgttcttgaacttttcattttgtgactcatgttgtcaccctccatagagccaaccataaatgttttcaaaacgattcattacaaactcaatattctttaaaaacgttgatgctgtgacagtgcaaacagcattgattttattgctcgacttcggcatgggcacatacatagttaatttttaaaaaccatttatacagatgttactgataaagctcatgtaacaaatgaatgaaaatacaaagaatatcaaagctaaaacactctgtaataaatacaaatacaatgaaaatgataaaactttgtttttaaagtcagtctgagagaagaatattacataaagtgaactaattacatctagaaataaaacaactcagcatttggaacaatcatcctaacatgttaaataccacaaatggcacccgttgactgtacgcttagaaaacaagcagaaggagccactctcccaaactaaggatggttggaacagcctctaactcccaacaatccaatcagtccaatgcactggaaattcaaagcccagatttagtgttgtaaagtaaagcgaattacattgtatttgaaagaagagaatcttgtgctccggactgtaaatacatgaaagaaaaaaaggcttggtaaaaaacccattcggggcaacaaactatgtgcaaaacaaaatgtacactatacactatacactatgcactatttaaaaactacaccaagatacaaggccctctgaggcaagacttacctctctgtactgcctatgagctctacaaaggaatctctgttcataactaagcattcatgatggaaaggcaagagtatgaaaacagatatcacatatctgaaataacaatacagctagagggaagacaagaaaaaaccagttaagagggacatggaaataaatattcacattaaacatgaggtgcaagtccatggttcaataatacattggggggtgccgatgaataggggatcctctaagt

SEQ ID NO: 292446 - DNA, 4351 bp, Homo sapiens
tctctaaacttcccaaaccgcccccgtttcacgtcctgtgaaaggaagtgctcctctgatgaccaatcagcggcgagaagctcttttaacgtccgtccttctttcacgcctccttccccgcgctttggttcgtgcgtccgcgccccagtgtcgggtctgcgtggatcggtccttccaggacaccgtcgccttcccggccgcgtcggagtccggcggcgacctgcctctgaaacatggcaggctcggatgctgagtgggtaaccattgccaataaccttctttttaagtgtcatatacatctgagaatacatgaacttcaagactgtgatgctaatgtttttattgctctttatcagtctattttgggagaaaaggtaccagacctcatagttattcctaggagtcaagaagatgatgcacacaatgtacaagcagtaattgattcactggccttggactacttgcaggtcagcttgtctcacataacaggagaaaatatagtgaaaggagataaagaatctattaagaatctcctggaaatatttgatggtttgttggagtatcttacagaacgcatcagtgaaacatctcatgagaaaagtgaaactgaacagtattttaaagaatctgatcgaggagaacgtttggaagagccagaaagtactaaagaatctaaatcatcatggaaaagagtttcttttgggaggtgctccttgtcttctgagatgttgggcccctcttgggatggagatgaagcagaatccactggtgaaatcattagacttggagacacagcacacaccttttctctaagaagtaatggtgctcaatgtcctaatgaaatgctgtctaaaaaagccttagcctcaccaagttctaaatcacatgaagatatgttgtaccctcctagtgttttgtccaagagtaggacatcctttgttgaagacacggaaaccctttctgtgagtgggattccaaatgctaggaagctaggggagcctatccgagcagctattcctttacatccaccctaccacccttcagagcctcgagcaccctgccccataggaaaagaatacttgcattcaagtcactgctccccagccgtaaattctactggagagcatacggaattttctggggatctagatgatggacttttcttaatttccaagttgcctaaaggcagcaaatgggaagtatatccagctcaggtccaagggcctaggacaaggaagcctcccaaaggaaaaagaaatgaaaacagagctacagcctcatcctgcaattcacctttcccccagaggccaagaaagagattaacagaacaagaattacatgatgtatcagaaaaactctctcagcggctttctgaactagattggatgttaaaaagtgctctgggtgatcggattaaagaaaagactgaccataaagaagaaaatactggaaatgaggaggtagaggatggaactgaggagacactgtctcagcacagtgatggcatcgtggagtatgggccaaagaagtcaaggccaggactttccatgcgtagaaagccaccctacagatcccattcgctctctccatctccagttaacaaacacaaacagttccacttggagagaaaaaggcagcgcaagccaagagaaacagatgtccgccaattccaagcacaggcgtttactgaagcatttgaaagggaactaagaagacataaagttcaagagaatattggacctctaagaatacatgagaaggaggaggaaacagaaaaaatatacagaggagaagctgttcgtaaaggaactccagaatgtagtcagccctggaagatttactctagaaaaaccacaacgcagagtctaagaggtggcctcccaaagccaaataaagcagttccaagtaagaaccacagaattgtactttatggaaaactggcaacctttgaaagcatgtgcaacattccaaggacacagcactgaaagctaacatccaccagttagccgaagaaagttttttttttttcccaatcactgccatgtggctggttttccgtagagggctaaaactcttcaataaggaagtacttcagggaggcctatatattggcacccaaggaatgccaggactgccacctgctgctccagcgttagcctcactcgtgtgcttactcactttgactgcctttttgtctatttctgggaggttggtagaatgaaagggatgctccaaggcaagcagatggcctgtccacctcctatatattgacagtgccaatgagtgtagagtcttgttacaagaaacaaagtcatgagaaatgccaggcttcctgttacacccaaagactgctggccctcctactctatcctttagaccagaaactttttcttctaagcacttgcctaccgggaaggttgaggagtcttgttttaccgtacgtagagaatctacccacaggcactgaagcggctgagcaattaggatggacttcccaggaccagcatggcatcaatccagaactattgagcttatttttatccttaccagtagttggcttactccaatcagaggagtaatgcaaattattataagtacatttagaattgttcttttcaggatcaaaaccacatcacttacataagctttgatctaccagggatgttggatgacagttcttgtccacgtctcagattaagaacatcttattttaccttgcagtgaaagtaagtgaacacagtctcctgccccttatgctggagcagtttccgtttctttatgtttctggcccaacactaagcaaaatgtggaaacagcaaattgcacaggttgaacagcttaagaaagaagcatgtagagaaaatcgatcaaagaagaaactccaagatgaaatagaagaagccctaagaaggcatgacctccttactacccttgtcaagaaagaatatgaacataacaagagactgcaagacttcaaggactgcattcgtaggcaaaggttgacccaatcaaagataaaagaaaatcgacagcaaatcgttcgtgctcgaaaatattatgatgattatagagttcagttgtgtgcaaaaatgatgagaatgaggacccgggaagaaatgatatttaagaaactgtttgaagaaggtttaaacattcaaaagcaaagattacgagacctaagaaactatgccaaagaaaagcgagatgaacaaaggagacgccaccaggatgaactggactccatggagaactactataaggaccagttttcattgctggcagaagccatatcacaggaacatcaagaacttaaagccagagagaaatctcaggcccaggtactaccaactgagcagtcaccacggccggagaaaacgggcaccttccctgctctgcgaggagacagaaagctgagctctgcaacatgacagaggcatcaactcaggatggcatgtgttcttgaacttttcattttgtgactcatgttgtcaccctccatagagccaaccataaatgttttcaaaacgattcattacaaactcaatattctttaaaaacgttgatgctgtgacagtgcaaacagcattgattttattgctcgacttcggcatgggcacatacatagttaatttttaaaaaccatttatacagatgttactgataaagctcatgtaacaaatgaatgaaaatacaaagaatatcaaagctaaaacactctgtaataaatacaaatacaatgaaaatgataaaactttgtttttaaagtcagtctgagagaagaatattacataaagtgaactaattacatctagaaataaaacaactcagcatttggaacaatcatcctaacatgttaaataccacaaatggcacccgttgactgtacgcttagaaaacaagcagaaggagccactctcccaaactaaggatggttggaacagcctctaactcccaacaatccaatcagtccaatgcactggaaattcaaagcccagatttagtgttgtaaagtaaagcgaattacattgtatttgaaagaagagaatcttgtgctccggactgtaaatacatgaaagaaaaaaaggcttggtaaaaaacccattcggggcaacaaactatgtgcaaaacaaaatgtacactatacactatacactatgcactatttaaaaactacaccaagatacaaggccctctgaggcaagacttacctctctgtactgcctatgagctctacaaaggaatctctgttcataactaagcattcatgatggaaaggcaagagtatgaaaacagatatcacatatctgaaataacaatacagcgtgtagcaattgtaccgggatactcaaga

SEQ ID NO: 292447 - DNA, 4887 bp, Homo sapiens
tctctaaacttcccaaaccgcccccgtttcacgtcctgtgaaaggaagtgctcctctgatgaccaatcagcggcgagaagctcttttaacgtccgtccttctttcacgcctccttccccgcgctttggttcgtgcgtccgcgccccagtgtcgggtctgcgtggatcggtccttccaggacaccgtcgccttcccggccgcgtcggagtccggcggcgacctgcctctgaaacatggcaggctcggatgctgagtgggtaaccattgccaataaccttctttttaagtgtcatatacatctgagaatacatgaacttcaagactgtgatgctaatgtttttattgctctttatcagtctattttgggagaaaaggtaccagacctcatagttattcctaggagtcaagaagatgatgcacacaatgtacaagcagtaattgattcactggccttggactacttgcaggtcagcttgtctcacataacaggagaaaatatagtgaaaggagataaagaatctattaagaatctcctggaaatatttgatggtttgttggagtatcttacagaacgcatcagtgaaacatctcatgagaaaagtgaaactgaacagtattttaaagaatctgatcgaggagaacgtttggaagagccagaaagtactaaagaatctaaatcatcatggaaaagagtttcttttgggaggtgctccttgtcttctgagatgttgggcccctcttgggatggagatgaagcagaatccactggtgaaatcattagacttggagacacagcacacaccttttctctaagaagtaatggtgctcaatgtcctaatgaaatgctgtctaaaaaagccttagcctcaccaagttctaaatcacatgaagatatgttgtaccctcctagtgttttgtccaagagtaggacatcctttgttgaagacacggaaaccctttctgtgagtgggattccaaatgctaggaagctaggggagcctatccgagcagctattcctttacatccaccctaccacccttcagagcctcgagcaccctgccccataggaaaagaatacttgcattcaagtcactgctccccagccgtaaattctactggagagcatacggaattttctggggatctagatgatggacttttcttaatttccaagttgcctaaaggcagcaaatgggaagtatatccagctcaggtccaagggcctaggacaaggaagcctcccaaaggaaaaagaaatgaaaacagagctacagcctcatcctgcaattcacctttcccccagaggccaagaaagagattaacagaacaagaattacatgatgtatcagaaaaactctctcagcggctttctgaactagattggatgttaaaaagtgctctgggtgatcggattaaagaaaagactgaccataaagaagaaaatactggaaatgaggaggtagaggatggaactgaggagacactgtctcagcacagtgatggcatcgtggagtatgggccaaagaagtcaaggccaggactttccatgcgtagaaagccaccctacagatcccattcgctctctccatctccagttaacaaacacaaacagttccacttggagagaaaaaggcagcgcaagccaagagaaacagatgtccgccaattccaagcacaggcgtttactgaagcatttgaaagggaactaagaagacataaagttcaagagaatattggacctctaagaatacatgagaaggaggaggaaacagaaaaaatatacagaggagaagctgttcgtaaaggaactccagaatgtagtcagccctggaagatttactctagaaaaaccacaacgcagagtctaagaggtggcctcccaaagccaaataaagcagttccaagtaagaaccacagaattgtactttatggaaaactggcaacctttgaaagcatgtgcaacattccaaggacacagcactgaaagctaacatccaccagttagccgaagaaagttttttttttttcccaatcactgccatgtggctggttttccgtagagggctaaaactcttcaataaggaagtacttcagggaggcctatatattggcacccaaggaatgccaggactgccacctgctgctccagcgttagcctcactcgtgtgcttactcactttgactgcctttttgtctatttctgggaggttggtagaatgaaagggatgctccaaggcaagcagatggcctgtccacctcctatatattgacagtgccaatgagtgtagagtcttgttacaagaaacaaagtcatgagaaatgccaggcttcctgttacacccaaagactgctggccctcctactctatcctttagaccagaaactttttcttctaagcacttgcctaccgggaaggttgaggagtcttgttttaccgtacgtagagaatctacccacaggcactgaagcggctgagcaattaggatggacttcccaggaccagcatggcatcaatccagaactattgagcttatttttatccttaccagtagttggcttactccaatcagaggagtaatgcaaattattataagtacatttagaattgttcttttcaggatcaaaaccacatcacttacataagctttgatctaccagggatgttggatgacagttcttgtccacgtctcagattaagaacatcttattttaccttgcagtgaaagtaagtgaacacagtctcctgccccttatgctggagcagtttccgtttctttatgtttctggcccaacactaagcaaaatgtggaaacagcaaattgcacaggttgaacagcttaagaaagaagcatgtagagaaaatcgatcaaagaagaaactccaagatgaaatagaagaagccctaagaaggcatgacctccttactacccttgtcaagaaagaatatgaacataacaagagactgcaagacttcaaggactgcattcgtaggcaaaggttgacccaatcaaagataaaagaaaatcgacagcaaatcgttcgtgctcgaaaatattatgatgattatagagttcagttgtgtgcaaaaatgatgagaatgaggacccgggaagaaatggtaagtctgacttttctgtccagccctgttaagaaggtgaactttgttatctttcaggaccaccttctttgttcgtgactcttgtccaaatttgaatccaaaatctaaactgaagtcctatagtgctggccctgagttctgcttggccacacttcattttcttactccattgtgcattcccgtccattctcagtctccgtgtccctcatcttaatgtgaagtcttacttcctccctgcctcctacacataacaggtacttctccagtaaaactactttagaggtttgggaacatgtgagagacaaatttagtgtgataacatgaccttgcattccacataaaatcaggactagtgtccagctgtgctgtgaggggttttccacaaggatgacatttgctatgtcatcctaatcaggctgtgaaatgattaaccttttgagatcccaagctagcaataaatttcatctgtaaaatattttagtaattatagtttactaaagacttggacatatttctagaggaaggctttgaggagagcgtaagtaacttgtctgtagctcatgaatgcgtcgccgtcagaaccagtttttctatccagaatttacactgatgaagggaggacaagtgcgcatatccaagccctttgagcagtgtgttttccggtggcctccccaaatgatcactccccctcctcagtgatgtacatgtgtaggtgtggcatgtttctgctcttggcgttcttaccctatgtacatggctgcttgacactgcttttctgaaggttgtaaagaacctctgtgatacatgaaaagataatgaacaccttcgtcattagggaaatacgactcagaaccacagttagaggacgagtgttggcaaggatgtggagaacttggggctgtaaaatggtgcagctgctttggaaaacaatctagcagttcctcagaaggttaccaaaaggtcatatagagttaccctatgacccagcaatttcactcctagctatataatcacacaaaaaacacaaatgttcatagcattacttataatagcctaaaaggggaaacaacccaaagtgtccatcagttaatgaatggataaagagtgtgcattcattcatacagtaggatgttacttggcaataaaaaggaatgaagtattcatacatactgcagtatagatgaaccttgaaaacatgcggagtgaaagaaaccaaatacgaaaggccacgaattacatgattccatttttaggaagtgtccagaatatgcaaatccatggagacagaaagtacagactggtgactgctaaggatgggacagggggaatgagcactagtcagtatacggtttctttttggggtggtaaaaatgttctgtagtggtgatggttgcacaactgagtataataaaacatactgaattatttattttaaaagggtaaggctggactcagtggctcacgcctgtaatcccagcactttgggaagctgaggtgcaaggattgcttgggaccagcctgggcaacatagtgagacgtcatctctccaaaaaattaaaaatttagccaggcgtggtggcacatgcctatagtcccagctatttgggtagccaaggtgggagaattgcttgagcctgggaggtcaaggctgcagtgagttgtgactgccccactacactccagcctgggtgacagagcaataacctgtctcagaaaaaggaggtacattttatggtatgtcaaaacatctgaataaaactagtattta

SEQ ID NO: 292448 - DNA, 4184 bp, Homo sapiens
tctctaaacttcccaaaccgcccccgtttcacgtcctgtgaaaggaagtgctcctctgatgaccaatcagcggcgagaagctcttttaacgtccgtccttctttcacgcctccttccccgcgctttggttcgtgcgtccgcgccccagtgtcgggtctgcgtggatcggtccttccaggacaccgtcgccttcccggccgcgtcggagtccggcggcgacctgcctctgaaacatggcaggctcggatgctgagtgggtaaccattgccaataaccttctttttaagtgtcatatacatctgagaatacatgaacttcaagactgtgatgctaatgtttttattgctctttatcagtctattttgggagaaaaggtaccagacctcatagttattcctaggagtcaagaagatgatgcacacaatgtacaagcagtaattgattcactggccttggactacttgcaggtcagcttgtctcacataacaggagaaaatatagtgaaaggagataaagaatctattaagaatctcctggaaatatttgatggtttgttggagtatcttacagaacgcatcagtgaaacatctcatgagaaaagtgaaactgaacagtattttaaagaatctgatcgaggagaacgtttggaagagccagaaagtactaaagaatctaaatcatcatggaaaagagtttcttttgggaggtgctccttgtcttctgagatgttgggcccctcttgggatggagatgaagcagaatccactggtgaaatcattagacttggagacacagcacacaccttttctctaagaagtaatggtgctcaatgtcctaatgaaatgctgtctaaaaaagccttagcctcaccaagttctaaatcacatgaagatatgttgtaccctcctagtgttttgtccaagagtaggacatcctttgttgaagacacggaaaccctttctgtgagtgggattccaaatgctaggaagctaggggagcctatccgagcagctattcctttacatccaccctaccacccttcagagcctcgagcaccctgccccataggaaaagaatacttgcattcaagtcactgctccccagccgtaaattctactggagagcatacggaattttctggggatctagatgatggacttttcttaatttccaagttgcctaaaggcagcaaatgggaagtatatccagctcaggtccaagggcctaggacaaggaagcctcccaaaggaaaaagaaatgaaaacagagctacagcctcatcctgcaattcacctttcccccagaggccaagaaagagattaacagaacaagaattacatgatgtatcagaaaaactctctcagcggctttctgaactagattggatgttaaaaagtgctctgggtgatcggattaaagaaaagactgaccataaagaagaaaatactggaaatgaggaggtagaggatggaactgaggagacactgtctcagcacagtgatggcatcgtggagtatgggccaaagaagtcaaggccaggactttccatgcgtagaaagccaccctacagatcccattcgctctctccatctccagttaacaaacacaaacagttccacttggagagaaaaaggcagcgcaagccaagagaaacagatgtccgccaattccaagcacaggcgtttactgaagcatttgaaagggaactaagaagacataaagttcaagagaatattggacctctaagaatacatgagaaggaggaggaaacagaaaaaatatacagaggagaagctgttcgtaaaggaactccagaatgtagtcagccctggaagatttactctagaaaaaccacaacgcagagtctaagaggtggcctcccaaagccaaataaagcagttccaagtaagaaccacagaattgtactttatggaaaactggcaacctttgaaagcatgtgcaacattccaaggacacagcactgaaagctaacatccaccagttagccgaagaaagttttttttttttcccaatcactgccatgtggctggttttccgtagagggctaaaactcttcaataaggaagtacttcagggaggcctatatattggcacccaaggaatgccaggactgccacctgctgctccagcgttagcctcactcgtgtgcttactcactttgactgcctttttgtctatttctgggaggttggtagaatgaaagggatgctccaaggcaagcagatggcctgtccacctcctatatattgacagtgccaatgagtgtagagtcttgttacaagaaacaaagtcatgagaaatgccaggcttcctgttacacccaaagactgctggccctcctactctatcctttagaccagaaactttttcttctaagcacttgcctaccgggaaggttgaggagtcttgttttaccgtacgtagagaatctacccacaggcactgaagcggctgagcaattaggatggacttcccaggaccagcatggcatcaatccagaactattgagcttatttttatccttaccagtagttggcttactccaatcagaggagtaatgcaaattattataagtacatttagaattgttcttttcaggatcaaaaccacatcacttacataagctttgatctaccagggatgttggatgacagttcttgtccacgtctcagattaagaacatcttattttaccttgcagtgaaagtaagtgaacacagtctcctgccccttatgctggagcagtttccgtttctttatgtttctggcccaacactaagcaaaatgtggaaacagcaaattgcacaggttgaacagcttaagaaagaagcatgtagagaaaatcgatcaaagaagaaactccaagatgaaatagaagaagccctaagaaggcatgacctccttactacccttgtcaagaaagaatatgaacataacaagagactgcaagacttcaaggactgcattcgtaggcaaaggttgacccaatcaaagataaaagaaaatcgacagcaaatcgttcgtgctcgaaaatattatgatgattatagagttcagttgtgtgcaaaaatgatgagaatgaggacccgggaagaaatgatatttaagaaactgtttgaagaaggtttaaacattcaaaagcaaagattacgagacctaagaaactatgccaaagaaaagcgagatgaacaaaggagacgccaccaggatgaactggactccatggagaactactataaggaccagttttcattgctggcagaagccatatcacaggaacatcaagaacttaaagccagagagaaatctcaggcccaggtaataattaagatagaagccaagtcatgcactgcatggcaatgtttctttcagcaagggacctcgtacattggtggttggagcaataggctgtatcatatagccccggtgtgcagtggactgtactctctaggtttgtgtaagtacactgacattttgcacaacaacaaaatcatttaatgatgcatttcttggaacatatctccatcattaagtgacacatgactaatttacatttttaggaagtagaaaaccaaatgtattatacctgtaaagggaatggagagaagactaataaggcaatccatctatgacccaagacatttttatcctatgattttaactttagttaggtctctgtaagagctgctgttgctagattattgaaaattttggaggagtttgattagctggaagatggagagggaacaatagatgagggcctggataaatgctgtgaacagcgggatgacatgccttcttttttcagacattacataaggtgaagagggagctgagatctaagatggagaaggaaattcagcagctgcaggacatgataacacagaatgatgatgatgttttcttccgggaactggaagctgagcgcttcagatctcggcttcagctggcttcctttcagtacagtaaaagtccctccctatgaggccagacttgataatagtaggtgaaggttctggaggcctttaccaggacagagctagaatcgagccagtaaacagtctaagccagaaaaataattttcaaatgctttacctgtattttcattccagtactttttatgattttttaaataaaaattgttttctaaaagcttaaaaaaat

SEQ ID NO: 292449 - DNA, 783 bp, Homo sapiens
tggctgctgttcggagtgtccgggacggcagtgaatccaggatcatggtcgatagcagtacgcgaggtagtcgcatgaggggagtgagttgacccaatcaaagataaaagaaaatcgacagcaaatcgttcgtgctcgaaaatattatgatgattatagagttcagttgtgtgcaaaaatgatgagaatgaggacccgggaagaaatgatatttaagaaactgtttgaagaaggtttaaacattcaaaagcaaagattacgagacctaagaaactatgccaaagaaaagcgagatgaacaaaggagacgccaccaggatgaactggactccatggagaactactataaggaccagttttcattgctggcagaagccatatcacaggaacatcaagaacttaaagccagagagaaatctcaggcccagacattacataaggtgaagagggagctgagatctaagatggagaaggaaattcagcagctgcaggacatgataacacagaatgatgatgatgttttcttccgggaactggaagctgagcgcttcagatctcggcttcagctggcttcctttcagtacagtaaaagtccctccctatgaggccagacttgataatagtaggtgaaggttctggaggcctttaccaggacagagctagaatcgagccagtaaacagtctaagccagaaaaataattttcaaatgctttacctgtattttcattccagtactttttatgattttttaaataaaaattgttttctaaaagcttaaaaaaat

SEQ ID NO: 292450 - DNA, 3774 bp, Homo sapiens
  misc_feature (3724)..(3724): n is a, c, g, or t
tctctaaacttcccaaaccgcccccgtttcacgtcctgtgaaaggaagtgctcctctgatgaccaatcagcggcgagaagctcttttaacgtccgtccttctttcacgcctccttccccgcgctttggttcgtgcgtccgcgccccagtgtcgggtctgcgtggatcggtccttccaggacaccgtcgccttcccggccgcgtcggagtccggcggcgacctgcctctgaaacatggcaggctcggatgctgagtgggtaaccattgccaataaccttctttttaagtgtcatatacatctgagaatacatgaacttcaagactgtgatgctaatgtttttattgctctttatcagtctattttgggagaaaaggtaccagacctcatagttattcctaggagtcaagaagatgatgcacacaatgtacaagcagtaattgattcactggccttggactacttgcaggtcagcttgtctcacataacaggagaaaatatagtgaaaggagataaagaatctattaagaatctcctggaaatatttgatggtttgttggagtatcttacagaacgcatcagtgaaacatctcatgagaaaagtgaaactgaacagtattttaaagaatctgatcgaggagaacgtttggaagagccagaaagtactaaagaatctaaatcatcatggaaaagagtttcttttgggaggtgctccttgtcttctgagatgttgggcccctcttgggatggagatgaagcagaatccactggtgaaatcattagacttggagacacagcacacaccttttctctaagaagtaatggtgctcaatgtcctaatgaaatgctgtctaaaaaagccttagcctcaccaagttctaaatcacatgaagatatgttgtaccctcctagtgttttgtccaagagtaggacatcctttgttgaagacacggaaaccctttctgtgagtgggattccaaatgctaggaagctaggggagcctatccgagcagctattcctttacatccaccctaccacccttcagagcctcgagcaccctgccccataggaaaagaatacttgcattcaagtcactgctccccagccgtaaattctactggagagcatacggaattttctggggatctagatgatggacttttcttaatttccaagttgcctaaaggcagcaaatgggaagtatatccagctcaggtccaagggcctaggacaaggaagcctcccaaaggaaaaagaaatgaaaacagagctacagcctcatcctgcaattcacctttcccccagaggccaagaaagagattaacagaacaagaattacatgatgtatcagaaaaactctctcagcggctttctgaactagattggatgttaaaaagtgctctgggtgatcggattaaagaaaagactgaccataaagaagaaaatactggaaatgaggaggtagaggatggaactgaggagacactgtctcagcacagtgatggcatcgtggagtatgggccaaagaagtcaaggccaggactttccatgcgtagaaagccaccctacagatcccattcgctctctccatctccagttaacaaacacaaacagttccacttggagagaaaaaggcagcgcaagccaagagaaacagatgtccgccaattccaagcacaggcgtttactgaagcatttgaaagggaactaagaagacataaagttcaagagaatattggacctctaagaatacatgagaaggaggaggaaacagaaaaaatatacagaggagaagctgttcgtaaaggaactccagaatgtagtcagccctggaagatttactctagaaaaaccacaacgcagagtctaagaggtggcctcccaaagccaaataaagcagttccaagtaagaaccacagaattgtactttatggaaaactggcaacctttgaaagcatgtgcaacattccaaggacacagcactgaaagctaacatccaccagttagccgaagaaagttttttttttttcccaatcactgccatgtggctggttttccgtagagggctaaaactcttcaataaggaagtacttcagggaggcctatatattggcacccaaggaatgccaggactgccacctgctgctccagcgttagcctcactcgtgtgcttactcactttgactgcctttttgtctatttctgggaggttggtagaatgaaagggatgctccaaggcaagcagatggcctgtccacctcctatatattgacagtgccaatgagtgtagagtcttgttacaagaaacaaagtcatgagaaatgccaggcttcctgttacacccaaagactgctggccctcctactctatcctttagaccagaaactttttcttctaagcacttgcctaccgggaaggttgaggagtcttgttttaccgtacgtagagaatctacccacaggcactgaagcggctgagcaattaggatggacttcccaggaccagcatggcatcaatccagaactattgagcttatttttatccttaccagtagttggcttactccaatcagaggagtaatgcaaattattataagtacatttagaattgttcttttcaggatcaaaaccacatcacttacataagctttgatctaccagggatgttggatgacagttcttgtccacgtctcagattaagaacatcttattttaccttgcagtgaaagtaagtgaacacagtctcctgccccttatgctggagcagtttccgtttctttatgtttctggcccaacactaagcaaaatgtggaaacagcaaattgcacaggttgaacagcttaagaaagaagcatgtagagaaaatcgatcaaagaagaaactccaagatgaaatagaagaagccctaagaaggcatgacctccttactacccttgtcaagaaagaatatgaacataacaagagactgcaagacttcaaggactgcattcgtaggcaaaggttgacccaatcaaagataaaagaaaatcgacagcaaatcgttcgtgctcgaaaatattatgatgattatagagttcagttgtgtgcaaaaatgatgagaatgaggacccgggaagaaatgatatttaagaaactgtttgaagaaggtttaaacattcaaaagcaaagattacgagacctaagaaactatgccaaagaaaagcgagatgaacaaaggagacgccaccaggatgaactggactccatggagaactactataaggaccagttttcattgctggcagaagccatatcacaggaacatcaagaacttaaagccagagagaaatctcaggcccaggtactaccaactgagcagtcaccacggccggagaaaacgggcaccttccctgctctgcgaggagacagaaagctgagctctgcaacatgacagaggcatcaactcaggatggcatgtgttcttgaacttttcattttgtgactcatgttgtcaccctccatagagccaaccataaatgttttcaaaacgattcattacaaactcaatattctttaaaaacgttgatgctgtgacagtgcaaacagcattgattttattgctcgacttcggcatgggcacatacatagttaatttttaaaaaccatttatacagatgttactgataaagctcatgtaacaaatgaatgaaaatacaaagaatatcaaagctaaaacactctgtaaanaagcacgatgcggccactttccctcctattttatcacataatcgcagaat

SEQ ID NO: 292451 - DNA, 3178 bp, Homo sapiens
tctctaaacttcccaaaccgcccccgtttcacgtcctgtgaaaggaagtgctcctctgatgaccaatcagcggcgagaagctcttttaacgtccgtccttctttcacgcctccttccccgcgctttggttcgtgcgtccgcgccccagtgtcgggtctgcgtggatcggtccttccaggacaccgtcgccttcccggccgcgtcggagtccggcggcgacctgcctctgaaacatggcaggctcggatgctgagtgggtaaccattgccaataaccttctttttaagtgtcatatacatctgagaatacatgaacttcaagactgtgatgctaatgtttttattgctctttatcagtctattttgggagaaaaggtaccagacctcatagttattcctaggagtcaagaagatgatgcacacaatgtacaagcagtaattgattcactggccttggactacttgcaggtcagcttgtctcacataacaggagaaaatatagtgaaaggagataaagaatctattaagaatctcctggaaatatttgatggtttgttggagtatcttacagaacgcatcagtgaaacatctcatgagaaaagtgaaactgaacagtattttaaagaatctgatcgaggagaacgtttggaagagccagaaagtactaaagaatctaaatcatcatggaaaagagtttcttttgggaggtgctccttgtcttctgagatgttgggcccctcttgggatggagatgaagcagaatccactggtgaaatcattagacttggagacacagcacacaccttttctctaagaagtaatggtgctcaatgtcctaatgaaatgctgtctaaaaaagccttagcctcaccaagttctaaatcacatgaagatatgttgtaccctcctagtgttttgtccaagagtaggacatcctttgttgaagacacggaaaccctttctgtgagtgggattccaaatgctaggaagctaggggagcctatccgagcagctattcctttacatccaccctaccacccttcagagcctcgagcaccctgccccataggaaaagaatacttgcattcaagtcactgctccccagccgtaaattctactggagagcatacggaattttctggggatctagatgatggacttttcttaatttccaagttgcctaaaggcagcaaatgggaagtatatccagctcaggtccaagggcctaggacaaggaagcctcccaaaggaaaaagaaatgaaaacagagctacagcctcatcctgcaattcacctttcccccagaggccaagaaagagattaacagaacaagaattacatgatgtatcagaaaaactctctcagcggctttctgaactagattggatgttaaaaagtgctctgggtgatcggattaaagaaaagactgaccataaagaagaaaatactggaaatgaggaggtagaggatggaactgaggagacactgtctcagcacagtgatggcatcgtggagtatgggccaaagaagtcaaggccaggactttccatgcgtagaaagccaccctacagatcccattcgctctctccatctccagttaacaaacacaaacagttccacttggagagaaaaaggcagcgcaagccaagagaaacagatgtccgccaattccaagcacaggcgtttactgaagcatttgaaagggaactaagaagacataaagttcaagagaatattggacctctaagaatacatgagaaggaggaggaaacagaaaaaatatacagaggagaagctgttcgtaaaggaactccagaatgtagtcagccctggaagatttactctagaaaaaccacaacgcagagtctaagaggtggcctcccaaagccaaataaagcagttccaagtaagaaccacagaattgtactttatggaaaactggcaacctttgaaagcatgtgcaacattccaaggacacagcactgaaagctaacatccaccagttagccgaagaaagttttttttttttcccaatcactgccatgtggctggttttccgtagagggctaaaactcttcaataaggaagtacttcagggaggcctatatattggcacccaaggaatgccaggactgccacctgctgctccagcgttagcctcactcgtgtgcttactcactttgactgcctttttgtctatttctgggaggttggtagaatgaaagggatgctccaaggcaagcagatggcctgtccacctcctatatattgacagtgccaatgagtgtagagtcttgttacaagaaacaaagtcatgagaaatgccaggcttcctgttacacccaaagactgctggccctcctactctatcctttagaccagaaactttttcttctaagcacttgcctaccgggaaggttgaggagtcttgttttaccgtacgtagagaatctacccacaggcactgaagcggctgagcaattaggatggacttcccaggaccagcatggcatcaatccagaactattgagcttatttttatccttaccagtagttggcttactccaatcagaggagtaatgcaaattattataagtacatttagaattgttcttttcaggatcaaaaccacatcacttacataagctttgatctaccagggatgttggatgacagttcttgtccacgtctcagattaagaacatcttattttaccttgcagtgaaagtaagtgaacacagtctcctgccccttatgctggagcagtttccgtttctttatgtttctggcccaacactaagcaaaatgtggaaacagcaaattgcacaggttgaacagcttaagaaagaagcatgtagagaaaatcgatcaaagaagaaactccaagatgaaatagaagaagccctaagaaggcatgacctccttactacccttgtcaagaaagaatatgaacataacaagagactgcaagacttcaaggactgcattcgtaggcaaaggttgacccaatcaaagataaaagaaaatcgacagcaaatcgttcgtgctcgaaaatattatgatgattatagagttcagttgtgcgtgagatgataccactgtttactccaggtatggaatccatgattagcagatgagataaggagctgtttgcgggttcagagtgttcctaggttatc

SEQ ID NO: 292452 - DNA, 2075 bp, Homo sapiens
tctctaaacttcccaaaccgcccccgtttcacgtcctgtgaaaggaagtgctcctctgatgaccaatcagcggcgagaagctcttttaacgtccgtccttctttcacgcctccttccccgcgctttggttcgtgcgtccgcgccccagtgtcgggtctgcgtggatcggtccttccaggacaccgtcgccttcccggccgcgtcggagtccggcggcgacctgcctctgaaacatggcaggctcggatgctgagtgggtaaccattgccaataaccttctttttaagtgtcatatacatctgagaatacatgaacttcaagactgtgatgctaatgtttttattgctctttatcagtctattttgggagaaaaggtaccagacctcatagttattcctaggagtcaagaagatgatgcacacaatgtacaagcagtaattgattcactggccttggactacttgcaggtcagcttgtctcacataacaggagaaaatatagtgaaaggagataaagaatctattaagaatctcctggaaatatttgatggtttgttggagtatcttacagaacgcatcagtgaaacatctcatgagaaaagtgaaactgaacagtattttaaagaatctgatcgaggagaacgtttggaagagccagaaagtactaaagaatctaaatcatcatggaaaagagtttcttttgggaggtgctccttgtcttctgagatgttgggcccctcttgggatggagatgaagcagaatccactggtgaaatcattagacttggagacacagcacacaccttttctctaagaagtaatggtgctcaatgtcctaatgaaatgctgtctaaaaaagccttagcctcaccaagttctaaatcacatgaagatatgttgtaccctcctagtgttttgtccaagagtaggacatcctttgttgaagacacggaaaccctttctgtgagtgggattccaaatgctaggaagctaggggagcctatccgagcagctattcctttacatccaccctaccacccttcagagcctcgagcaccctgccccataggaaaagaatacttgcattcaagtcactgctccccagccgtaaattctactggagagcatacggaattttctggggatctagatgatggacttttcttaatttccaagttgcctaaaggcagcaaatgggaagtatatccagctcaggtccaagggcctaggacaaggaagcctcccaaaggaaaaagaaatgaaaacagagctacagcctcatcctgcaattcacctttcccccagaggccaagaaagagattaacagaacaagaattacatgatgtatcagaaaaactctctcagcggctttctgaactagattggatgttaaaaagtgctctgggtgatcggattaaagaaaagactgaccataaagaagaaaatactggaaatgaggaggtagaggatggaactgaggagacactgtctcagcacagtgatggcatcgtggagtatgggccaaagaagtcaaggccaggactttccatgcgtagaaagccaccctacagatcccattcgctctctccatctccagttaacaaacacaaacagttccacttggagagaaaaaggcagcgcaagccaagagaaacagatgtccgccaattccaagcacaggcgtttactgaagcatttgaaagggaactaagaagacataaagttcaagagaatattggacctctaagaatacatgagaaggaggaggaaacagtgggtaaaagtctccactgtaataaatgccatttgatcagatgagtgggaagtacaaagatgatctttttaaaagaagaaggggccaacagggccttaatcatgagctctttaggaaaaggcaggatttcatgtcatgatacaggacttgcttattaataaggcattcaggttgctaaaatatgacgagacatggttccaaagaaaagtagtgtttttccgctacttaaaacttcccatcagtttttaagggtttatttgacttagcagttcaccaggggcttaaaaactactctaggctga

SEQ ID NO: 292453 - DNA, 1122 bp, Homo sapiens
tctctaaacttcccaaaccgcccccgtttcacgtcctgtgaaaggaagtgctcctctgatgaccaatcagcggcgagaagctcttttaacgtccgtccttctttcacgcctccttccccgcgctttggttcgtgcgtccgcgccccagtgtcgggtctgcgtggatcggtccttccaggacaccgtcgccttcccggccgcgtcggagtccggcggcgacctgcctctgaaacatggcaggctcggatgctgagtgggtaaccattgccaataaccttctttttaagtgtcatatacatctgagaatacatgaacttcaagactgtgatgctaatgtttttattgctctttatcagtctattttgggagaaaaggtaccagacctcatagttattcctaggagtcaagaagatgatgcacacaatgtacaagcagtaattgattcactggccttggactacttgcaggtcagcttgtctcacataacaggagaaaatatagtgaaaggagataaagaatctattaagaatctcctggaaatatttgatggtttgttggagtatcttacagaacgcatcagtgaaacatctcatgagaaaagtgaaactgaacagtattttaaagaatctgatcgaggagaacgtttggaagagccagaaagtactaaagaatctaaatcatcatggaaaagagtttcttttgggaggtgctccttgtcttctgagatgttgggcccctcttgggatggagatgaagcagaatccactggtgaaatcattagacttggagacacagcacacaccttttctctaagaagtaatggtgctcaatgtcctaatgaaatgctgtctaaaaaagccttagcctcaccaagttctaaatcacatgaagatatgttgtaccctcctagtgttttgtccaagagtaggacatcctttgttgaagacagtgagttgtaatggatgttagttctttactgctgatgatcattcttggggcaattgttgttgcattagcctttttacttttattgctgtatatgagatcctttttggtcttacatgatcttacttgtaaatgtttgctattaattatggtatctgaattctgcttaacatggtc

SEQ ID NO: 292454 - DNA, 915 bp, Homo sapiens
tgacccaaaaacgggatttattgggggcccagtcatcacctggaagtcaaaaggcgttgaagtttcggggggattttcatgatgagcaggaacagggctcattatggcaggactgtggatcggtccttccaggacaccgtcgccttcccggccgcgtcggagtccggcggcgacctgcctctgaaacatggcaggctcggatgctgagtgggtaaccattgccaataaccttctttttaagtgtcatatacatctgagaatacatgaacttcaagactgtgatgctaatgtttttattgctctttatcagtctattttgggagaaaaggtaccagacctcatagttattcctaggagtcaagaagatgatgcacacaatgtacaagcagtaattgattcactggccttggactacttgcaggtcagcttgtctcacataacaggagaaaatatagtgaaaggagataaagaatctattaagaatctcctggaaatatttgatggtttgttggagtatcttacagaacgcatcagtgaaacatctcatgagaaaagtctaatatatacttacctggcaatatttcctagagctgatcaggttcttcaaaatgccagttaacagtaatgggaaacaaatctttattatcactaatcatatcagctgtgcagggcagcttcaacctgggacctgagctagcattatcatttaccactgaagaaggaggggttcgaaggaagaccatgggttcagtgctgggttcttcctctcactatatgatggcagctctctaagcctgttttctcatctgaaattctttcatggttgttgtgaaagttaagtaagtagatgtgtgtaaacagttgggcacacagcctagctcagagtaaatgcataataaatgttaattgatgtta

SEQ ID NO: 292455 - DNA, 412 bp, Homo sapiens
ggatggtagtgcctggctaatgatatggcagtggggatgaagagaggaggaggcaactgagagatacttttatgtgagtctggtggtggtgaaagactgaaggatattcccaggggagatcggcagtatgtggtgagctactggggaagttgctcagataggcttccctatatgacagtaccttagctggacagcattttcttacagtctgcttctcatctttgcaggtctaatatatacttacctggcaatatttcctagagctgatcaggttcttcaaaatgccagttaacagtaatgggaaacaaatctttattatcactaatcatatcagctgtgcagggcagcttcaacctgggacctgagctagcattatcatttaccactgaagaaggaggggttcgaaggaaga

SEQ ID NO: 292456 - DNA, 460 bp, Homo sapiens
tcctaatttaattagatccctgtgtgctgaggctatatccctggtttaattatttttttatgtgctttgtcttaagtttaaaaaatatttctaatgtatgtgaacatgtttatataggtatgtatgtatgtatataaaatggtttatttcttagaattgcatcgtaatatccactttaatttgtcttactagcggaaaccctttctgtgagtgggattccaaatgctaggaagctaggggagcctatccgagcagctattcctttacatccaccctaccacccttcagagcctcgagcaccctgccccataggaaaagaatacttgcattcaagtcactgctccccagccgtaaattctactggagagcatacggaattttctggggtaagtggaaaagcttactttcagttggctagaagtacacttgtatgtatgtctgtgtgtgtgttggtaattga

SEQ ID NO: 292457 - DNA, 384 bp, Homo sapiens
acctgtctcatcctcaccgcacgcggctaagagcttggatgctcggttgaggcaccattggaattgaaactcaggatctcctgtttactagacaggtgctttaaccagctaagccatggtgctgcccgttgtgtatgtttttaataactgtaatatatgaccttttcccctttaggcgtttactgaagcatttgaaagggaactaagaagacataaagttcaagagaatattggacctctaagaatacatgagaaggaggaggaaacagtgggtaaaagtctccactgtaataaatgccatttgatcagatgagtgggaagtacaaagatgatctttttaaaagaagaaggggccaacagggccttaatcatgagctctttagg

SEQ ID NO: 292458 - DNA, 382 bp, Homo sapiens
ttgtacgaaattgtcaaaataacaaaattctggggatggagaacgggttactggttgtcagcagttaggggaggtctccagggaggagggatgcctctggggagggcggttctgtgtcttgaggggagatgctcgttatgtgaacgtgcgtgtgacacaggtgtccatctgtggagcacacacacaggtgagagcacataggagtgggggcatctgagcaggggcctggcgtttccatgtcagtctcctggctttgcctttgttttgcagctactgaacgcacagctgctgggggaccagggccaaagggactgctctgtgctgtttttgcaatttgttgtgtgtctgttaccatcagaatacaaaacttaaaaagtcacac

SEQ ID NO: 292459 - DNA, 1487 bp, Homo sapiens
gtgagtgcacttgtgtgtgggtgactaagtggatgcatgtgtgtgcctgtgtgagtgagggtatgtgcacctaagtgtgtacatgtgtgtatgttgtgaaagtgtctgtgcacatgaatgtttgtgtgagtgtgaactctttcttactgctggaagtcacagaattcatattgctgcccgggttggtgtggccacctttccctttgtccaagactccacatggaaggcatttgagctcgacctccgaaaagctacccagcaaagagcagtctgtgcctctgagcagaccgtgagaactcaggggacgagtggctaagagcatggcctctcccagaacccacccagggtggtgtggtgggggcaacaggggccagactcctctagagggagggtggctctggggccctggaaaacgtgagagactgccctgagctggtccagtgggccagcactttataccaactcagcatttaagggaagtatcttagattgcctccatctcaatgtgaatgcaccaggctgagggttccctagcgccttgagtcaaggccacttttcagcccatcgagccctgagttctacttggtgtttgttctctggagctgattgcacttgagctctgtggtgggcaggcgcactttagcctaagttgggtgccccagggcaccccctcctctctgctccttgccagcttcattcactcccagcctctcgctgtcctcactttgcaggggctcctcctcaacatttgcatgcacctgcaagaattgggaagaaagagcatttattaggcactgtagcaatttgcattttaaaatgcctgagcatttattaagcttcttggtattcacttgggtttgataattgatctgagctacctcattgaatgtttttggaaaggtgttttttggtatgcaagtcagctttgcctcacagttgaaaatgttcggtcatgattgcttttgaaaccaaaggggaaggtaccgatatcattgagctatttaaagttgccagtttgggctccagtaatgctttctggtgggtaaaattccacattcaggccacgagagcatctacagtttgtactctggggctgcaggcatcctgggacgctgtacgcaattcagtggtctagtcctttataccgactcagattccttaagcatgcagagtcactcgaatgaaaaaacatactcgacctctccctaaaaagatgttgcaacccagtttctctgaattccaccacaaaaagagaccctgaataagaagagcagttttcctgtgcatatagagggtgtgtcaaaggtgagctttttggggaccgggaaaaacaaagttgcctgattccgcgcaggtgcacaggccccggatgtacacccggaaaggggagtgtggctgtagaatcatccatccgtctacagctaaaacaatttgccaataaagtacatgtttttcctaagccaaaaataaatacgttaacagaaaaa

SEQ ID NO: 292460 - DNA, 1060 bp, Homo sapiens
  misc_feature (311)..(311): n is a, c, g, or t
cacgtgatggctggagtctgctggagtcgcggcgctccctggggcgcgatcgacctcgcgccatggggccaagttgactgtgtggaccacggtgtgtcgggtgcggccatcggcgagtctcgagtgtatctagcaccggtgtgagtgatcctcgcgcggaaaggatgacatatgtggttggcacctgggaacacagcaaatttctcgtgcatagcatccttatgatcgcgaatacctctatgctcggtcgcgcattctcgtgcatgcatcacgttcttacagctttggtctcgggagctcgcgtcacactnacagtgagggttagtgcgcatgaagctaattgggaagaaagagcatttattaggcactgtagcaatttgcattttaaaatgcctgagcatttattaagcttcttggtattcacttgggtttgataattgatctgagctacctcattgaatgtttttggaaaggtgttttttggtatgcaagtcagctttgcctcacagttgaaaatgttcggtcatgattgcttttgaaaccaaaggggaaggtaccgatatcattgagctatttaaagttgccagtttgggctccagtaatgctttctggtgggtaaaattccacattcaggccacgagagcatctacagtttgtactctggggctgcaggcatcctgggacgctgtacgcaattcagtggtctagtcctttataccgactcagattccttaagcatgcagagtcactcgaatgaaaaaacatactcgacctctccctaaaaagatgttgcaacccagtttctctgaattccaccacaaaaagagaccctgaataagaagagcagttttcctgtgcatatagagggtgtgtcaaaggtgagctttttggggaccgggaaaaacaaagttgcctgattccgcgcaggtgcacaggccccggatgtacacccggaaaggggagtgtggctgtagaatcatccatccgtctacagctaaaacaatttgccaataaagtacatgtttttcctaagccaaaaataaatacgttaacagaaaaa

SEQ ID NO: 292461 - DNA, 1793 bp, Homo sapiens
gtgagtgcacttgtgtgtgggtgactaagtggatgcatgtgtgtgcctgtgtgagtgagggtatgtgcacctaagtgtgtacatgtgtgtatgttgtgaaagtgtctgtgcacatgaatgtttgtgtgagtgtgaactctttcttactgctggaagtcacagaattcatattgctgcccgggttggtgtggccacctttccctttgtccaagactccacatggaaggcatttgagctcgacctccgaaaagctacccagcaaagagcagtctgtgcctctgagcagaccgtgagaactcaggggacgagtggctaagagcatggcctctcccagaacccacccagggtggtgtggtgggggcaacaggggccagactcctctagagggagggtggctctggggccctggaaaacgtgagagactgccctgagctggtccagtgggccagcactttataccaactcagcatttaagggaagtatcttagattgcctccatctcaatgtgaatgcaccaggctgagggttccctagcgccttgagtcaaggccacttttcagcccatcgagccctgagttctacttggtgtttgttctctggagctgattgcacttgagctctgtggtgggcaggcgcactttagcctaagttgggtgccccagggcaccccctcctctctgctccttgccagcttcattcactcccagcctctcgctgtcctcactttgcaggggctcctcctcaacatttgcatgcacctgcaagaattgggaagaaagagcatttattaggcactgtagcaatttgcattttaaaatgcctgagcatttattaagcttcttggtattcacttgggtttgataattgatctgagctacctcattgaatgtttttggaaaggtgttttttggtatgcaagtcagctttgcctcacagttgaaaatgttcggtcatgattgcttttgaaaccaaaggggaaggtaccgatatcattgagctatttaaagttgccagtttgggctccagtaatgctttctggtgggtaaaattccacattcaggccacgagagcatctacagtttgtactctggggctgcaggcatcctgggacgctgtacgcaattcagtggtctagtcctttataccgactcagattccttaagcatgcagagtcactcgaatgaaaaaacatactcgacctctccctaaaaagatgttgcaacccagtttctctgaattccaccacaaaaagagaccctgaataagaagagcagttttcctgtgcatatagagggtgtgtcaaaggtgagctttttggggaccgggaaaaacaaagttgcctgattccgcgcaggtgcacaggccccggatgtacacccggaaaggggagtgtggctgtagaatcatccatccgtctacagctaaaacaatttgccaataaagtacatgtttttcctaagccaaaaataaatacgttaacagaaaaatgatttaggatatagcttgaatgcttaaatatgtgcacctttacaaacctctcagtgtattcttggagttcttgaaatgttgttttaatatttgttgccagtaatgttctttcttcacagccgctccgggaattctgaagttctgggcctttctcagaagactgtaatgtacctgaagtttctgaaatattgcaaacccacagagtttaggctggtgctgccaaaaagaaaagcaacatagagtttaagtatccagtagtgatttgtaaacttgtttttcatttgaagctgaatatatacgtagtc

SEQ ID NO: 292462 - DNA, 1095 bp, Homo sapiens
ggagtgacgcggaaaaggcgcccgaacgcgcacgcgcaaatctagggcgacgcttgacagagcttgggagggtgcgcctgctttcgccctccttctccagcgggaggggcgcgcacttccgcggggcggagtccgtctagtgctgacgttggcagccgaacccaaagtagatcgaggcggcgggctgcacattcccgttgttgcgttgcgtttccttcctctttcactccgcgctcacggcggcggccaaagcggcggcgacggcggcgcgagaacgacccggcggccagttctcttcctcctgcgcacctgccccgctcggtcagtcagtcggcggccggcgcccggcttgtgctcagacctcgcgcttgcggcgcccaggcccagcggccgtagctagcgtctggcctgagaacctcggcgctccggcggcgcgggcaccacgagccgagcctcgcagcggctccagaggaggcaggcgagtgagcgagtccgaggggtggccggggcaggtggtggcgccgcgaagatggtcgccaagcaaaggatccgtatggccaacgagaagcacagcaagaacatcacccagcgcggcaacgtcgccaagacctcgagaaatgcccccgaagagaaggcgtctgtaggaccctggttattggctctcttcatttttgttgtctgtggttctgcaattttccagattattcaaagtatcaggatgggcatgtgaagtgactgaccttaagatgtttccattctcctgtgaattttaacttgaactcattcctgatgtttgataccctggttgaaaacaattcagtaaagcatcctgcctcagaatgactttcctatcatgcttcatgtgtcattccaaggtttcttcatgagtcattccaagttttctagtccataccacagtgccttgcaaaaaacaccacatgaataaagcaataaaatttgattgttagaaaaaaaaaaaaaaaaaaagggcgggggtaaaaatactcgaggggcaagtaggtaacagtttggaaaggggccaaggggggaaaaaagaacgggcgggaaagggggggaaacggtggatttgagagc

SEQ ID NO: 292463 - DNA, 839 bp, Homo sapiens
ggagtgacgcggaaaaggcgcccgaacgcgcacgcgcaaatctagggcgacgcttgacagagcttgggagggtgcgcctgctttcgccctccttctccagcgggaggggcgcgcacttccgcggggcggagtccgtctagtgctgacgttggcagccgaacccaaagtagatcgaggcggcgggctgcacattcccgttgttgcgttgcgtttccttcctctttcactccgcgctcacggcggcggccaaagcggcggcgacggcggcgcgagaacgacccggcggccagttctcttcctcctgcgcacctgccccgctcggtcagtcagtcggcggccggcgcccggcttgtgctcagacctcgcgcttgcggcgcccaggcccagcggccgtagctagcgtctggcctgagaacctcggcgctccggcggcgcgggcaccacgagccgagcctcgcagcggctccagaggaggcaggcgagtgagcgagtccgaggggtggccggggcaggtggtggcgccgcgaagatggtcgccaagcaaaggatccgtatggccaacgagaagcacagcaagaacatcacccagcgcggcaacgtcgccaagacctcgagaaatgcccccgaagagaaggcgtctgtaggaccctggttattggctctcttcatttttgttgtctgtggttctgcaattttccagattattcaaagtatcaggatgggcatgtgaagtgactgaccttaagatgtttccattctcctgtgaattttaacttgaactcattcctgatgtttgataccctggttgaaaacaattcagtaaagcatcctgcctcaga

SEQ ID NO: 292464 - DNA, 378 bp, Homo sapiens
  misc_feature (11)..(11): n is a, c, g, or t
tgactctagangatcccgcagtcaatatgatgaacagtaagggagcagagtggttaaggactttcaggaacttaactattctggaataaggaatgaatcaactgaccttgggccagcaggtttttaactaaattgttacttgcctttctcacccagttaatcagtctctgtacttgtttccctttttgaaacaagtgtcttggttaactaattctgttttatggttgtgctaaattcatagcaggtgccttattctttgcttttagtcaaaccattccatatcagaattttccttggtttactatagatatttggctttaagttgttgtttgtgttttttaatgtacaatcatattgaatgcgggccgagctcgatta

SEQ ID NO: 292465 - DNA, 283 bp, Homo sapiens
  misc_feature (27)..(30): n is a, c, g, or t
  misc_feature (32)..(32): n is a, c, g, or t
  misc_feature (55)..(55): n is a, c, g, or t
cgggccccgcaccgttaggtatatggnnnngnaactccagttttatagaacccgnatagaaatgcccccgaagagaaggcgtctgtaggaccctggttattggctctcttcatttttgttgtctgtggttctgcaattttccagattattcaaagtatcaggatgggcatgtgaagtgactgaccttaagatgtttccattctcctgtgaattttaacttgaactcattcctgatgtttgataccctggttgaaaacaattcagtaaagcatcctgcctcaga

SEQ ID NO: 292466 - DNA, 641 bp, Homo sapiens
tctgtttaacgtttcactttgcctttcttcttcacttaccaattggaagctttcctgataaatggatgagagccaagcagtttatataacctgaagatgattgaatttcagctttgtgagaatgaggaaacatgcatgtgttacaggccaggccttaaaaggatgcttataaaccaaaataattctatgctggaaaaacctgttggctttggtgctttaagttctttgtaaaatgattacttatctgcaagttctcttggatacttagacataaagttcagcgaagctaagataaaaaaataactcagggatatttcattgttttatttattcagacaggcctgtcttcacttcttattatactgaagttatgtaccatttgcaaatgtaagagtacctttggattcttcagctaccttaataaatatttgttagacaccagacctattttattcaaagcttattttaatatttgctctttctttttacagcaattttccagattattcaaagtatcaggatgggcatgtgaagtgactgaccttaagatgtttccattctcctgtgaattttaacttgaactcattcctgatgtttgataccctggttgaaaacaattcagtaaagcatcctgcctcaga

SEQ ID NO: 292467 - DNA, 534 bp, Homo sapiens
cattatgatttcactaagattactggccatgatttggctatcaaatttgcaagtttttctcattccttaagatacaactcttgtaaaataaaggcttgtattcaattacactagtgtctacactttttcttagtattgttccccctaccttataaataggcttaagttactattttcagatctgaagatcattttccttgatagagaatatgtattcttttcatcttcggtaaatattatacaataaaaatgagttcatctgttcttttcctttcttgttcaaaatacaccaccaacaaaaccattttagattgtactgtatgttccctataacattacttaacaaaataaatcataccttggaaacactgtgctttctgtaaaatgtggtggtccattcaccatgtacagtccttctgatcctcggactgtcaagagcggcgtggacggcgccatgttgtcccggaaagagaaaccgctcgggtgagagttcaccagggccgaacccggcccctacacgtctcctcatgcgtg

SEQ ID NO: 292468 - DNA, 3179 bp, Homo sapiens
ggagtgacgcggaaaaggcgcccgaacgcgcacgcgcaaatctagggcgacgcttgacagagcttgggagggtgcgcctgctttcgccctccttctccagcgggaggggcgcgcacttccgcggggcggagtccgtctagtgctgacgttggcagccgaacccaaagtagatcgaggcggcgggctgcacattcccgttgttgcgttgcgtttccttcctctttcactccgcgctcacggcggcggccaaagcggcggcgacggcggcgcgagaacgacccggcggccagttctcttcctcctgcgcacctgccccgctcggtcagtcagtcggcggccggcgcccggcttgtgctcagacctcgcgcttgcggcgcccaggcccagcggccgtagctagcgtctggcctgagaacctcggcgctccggcggcgcgggcaccacgagccgagcctcgcagcggctccagaggaggcaggcgagtgagcgagtccgaggggtggccggggcaggtggtggcgccgcgaagatggtcgccaagcaaaggatccgtatggccaacgagaagcacagcaagaacatcacccagcgcggcaacgtcgccaagacctcgagaaatgcccccgaagagaaggcgtctgtaggaccctggttattggctctcttcatttttgttgtctgtggttctgcaattttccagattattcaaagtatcaggatgggcatgtgaagtgactgaccttaagatgtttccattctcctgtgaattttaacttgaactcattcctgatgtttgataccctggttgaaaacaattcagtaaagcatcctgcctcagaatgactttcctatcatgcttcatgtgtcattccaaggtttcttcatgagtcattccaagttttctagtccataccacagtgccttgcaaaaaacaccacatgaataaagcaataaaatttgattgttaagatacagtagtggaccctacttattcagtcaattaagagtaagtttttttatgtggttattaaaacagtatgaacaattagtctaactctgcatagacagggtctagattttgttaacccaaatgtataactgcagttagcttaaattacaatttgaagtcttgtggtttttatatagctaggcactttattactcttttgaactgaaagcacactcccttataggttcatgtaactgtcctgtaataaggtgcttataaatggaacaactacacagcctagttttgccacaacctttagcatctaaaaagttttaaaagcttctaaatgtctaatataaagggagatgcttatagccacaacatctattttaccaatattgtttccattacactaccttggattttgcatgagtgagtatagtaacccaagatgccataaaaaaaaacttgatcgttttctgacttaatcagttactgtggtttcactaaaagctaccgtggtggagtgaagtcagtcagggaaggtttgtttatgttacatttatttcaccagaactattttaatatatcaaaggggtttactatgccaaacaaaattctagggaaaaatactgctaaaaatggatgcctcatcagaacatgctgttgagtccaatgtgccataagacattttagcatgttaaatagcacttttaatagcaaaaaaaggcacatcaactgcgaagttatccttagtttgcaaatgctttttctagattaatgatttttcaatcattagggtactagacacatcagcctaaagtggcatctggaattgaatggatttactgataatgatcagtctttagtcttccctttgttatatgactttataggttatgattgatcaaatttacgttttactaatggtaagggtgagggtcatagggcaggttttgggttttctagtactgttgaaaactgcaagtattggctatttgtatacttagccataacttggtgaaaaaaaacctgagcagtgtctatgtattaatgcgttggaaagaaagctgcttgtgtttgctttgttaattgcctcaggatatttcttttaaaataagctgttttaagaggaacagaagggaaatctgctacctagtctatacacagcgtgaacctcacagggggcttctgataccctcaaacatggagaacagtaagggagcagagtggttaaggactttcaggaacttaactattctggaataaggaatgaatcaactgaccttgggccagcaggtttttaactaaattgttacttgcctttctcacccagttaatcagtctctgtacttgtttccctttttgaaacaagtgtcttggttaactaattctgttttatggttgtgctaaattcatagcaggtgccttattctttgcttttagtcaaaccattccatatcagaattttccttggtttactatagatatttggctttaagttgttgtttgtgttttttaatgtacaatgttctgataaatttgactgttaaattgctatagctagcaatcattttacatatgtaaaattgcattccctttgtatttcatgtgtaattcaccaattaagtgcagtttatattcaggttggattatgcatgtttaggtaaacgaaagctgtgtcttacttgatttattctttaaaaataaagttccctgaatattgatgcttttcttctaaacggaaatgattttacagttatctgagtgtaccttttatagttagtagaaaatgattttaaagaatgtttagtattgtacttaaatggtatgcagaggcacagatgtaaggtttataactggaaataggtggtaagaaaaatatatagaaagcacaatgatttgaatatttttccacttaggatttcctaatctccttgtcatccaattcaagctcaagatgaagcacaattctttgatctccctttgccagttgaattttatagatcatctaatgttgagcacagtatgagaataaatattggggttgtcaacattactcagttactctttgtggtttagctctaacatttcaacaagttgtcaattaattgtatctgttgggttgtatataatgttgctcaaaataattaagtggacttccaaaaataagatttccattgtaacaggatgcattgtgatgggcttttggggatcctctaggatcgca

SEQ ID NO: 292469 - DNA, 3168 bp, Homo sapiens
ggagtgacgcggaaaaggcgcccgaacgcgcacgcgcaaatctagggcgacgcttgacagagcttgggagggtgcgcctgctttcgccctccttctccagcgggaggggcgcgcacttccgcggggcggagtccgtctagtgctgacgttggcagccgaacccaaagtagatcgaggcggcgggctgcacattcccgttgttgcgttgcgtttccttcctctttcactccgcgctcacggcggcggccaaagcggcggcgacggcggcgcgagaacgacccggcggccagttctcttcctcctgcgcacctgccccgctcggtcagtcagtcggcggccggcgcccggcttgtgctcagacctcgcgcttgcggcgcccaggcccagcggccgtagctagcgtctggcctgagaacctcggcgctccggcggcgcgggcaccacgagccgagcctcgcagcggctccagaggaggcaggcgagtgagcgagtccgaggggtggccggggcaggtggtggcgccgcgaagatggtcgccaagcaaaggatccgtatggccaacgagaagcacagcaagaacatcacccagcgcggcaacgtcgccaagacctcgagaaatgcccccgaagagaaggcgtctgtaggaccctggttattggctctcttcatttttgttgtctgtggttctgcaattttccagattattcaaagtatcaggatgggcatgtgaagtgactgaccttaagatgtttccattctcctgtgaattttaacttgaactcattcctgatgtttgataccctggttgaaaacaattcagtaaagcatcctgcctcagaatgactttcctatcatgcttcatgtgtcattccaaggtttcttcatgagtcattccaagttttctagtccataccacagtgccttgcaaaaaacaccacatgaataaagcaataaaatttgattgttaagatacagtagtggaccctacttattcagtcaattaagagtaagtttttttatgtggttattaaaacagtatgaacaattagtctaactctgcatagacagggtctagattttgttaacccaaatgtataactgcagttagcttaaattacaatttgaagtcttgtggtttttatatagctaggcactttattactcttttgaactgaaagcacactcccttataggttcatgtaactgtcctgtaataaggtgcttataaatggaacaactacacagcctagttttgccacaacctttagcatctaaaaagttttaaaagcttctaaatgtctaatataaagggagatgcttatagccacaacatctattttaccaatattgtttccattacactaccttggattttgcatgagtgagtatagtaacccaagatgccataaaaaaaaacttgatcgttttctgacttaatcagttactgtggtttcactaaaagctaccgtggtggagtgaagtcagtcagggaaggtttgtttatgttacatttatttcaccagaactattttaatatatcaaaggggtttactatgccaaacaaaattctagggaaaaatactgctaaaaatggatgcctcatcagaacatgctgttgagtccaatgtgccataagacattttagcatgttaaatagcacttttaatagcaaaaatgatttttcaatcattagggtactagacacatcagcctaaagtggcatctggaattgaatggatttactgataatgatcagtctttagtcttccctttgttatatgactttataggttatgattgatcaaatttacgttttactaatggtaagggtgagggtcatagggcaggttttgggttttctagtactgttgaaaactgcaagtattggctatttgtatacttagccataacttggtgaaaaaaaacctgagcagtgtctatgtattaatgcgttggaaagaaagctgcttgtgtttgctttgttaattgcctcaggatatttcttttaaaataagctgttttaagaggaacagaagggaaatctgctacctagtctatacacagcgtgaacctcacagggggcttctgataccctcaaacatggagaacagtaagggagcagagtggttaaggactttcaggaacttaactattctggaataaggaatgaatcaactgaccttgggccagcaggtttttaactaaattgttacttgcctttctcacccagttaatcagtctctgtacttgtttccctttttgaaacaagtgtcttggttaactaattctgttttatggttgtgctaaattcatagcaggtgccttattctttgcttttagtcaaaccattccatatcagaattttccttggtttactatagatatttggctttaagttgttgtttgtgttttttaatgtacaatgttctgataaatttgactgttaaattgctatagctagcaatcattttacatatgtaaaattgcattccctttgtatttcatgtgtaattcaccaattaagtgcagtttatattcaggttggattatgcatgtttaggtaaacgaaagctgtgtcttacttgatttattctttaaaaataaagttccctgaatattgatgcttttcttctaaacggaaatgattttacagttatctgagtgtaccttttatagttagtagaaaatgattttaaagaatgtttagtattgtacttaaatggtatgcagaggcacagatgtaaggtttataactggaaataggtggtaagaaaaatatatagaaagcacaatgatttgaatatttttccacttaggatttcctaatctccttgtcatccaattcaagctcaagatgaagcacaattctttgatctccctttgccagttgaattttatagatcatctaatgttgagcacagtatgagaataaatattggggttgtcaacattactcagttactctttgtggtttagctctaacatttcaacaagttgtcaattaattgtatctgttgggttgtatataatgttgctcaaaataattaagtggacttccaaaaataagatttccattgtaacaggatgcattgtgatgggctttgacttacattaaagaaatgtggatagtcaactgcaaaaaaacacacacaaccaacacaaacaaag

SEQ ID NO: 292470 - DNA, 3164 bp, Homo sapiens
ggagtgacgcggaaaaggcgcccgaacgcgcacgcgcaaatctagggcgacgcttgacagagcttgggagggtgcgcctgctttcgccctccttctccagcgggaggggcgcgcacttccgcggggcggagtccgtctagtgctgacgttggcagccgaacccaaagtagatcgaggcggcgggctgcacattcccgttgttgcgttgcgtttccttcctctttcactccgcgctcacggcggcggccaaagcggcggcgacggcggcgcgagaacgacccggcggccagttctcttcctcctgcgcacctgccccgctcggtcagtcagtcggcggccggcgcccggcttgtgctcagacctcgcgcttgcggcgcccaggcccagcggccgtagctagcgtctggcctgagaacctcggcgctccggcggcgcgggcaccacgagccgagcctcgcagcggctccagaggaggcaggcgagtgagcgagtccgaggggtggccggggcaggtggtggcgccgcgaagatggtcgccaagcaaaggatccgtatggccaacgagaagcacagcaagaacatcacccagcgcggcaacgtcgccaagacctcgagaaatgcccccgaagagaaggcgtctgtaggaccctggttattggctctcttcatttttgttgtctgtggttctgcaattttccagattattcaaagtatcaggatgggcatgtgaagtgactgaccttaagatgtttccattctcctgtgaattttaacttgaactcattcctgatgtttgataccctggttgaaaacaattcagtaaagcatcctgcctcagaatgactttcctatcatgcttcatgtgtcattccaaggtttcttcatgagtcattccaagttttctagtccataccacagtgccttgcaaaaaacaccacatgaataaagcaataaaatttgattgttaagatacagtagtggaccctacttattcagtcaattaagagtaagtttttttatgtggttattaaaacagtatgaacaattagtctaactctgcatagacagggtctagattttgttaacccaaatgtataactgcagttagcttaaattacaatttgaagtcttgtggtttttatatagctaggcactttattactcttttgaactgaaagcacactcccttataggttcatgtaactgtcctgtaataaggtgcttataaatggaacaactacacagcctagttttgccacaacctttagcatctaaaaagttttaaaagcttctaaatgtctaatataaagggagatgcttatagccacaacatctattttaccaatattgtttccattacactaccttggattttgcatgagtgagtatagtaacccaagatgccataaaaaaaaacttgatcgttttctgacttaatcagttactgtggtttcatttcaccagaactattttaatatatcaaaggggtttactatgccaaacaaaattctagggaaaaatactgctaaaaatggatgcctcatcagaacatgctgttgagtccaatgtgccataagacattttagcatgttaaatagcacttttaatagcaaaaaaaggcacatcaactgcgaagttatccttagtttgcaaatgctttttctagattaatgatttttcaatcattagggtactagacacatcagcctaaagtggcatctggaattgaatggatttactgataatgatcagtctttagtcttccctttgttatatgactttataggttatgattgatcaaatttacgttttactaatggtaagggtgagggtcatagggcaggttttgggttttctagtactgttgaaaactgcaagtattggctatttgtatacttagccataacttggtgaaaaaaaacctgagcagtgtctatgtattaatgcgttggaaagaaagctgcttgtgtttgctttgttaattgcctcaggatatttcttttaaaataagctgttttaagaggaacagaagggaaatctgctacctagtctatacacagcgtgaacctcacagggggcttctgataccctcaaacatggagaacagtaagggagcagagtggttaaggactttcaggaacttaactattctggaataaggaatgaatcaactgaccttgggccagcaggtttttaactaaattgttacttgcctttctcacccagttaatcagtctctgtacttgtttccctttttgaaacaagtgtcttggttaactaattctgttttatggttgtgctaaattcatagcaggtgccttattctttgcttttagtcaaaccattccatatcagaattttccttggtttactatagatatttggctttaagttgttgtttgtgttttttaatgtacaatgttctgataaatttgactgttaaattgctatagctagcaatcattttacatatgtaaaattgcattccctttgtatttcatgtgtaattcaccaattaagtgcagtttatattcaggttggattatgcatgtttaggtaaacgaaagctgtgtcttacttgatttattctttaaaaataaagttccctgaatattgatgcttttcttctaaacggaaatgattttacagttatctgagtgtaccttttatagttagtagaaaatgattttaaagaatgtttagtattgtacttaaatggtatgcagaggcacagatgtaaggtttataactggaaataggtggtaagaaaaatatatagaaagcacaatgatttgaatatttttccacttaggatttcctaatctccttgtcatccaattcaagctcaagatgaagcacaattctttgatctccctttgccagttgaattttatagatcatctaatgttgagcacagtatgagaataaatattggggttgtcaacattactcagttactctttgtggtttagctctaacatttcaacaagttgtcaattaattgtatctgttgggttgtatataatgttgctcaaaataattaagtggacttccaaaaataagatttccattgtaacaggatgcattgtgatgggctttgacttacattaaagaaatgtggatagtcaactgcaaaaaaacacacacaaccaacacaaacaaag

SEQ ID NO: 292471 - DNA, 3170 bp, Homo sapiens
ggagtgacgcggaaaaggcgcccgaacgcgcacgcgcaaatctagggcgacgcttgacagagcttgggagggtgcgcctgctttcgccctccttctccagcgggaggggcgcgcacttccgcggggcggagtccgtctagtgctgacgttggcagccgaacccaaagtagatcgaggcggcgggctgcacattcccgttgttgcgttgcgtttccttcctctttcactccgcgctcacggcggcggccaaagcggcggcgacggcggcgcgagaacgacccggcggccagttctcttcctcctgcgcacctgccccgctcggtcagtcagtcggcggccggcgcccggcttgtgctcagacctcgcgcttgcggcgcccaggcccagcggccgtagctagcgtctggcctgagaacctcggcgctccggcggcgcgggcaccacgagccgagcctcgcagcggctccagaggaggcaggcgagtgagcgagtccgaggggtggccggggcaggtggtggcgccgcgaagatggtcgccaagcaaaggatccgtatggccaacgagaagcacagcaagaacatcacccagcgcggcaacgtcgccaagacctcgagaaatgcccccgaagagaaggcgtctgtaggaccctggttattggctctcttcatttttgttgtctgtggttctgcaattttccagattattcaaagtatcaggatgggcatgtgaagtgactgaccttaagatgtttccattctcctgtgaattttaacttgaactcattcctgatgtttgataccctggttgaaaacaattcagtaaagcatcctgcctcagaatgactttcctatcatgcttcatgtgtcattccaaggtttcttcatgagtcattccaagttttctagtccataccacagtgccttgcaaaaaacaccacatgaataaagcaataaaatttgattgttaagatacagtagtggaccctacttattcagtcaattaagagtaagtttttttatgtggttattaaaacagtatgaacaattagtctaactctgcatagacagggtctagattttgttaacccaaatgtataactgcagttagcttaaattacaatttgaagtcttgtggtttttatatagctaggcactttattactcttttgaactgaaagcacactcccttataggttcatgtaactgtcctgtaataaggtgcttataaatggaacaactacacagcctagttttgccacaacctttagcatctaaaaaatctattttaccaatattgtttccattacactaccttggattttgcatgagtgagtatagtaacccaagatgccataaaaaaaaacttgatcgttttctgacttaatcagttactgtggtttcactaaaagctaccgtggtggagtgaagtcagtcagggaaggtttgtttatgttacatttatttcaccagaactattttaatatatcaaaggggtttactatgccaaacaaaattctagggaaaaatactgctaaaaatggatgcctcatcagaacatgctgttgagtccaatgtgccataagacattttagcatgttaaatagcacttttaatagcaaaaaaaggcacatcaactgcgaagttatccttagtttgcaaatgctttttctagattaatgatttttcaatcattagggtactagacacatcagcctaaagtggcatctggaattgaatggatttactgataatgatcagtctttagtcttccctttgttatatgactttataggttatgattgatcaaatttacgttttactaatggtaagggtgagggtcatagggcaggttttgggttttctagtactgttgaaaactgcaagtattggctatttgtatacttagccataacttggtgaaaaaaaacctgagcagtgtctatgtattaatgcgttggaaagaaagctgcttgtgtttgctttgttaattgcctcaggatatttcttttaaaataagctgttttaagaggaacagaagggaaatctgctacctagtctatacacagcgtgaacctcacagggggcttctgataccctcaaacatggagaacagtaagggagcagagtggttaaggactttcaggaacttaactattctggaataaggaatgaatcaactgaccttgggccagcaggtttttaactaaattgttacttgcctttctcacccagttaatcagtctctgtacttgtttccctttttgaaacaagtgtcttggttaactaattctgttttatggttgtgctaaattcatagcaggtgccttattctttgcttttagtcaaaccattccatatcagaattttccttggtttactatagatatttggctttaagttgttgtttgtgttttttaatgtacaatgttctgataaatttgactgttaaattgctatagctagcaatcattttacatatgtaaaattgcattccctttgtatttcatgtgtaattcaccaattaagtgcagtttatattcaggttggattatgcatgtttaggtaaacgaaagctgtgtcttacttgatttattctttaaaaataaagttccctgaatattgatgcttttcttctaaacggaaatgattttacagttatctgagtgtaccttttatagttagtagaaaatgattttaaagaatgtttagtattgtacttaaatggtatgcagaggcacagatgtaaggtttataactggaaataggtggtaagaaaaatatatagaaagcacaatgatttgaatatttttccacttaggatttcctaatctccttgtcatccaattcaagctcaagatgaagcacaattctttgatctccctttgccagttgaattttatagatcatctaatgttgagcacagtatgagaataaatattggggttgtcaacattactcagttactctttgtggtttagctctaacatttcaacaagttgtcaattaattgtatctgttgggttgtatataatgttgctcaaaataattaagtggacttccaaaaataagatttccattgtaacaggatgcattgtgatgggctttgacttacattaaagaaatgtggatagtcaactgcaaaaaaacacacacaaccaacacaaacaaag

SEQ ID NO: 292472 - DNA, 2914 bp, Homo sapiens
ggagtgacgcggaaaaggcgcccgaacgcgcacgcgcaaatctagggcgacgcttgacagagcttgggagggtgcgcctgctttcgccctccttctccagcgggaggggcgcgcacttccgcggggcggagtccgtctagtgctgacgttggcagccgaacccaaagtagatcgaggcggcgggctgcacattcccgttgttgcgttgcgtttccttcctctttcactccgcgctcacggcggcggccaaagcggcggcgacggcggcgcgagaacgacccggcggccagttctcttcctcctgcgcacctgccccgctcggtcagtcagtcggcggccggcgcccggcttgtgctcagacctcgcgcttgcggcgcccaggcccagcggccgtagctagcgtctggcctgagaacctcggcgctccggcggcgcgggcaccacgagccgagcctcgcagcggctccagaggaggcaggcgagtgagcgagtccgaggggtggccggggcaggtggtggcgccgcgaagatggtcgccaagcaaaggatccgtatggccaacgagaagcacagcaagaacatcacccagcgcggcaacgtcgccaagacctcgagaaatgcccccgaagagaaggcgtctgtaggaccctggttattggctctcttcatttttgttgtctgtggttctgcaattttccagattattcaaagtatcaggatgggcatgtgaagtgactgaccttaagatgtttccattctcctgtgaattttaacttgaactcattcctgatgtttgataccctggttgaaaacaattcagtaaagcatcctgcctcagaatgactttcctatcatgcttcatgtgtcattccaaggtttcttcatgagtcattccaagttttctagtccataccacagtgccttgcaaaaaacaccacatgaataaagcaataaaatttgattgttaagatacagtagtggaccctacttattcagtcaattaagagtaagtttttttatgtggttattaaaacagtatgaacaattagtctaactctgcatagacagggtctagattttgttaacccaagatgccataaaaaaaaacttgatcgttttctgacttaatcagttactgtggtttcactaaaagctaccgtggtggagtgaagtcagtcagggaaggtttgtttatgttacatttatttcaccagaactattttaatatatcaaaggggtttactatgccaaacaaaattctagggaaaaatactgctaaaaatggatgcctcatcagaacatgctgttgagtccaatgtgccataagacattttagcatgttaaatagcacttttaatagcaaaaaaaggcacatcaactgcgaagttatccttagtttgcaaatgctttttctagattaatgatttttcaatcattagggtactagacacatcagcctaaagtggcatctggaattgaatggatttactgataatgatcagtctttagtcttccctttgttatatgactttataggttatgattgatcaaatttacgttttactaatggtaagggtgagggtcatagggcaggttttgggttttctagtactgttgaaaactgcaagtattggctatttgtatacttagccataacttggtgaaaaaaaacctgagcagtgtctatgtattaatgcgttggaaagaaagctgcttgtgtttgctttgttaattgcctcaggatatttcttttaaaataagctgttttaagaggaacagaagggaaatctgctacctagtctatacacagcgtgaacctcacagggggcttctgataccctcaaacatggagaacagtaagggagcagagtggttaaggactttcaggaacttaactattctggaataaggaatgaatcaactgaccttgggccagcaggtttttaactaaattgttacttgcctttctcacccagttaatcagtctctgtacttgtttccctttttgaaacaagtgtcttggttaactaattctgttttatggttgtgctaaattcatagcaggtgccttattctttgcttttagtcaaaccattccatatcagaattttccttggtttactatagatatttggctttaagttgttgtttgtgttttttaatgtacaatgttctgataaatttgactgttaaattgctatagctagcaatcattttacatatgtaaaattgcattccctttgtatttcatgtgtaattcaccaattaagtgcagtttatattcaggttggattatgcatgtttaggtaaacgaaagctgtgtcttacttgatttattctttaaaaataaagttccctgaatattgatgcttttcttctaaacggaaatgattttacagttatctgagtgtaccttttatagttagtagaaaatgattttaaagaatgtttagtattgtacttaaatggtatgcagaggcacagatgtaaggtttataactggaaataggtggtaagaaaaatatatagaaagcacaatgatttgaatatttttccacttaggatttcctaatctccttgtcatccaattcaagctcaagatgaagcacaattctttgatctccctttgccagttgaattttatagatcatctaatgttgagcacagtatgagaataaatattggggttgtcaacattactcagttactctttgtggtttagctctaacatttcaacaagttgtcaattaattgtatctgttgggttgtatataatgttgctcaaaataattaagtggacttccaaaaataagatttccattgtaacaggatgcattgtgatgggctttgacttacattaaagaaatgtggatagtcaactgcaaaaaaacacacacaaccaacacaaacaaag

SEQ ID NO: 292473 - DNA, 3169 bp, Homo sapiens
ggagtgacgcggaaaaggcgcccgaacgcgcacgcgcaaatctagggcgacgcttgacagagcttgggagggtgcgcctgctttcgccctccttctccagcgggaggggcgcgcacttccgcggggcggagtccgtctagtgctgacgttggcagccgaacccaaagtagatcgaggcggcgggctgcacattcccgttgttgcgttgcgtttccttcctctttcactccgcgctcacggcggcggccaaagcggcggcgacggcggcgcgagaacgacccggcggccagttctcttcctcctgcgcacctgccccgctcggtcagtcagtcggcggccggcgcccggcttgtgctcagacctcgcgcttgcggcgcccaggcccagcggccgtagctagcgtctggcctgagaacctcggcgctccggcggcgcgggcaccacgagccgagcctcgcagcggctccagaggaggcaggcgagtgagcgagtccgaggggtggccggggcaggtggtggcgccgcgaagatggtcgccaagcaaaggatccgtatggccaacgagaagcacagcaagaacatcacccagcgcggcaacgtcgccaagacctcgagaaatgcccccgaagagaaggcgtctgtaggaccctggttattggctctcttcatttttgttgtctgtggttctgcaattttccagattattcaaagtatcaggatgggcatgtgaagtgactgaccttaagatgtttccattctcctgtgaattttaacttgaactcattcctgatgtttgataccctggttgaaaacaattcagtaaagcatcctgcctcagaatgactttcctatcatgcttcatgtgtcattccaaggtttcttcatgagtcattccaagttttctagtccataccacagtgccttgcaaaaaacaccacatgaataaagcaataaaatttgattgttaagatacagtagtggaccctacttattcagtcaattaagagtaagtttttttatgtggttattaaaacagtatgaacaattagtctaactctgcatagacagggtctagattttgttaacccaaatgtataactgcagttagcttaaattacaatttgaagtcttgtggtttttatatagctaggcactttattactcttttgaactgaaagcacactcccttataggttcatgtaactgtcctgtaataaggtgcttataaatggaacaactacacagcctagttttgccacaacctttagcatctaaaaagttttaaaagcttctaaatgtctaatataaagggagatgcttatagccacaacatctattttaccaatattgtttccattacactaccttggattttgcatgagtgagtatagtaacccaagatgccataaaaaaaaacttgatcgttttctgacttaatcagttactgtggtttcactaaaagctaccgtggtggagtgaagtcagtcagggaaggtttgtttatgttacatttatttcaccagaactattttaatatatcaaaggggtttactatgccaaacaaaattctagggaaaaatactgctaaaaatggatgcctcatcagaacatgctgttgagtccaatgtgccataagacattttagcatgttaaatagcacttttaatagcaaaaaaaggcacatcaactgcgaagttatccttagtttgcaaatgctttttctagattaatgatttttcaatcattagggtactagacacatcagcctaaagtggcatctggaattgaatggatttactgataatgatcagtctttagtcttccctttgttatatgactttataggttatgattgatcaaatttacgttttactaatggtaagggtgagggtcatagggcaggttttgggttttctagtactgttgaaaactgcaagtattggctatttgtatacttagccataacttggtgaaaaaaaacctgagcagtgtctatgtattaatgcgttggaaagaaagctgcttgtgtttgctttgttaattgcctcaggatatttcttttcagcgtgaacctcacagggggcttctgataccctcaaacatggagaacagtaagggagcagagtggttaaggactttcaggaacttaactattctggaataaggaatgaatcaactgaccttgggccagcaggtttttaactaaattgttacttgcctttctcacccagttaatcagtctctgtacttgtttccctttttgaaacaagtgtcttggttaactaattctgttttatggttgtgctaaattcatagcaggtgccttattctttgcttttagtcaaaccattccatatcagaattttccttggtttactatagatatttggctttaagttgttgtttgtgttttttaatgtacaatgttctgataaatttgactgttaaattgctatagctagcaatcattttacatatgtaaaattgcattccctttgtatttcatgtgtaattcaccaattaagtgcagtttatattcaggttggattatgcatgtttaggtaaacgaaagctgtgtcttacttgatttattctttaaaaataaagttccctgaatattgatgcttttcttctaaacggaaatgattttacagttatctgagtgtaccttttatagttagtagaaaatgattttaaagaatgtttagtattgtacttaaatggtatgcagaggcacagatgtaaggtttataactggaaataggtggtaagaaaaatatatagaaagcacaatgatttgaatatttttccacttaggatttcctaatctccttgtcatccaattcaagctcaagatgaagcacaattctttgatctccctttgccagttgaattttatagatcatctaatgttgagcacagtatgagaataaatattggggttgtcaacattactcagttactctttgtggtttagctctaacatttcaacaagttgtcaattaattgtatctgttgggttgtatataatgttgctcaaaataattaagtggacttccaaaaataagatttccattgtaacaggatgcattgtgatgggctttgacttacattaaagaaatgtggatagtcaactgcaaaaaaacacacacaaccaacacaaacaaag

SEQ ID NO: 292474 - DNA, 2694 bp, Homo sapiens
ggagtgacgcggaaaaggcgcccgaacgcgcacgcgcaaatctagggcgacgcttgacagagcttgggagggtgcgcctgctttcgccctccttctccagcgggaggggcgcgcacttccgcggggcggagtccgtctagtgctgacgttggcagccgaacccaaagtagatcgaggcggcgggctgcacattcccgttgttgcgttgcgtttccttcctctttcactccgcgctcacggcggcggccaaagcggcggcgacggcggcgcgagaacgacccggcggccagttctcttcctcctgcgcacctgccccgctcggtcagtcagtcggcggccggcgcccggcttgtgctcagacctcgcgcttgcggcgcccaggcccagcggccgtagctagcgtctggcctgagaacctcggcgctccggcggcgcgggcaccacgagccgagcctcgcagcggctccagaggaggcaggcgagtgagcgagtccgaggggtggccggggcaggtggtggcgccgcgaagatggtcgccaagcaaaggatccgtatggccaacgagaagcacagcaagaacatcacccagcgcggcaacgtcgccaagacctcgagaaatgcccccgaagagaaggcgtctgtaggaccctggttattggctctcttcatttttgttgtctgtggttctgcaattttccagattattcaaagtatcaggatgggcatgtgaagtgactgaccttaagatgtttccattctcctgtgaattttaacttgaactcattcctgatgtttgataccctggttgaaaacaattcagtaaagcatcctgcctcagaatgactttcctatcatgcttcatgtgtcattccaaggtttcttcatgagtcattccaagttttctagtccataccacagtgccttgcaaaaaacaccacatgaataaagcaataaaatttgattgttaagatacagtagtggaccctacttattcagtcaattaagagtaagtttttttatgtggttattaaaacagtatgaacaattagtctaactctgcatagacagggtctagattttgttaacccaaatgtataactgcagttagcttaaattacaatttgaagtcttgtggtttttatatagctaggcactttattactcttttgaactgaaagcacactcccttataggttcatgtaactgtcctgtaataaggtgcttataaatggaacaactacacagcctagttttgccacaacctttagcatctaaaaagttttaaaagcttctaaatgtctaatataaagggagatgcttatagccacaacatctattttaccaatattgtttccattacactaccttggattttgcatgagtgagtatagtaacccaagatgccataaaaaaaaacttgatcgttttctgacttaatcagttactgtggtttcactaaaagctaccgtggtggagtgaagtcagtcagggaaggtttgtttatgttacatttatttcaccagaactattttaatatatcaaaggggtttactatgccaaacaaaattctagggaaaaatactgctaaaaatggatgcctcatcagaacatgctgttgagtccaatgtgccataagacattttagcatgttaaatagcacttttaatagcaaaaaaaggcacatcaactgcgaagttatccttagtttgcaaatgctttttctagattaatgatttttcaatcattagggtactagacacatcagcctaaagtggcatctggaattgaatggatttactgataatgatcagtctttagtcttccctttgttatatgactttataggttatgattgatcaaatttacgttttactaatggtaagggtgagggtcatagggcaggttttgggttttctagtactgttgaaaactgcaagtattggctatttgtatacttagccataacttggtgaaaaaaaacctgagcagtgtctatgtattaatgcgttggaaagaaagctgcttgtgtttgctttgttaattgcctcaggatatttcttttaaaataagctgttttaagaggaacagaagggaaatctgctacctagtctatacacagcgtgaacctcacagggggcttctgataccctcaaacatggagaacagtaagggagcagagtggttaaggactttcaggaacttaactattctggaataaggaatgaatcaactgaccttgggccagcaggtttttaactaaattgttacttgcctttctcacccagttaatcagtctctgtacttgtttccctttttgaaacaagtgtcttggttaactaattctgttttatggttgtgctaaattcatagcaggtgccttattctttgcttttagtcaaaccattccatatcagaattttccttggtttactatagatatttggctttaagttgttgtttgtgttttttaatgtacaatgttctgataaatttgactgttaaattgctatagctagcaatcattttacatatgtaaaattgcattccctttgtatttcatgtgtaattcaccaattaagtgcagtttatattcaggttggattatgcatgtttaggtaaacgaaagctgtgtcttacttgatttattctttaaaaataaagttcatcatattgaatgcgggccgagctcgatta

SEQ ID NO: 292475 - DNA, 2507 bp, Homo sapiens
ggagtgacgcggaaaaggcgcccgaacgcgcacgcgcaaatctagggcgacgcttgacagagcttgggagggtgcgcctgctttcgccctccttctccagcgggaggggcgcgcacttccgcggggcggagtccgtctagtgctgacgttggcagccgaacccaaagtagatcgaggcggcgggctgcacattcccgttgttgcgttgcgtttccttcctctttcactccgcgctcacggcggcggccaaagcggcggcgacggcggcgcgagaacgacccggcggccagttctcttcctcctgcgcacctgccccgctcggtcagtcagtcggcggccggcgcccggcttgtgctcagacctcgcgcttgcggcgcccaggcccagcggccgtagctagcgtctggcctgagaacctcggcgctccggcggcgcgggcaccacgagccgagcctcgcagcggctccagaggaggcaggcgagtgagcgagtccgaggggtggccggggcaggtggtggcgccgcgaagatggtcgccaagcaaaggatccgtatggccaacgagaagcacagcaagaacatcacccagcgcggcaacgtcgccaagacctcgagaaatgcccccgaagagaaggcgtctgtaggaccctggttattggctctcttcatttttgttgtctgtggttctgcaattttccagattattcaaagtatcaggatgggcatgtgaagtgactgaccttaagatgtttccattctcctgtgaattttaacttgaactcattcctgatgtttgataccctggttgaaaacaattcagtaaagcatcctgcctcagaatgactttcctatcatgcttcatgtgtcattccaaggtttcttcatgagtcattccaagttttctagtccataccacagtgccttgcaaaaaacaccacatgaataaagcaataaaatttgattgttaagatacagtagtggaccctacttattcagtcaattaagagtaagtttttttatgtggttattaaaacagtatgaacaattagtctaactctgcatagacagggtctagattttgttaacccaaatgtataactgcagttagcttaaattacaatttgaagtcttgtggtttttatatagctaggcactttattactcttttgaactgaaagcacactcccttataggttcatgtaactgtcctgtaataaggtgcttataaatggaacaactacacagcctagttttgccacaacctttagcatctaaaaagttttaaaagcttctaaatgtctaatataaagggagatgcttatagccacaacatctattttaccaatattgtttccattacactaccttggattttgcatgagtgagtatagtaacccaagatgccataaaaaaaaacttgatcgttttctgacttaatcagttactgtggtttcactaaaagctaccgtggtggagtgaagtcagtcagggaaggtttgtttatgttacatttatttcaccagaactattttaatatatcaaaggggtttactatgccaaacaaaattctagggaaaaatactgctaaaaatggatgcctcatcagaacatgctgttgagtccaatgtgccataagacattttagcatgttaaatagcacttttaatagcaaaaaaaggcacatcaactgcgaagttatccttagtttgcaaatgctttttctagattaatgatttttcaatcattagggtactagacacatcagcctaaagtggcatctggaattgaatggatttactgataatgatcagtctttagtcttccctttgttatatgactttataggttatgattgatcaaatttacgttttactaatggtaagggtgagggtcatagggcaggttttgggttttctagtactgttgaaaactgcaagtattggctatttgtatacttagccataacttggtgaaaaaaaacctgagcagtgtctatgtattaatgcgttggaaagaaagctgcttgtgtttgctttgttaattgcctcaggatatttcttttaaaataagctgttttaagaggaacagaagggaaatctgctacctagtctatacacagcgtgaacctcacagggggcttctgataccctcaaacatggagaacagtaagggagcagagtggttaaggactttcaggaacttaactattctggaataaggaatgaatcaactgaccttgggccagcaggtttttaactaaattgttacttgcctttctcacccagttaatcagtctctgtacttgtttccctttttgaaacaagtgtcttggttaactaattctgttttatggttgtgctaaattcatagcaggtgccttattctttgcttttagtcaaaccattccatatcagaattttccttggtttactatagatatttggctttaagttgttgtttgtgttttttaatgtacaatcatattgaatgcgggccgagctcgatta

SEQ ID NO: 292476 - DNA, 3101 bp, Homo sapiens
ggagtgacgcggaaaaggcgcccgaacgcgcacgcgcaaatctagggcgacgcttgacagagcttgggagggtgcgcctgctttcgccctccttctccagcgggaggggcgcgcacttccgcggggcggagtccgtctagtgctgacgttggcagccgaacccaaagtagatcgaggcggcgggctgcacattcccgttgttgcgttgcgtttccttcctctttcactccgcgctcacggcggcggccaaagcggcggcgacggcggcgcgagaacgacccggcggccagttctcttcctcctgcgcacctgccccgctcggtcagtcagtcggcggccggcgcccggcttgtgctcagacctcgcgcttgcggcgcccaggcccacggctccagaggaggcaggcgagtgagcgagtccgaggggtggccggggccaacgagaagcacagcaagaacatcacccagcgcggcaacgtcgccaagacctcgagaaatgcccccgaagagaaggcgtctgtaggaccctggttattggctctcttcatttttgttgtctgtggttctgcaattttccagattattcaaagtatcaggatgggcatgtgaagtgactgaccttaagatgtttccattctcctgtgaattttaacttgaactcattcctgatgtttgataccctggttgaaaacaattcagtaaagcatcctgcctcagaatgactttcctatcatgcttcatgtgtcattccaaggtttcttcatgagtcattccaagttttctagtccataccacagtgccttgcaaaaaacaccacatgaataaagcaataaaatttgattgttaagatacagtagtggaccctacttattcagtcaattaagagtaagtttttttatgtggttattaaaacagtatgaacaattagtctaactctgcatagacagggtctagattttgttaacccaaatgtataactgcagttagcttaaattacaatttgaagtcttgtggtttttatatagctaggcactttattactcttttgaactgaaagcacactcccttataggttcatgtaactgtcctgtaataaggtgcttataaatggaacaactacacagcctagttttgccacaacctttagcatctaaaaagttttaaaagcttctaaatgtctaatataaagggagatgcttatagccacaacatctattttaccaatattgtttccattacactaccttggattttgcatgagtgagtatagtaacccaagatgccataaaaaaaaacttgatcgttttctgacttaatcagttactgtggtttcactaaaagctaccgtggtggagtgaagtcagtcagggaaggtttgtttatgttacatttatttcaccagaactattttaatatatcaaaggggtttactatgccaaacaaaattctagggaaaaatactgctaaaaatggatgcctcatcagaacatgctgttgagtccaatgtgccataagacattttagcatgttaaatagcacttttaatagcaaaaaaaggcacatcaactgcgaagttatccttagtttgcaaatgctttttctagattaatgatttttcaatcattagggtactagacacatcagcctaaagtggcatctggaattgaatggatttactgataatgatcagtctttagtcttccctttgttatatgactttataggttatgattgatcaaatttacgttttactaatggtaagggtgagggtcatagggcaggttttgggttttctagtactgttgaaaactgcaagtattggctatttgtatacttagccataacttggtgaaaaaaaacctgagcagtgtctatgtattaatgcgttggaaagaaagctgcttgtgtttgctttgttaattgcctcaggatatttcttttaaaataagctgttttaagaggaacagaagggaaatctgctacctagtctatacacagcgtgaacctcacagggggcttctgataccctcaaacatggagaacagtaagggagcagagtggttaaggactttcaggaacttaactattctggaataaggaatgaatcaactgaccttgggccagcaggtttttaactaaattgttacttgcctttctcacccagttaatcagtctctgtacttgtttccctttttgaaacaagtgtcttggttaactaattctgttttatggttgtgctaaattcatagcaggtgccttattctttgcttttagtcaaaccattccatatcagaattttccttggtttactatagatatttggctttaagttgttgtttgtgttttttaatgtacaatgttctgataaatttgactgttaaattgctatagctagcaatcattttacatatgtaaaattgcattccctttgtatttcatgtgtaattcaccaattaagtgcagtttatattcaggttggattatgcatgtttaggtaaacgaaagctgtgtcttacttgatttattctttaaaaataaagttccctgaatattgatgcttttcttctaaacggaaatgattttacagttatctgagtgtaccttttatagttagtagaaaatgattttaaagaatgtttagtattgtacttaaatggtatgcagaggcacagatgtaaggtttataactggaaataggtggtaagaaaaatatatagaaagcacaatgatttgaatatttttccacttaggatttcctaatctccttgtcatccaattcaagctcaagatgaagcacaattctttgatctccctttgccagttgaattttatagatcatctaatgttgagcacagtatgagaataaatattggggttgtcaacattactcagttactctttgtggtttagctctaacatttcaacaagttgtcaattaattgtatctgttgggttgtatataatgttgctcaaaataattaagtggacttccaaaaataagatttccattgtaacaggatgcattgtgatgggctttgacttacattaaagaaatgtggatagtcaactgcaaaaaaacacacacaaccaacacaaacaaag

SEQ ID NO: 292477 - DNA, 2660 bp, Homo sapiens
accattacggctagtacgaggccggggttaatcggccgaggccgaccagcagaaatgcccccgaagagaaggcgtctgtaggaccctggttattggctctcttcatttttgttgtctgtggttctgcaattttccagattattcaaagtatcaggatgggcatgtgaagtgactgaccttaagatgtttccattctcctgtgaattttaacttgaactcattcctgatgtttgataccctggttgaaaacaattcagtaaagcatcctgcctcagaatgactttcctatcatgcttcatgtgtcattccaaggtttcttcatgagtcattccaagttttctagtccataccacagtgccttgcaaaaaacaccacatgaataaagcaataaaatttgattgttaagatacagtagtggaccctacttattcagtcaattaagagtaagtttttttatgtggttattaaaacagtatgaacaattagtctaactctgcatagacagggtctagattttgttaacccaaatgtataactgcagttagcttaaattacaatttgaagtcttgtggtttttatatagctaggcactttattactcttttgaactgaaagcacactcccttataggttcatgtaactgtcctgtaataaggtgcttataaatggaacaactacacagcctagttttgccacaacctttagcatctaaaaagttttaaaagcttctaaatgtctaatataaagggagatgcttatagccacaacatctattttaccaatattgtttccattacactaccttggattttgcatgagtgagtatagtaacccaagatgccataaaaaaaaacttgatcgttttctgacttaatcagttactgtggtttcactaaaagctaccgtggtggagtgaagtcagtcagggaaggtttgtttatgttacatttatttcaccagaactattttaatatatcaaaggggtttactatgccaaacaaaattctagggaaaaatactgctaaaaatggatgcctcatcagaacatgctgttgagtccaatgtgccataagacattttagcatgttaaatagcacttttaatagcaaaaaaaggcacatcaactgcgaagttatccttagtttgcaaatgctttttctagattaatgatttttcaatcattagggtactagacacatcagcctaaagtggcatctggaattgaatggatttactgataatgatcagtctttagtcttccctttgttatatgactttataggttatgattgatcaaatttacgttttactaatggtaagggtgagggtcatagggcaggttttgggttttctagtactgttgaaaactgcaagtattggctatttgtatacttagccataacttggtgaaaaaaaacctgagcagtgtctatgtattaatgcgttggaaagaaagctgcttgtgtttgctttgttaattgcctcaggatatttcttttaaaataagctgttttaagaggaacagaagggaaatctgctacctagtctatacacagcgtgaacctcacagggggcttctgataccctcaaacatggagaacagtaagggagcagagtggttaaggactttcaggaacttaactattctggaataaggaatgaatcaactgaccttgggccagcaggtttttaactaaattgttacttgcctttctcacccagttaatcagtctctgtacttgtttccctttttgaaacaagtgtcttggttaactaattctgttttatggttgtgctaaattcatagcaggtgccttattctttgcttttagtcaaaccattccatatcagaattttccttggtttactatagatatttggctttaagttgttgtttgtgttttttaatgtacaatgttctgataaatttgactgttaaattgctatagctagcaatcattttacatatgtaaaattgcattccctttgtatttcatgtgtaattcaccaattaagtgcagtttatattcaggttggattatgcatgtttaggtaaacgaaagctgtgtcttacttgatttattctttaaaaataaagttccctgaatattgatgcttttcttctaaacggaaatgattttacagttatctgagtgtaccttttatagttagtagaaaatgattttaaagaatgtttagtattgtacttaaatggtatgcagaggcacagatgtaaggtttataactggaaataggtggtaagaaaaatatatagaaagcacaatgatttgaatatttttccacttaggatttcctaatctccttgtcatccaattcaagctcaagatgaagcacaattctttgatctccctttgccagttgaattttatagatcatctaatgttgagcacagtatgagaataaatattggggttgtcaacattactcagttactctttgtggtttagctctaacatttcaacaagttgtcaattaattgtatctgttgggttgtatataatgttgctcaaaataattaagtggacttccaaaaataagatttccattgtaacaggatgcattgtgatgggctttgacttacattaaagaaatgtggatagtcaactgcaaaaaaacacacacaaccaacacaaacaaag

SEQ ID NO: 292478 - DNA, 3266 bp, Homo sapiens
ggagtgacgcggaaaaggcgcccgaacgcgcacgcgcaaatctagggcgacgcttgacagagcttgggagggtgcgcctgctttcgccctccttctccagcgggaggggcgcgcacttccgcggggcggagtccgtctagtgctgacgttggcagccgaacccaaagtagatcgaggcggcgggctgcacattcccgttgttgcgttgcgtttccttcctctttcactccgcgctcacggcggcggccaaagcggcggcgacggcggcgcgagaacgacccggcggccagttctcttcctcctgcgcacctgccccgctcggtcagtcagtcggcggccggcgcccggcttgtgctcagacctcgcgcttgcggcgcccaggcccagcggccgtagctagcgtctggcctgagaacctcggcgctccggcggcgcgggcaccacgagccgagcctcgcagcggctccagaggaggcaggcgagtgagcgagtccgaggggtggccggggcaggtggtggcgccgcgaagatggtcgccaagcaaaggatccgtatggccaacgagaagcacagcaagaacatcacccagcgcggcaacgtcgccaagacctcgagaaatgcccccgaagagaaggcgtctgtaggaccctggttattggctctcttcatttttgttgtctgtggttctgcaattttccagattattcaaagtatcaggtcagtcacttcacatgcccatcctgatactttgaataatctggatgggcatgtgaagtgactgaccttaagatgtttccattctcctgtgaattttaacttgaactcattcctgatgtttgataccctggttgaaaacaattcagtaaagcatcctgcctcagaatgactttcctatcatgcttcatgtgtcattccaaggtttcttcatgagtcattccaagttttctagtccataccacagtgccttgcaaaaaacaccacatgaataaagcaataaaatttgattgttaagatacagtagtggaccctacttattcagtcaattaagagtaagtttttttatgtggttattaaaacagtatgaacaattagtctaactctgcatagacagggtctagattttgttaacccaaatgtataactgcagttagcttaaattacaatttgaagtcttgtggtttttatatagctaggcactttattactcttttgaactgaaagcacactcccttataggttcatgtaactgtcctgtaataaggtgcttataaatggaacaactacacagcctagttttgccacaacctttagcatctaaaaagttttaaaagcttctaaatgtctaatataaagggagatgcttatagccacaacatctattttaccaatattgtttccattacactaccttggattttgcatgagtgagtatagtaacccaagatgccataaaaaaaaacttgatcgttttctgacttaatcagttactgtggtttcactaaaagctaccgtggtggagtgaagtcagtcagggaaggtttgtttatgttacatttatttcaccagaactattttaatatatcaaaggggtttactatgccaaacaaaattctagggaaaaatactgctaaaaatggatgcctcatcagaacatgctgttgagtccaatgtgccataagacattttagcatgttaaatagcacttttaatagcaaaaaaaggcacatcaactgcgaagttatccttagtttgcaaatgctttttctagattaatgatttttcaatcattagggtactagacacatcagcctaaagtggcatctggaattgaatggatttactgataatgatcagtctttagtcttccctttgttatatgactttataggttatgattgatcaaatttacgttttactaatggtaagggtgagggtcatagggcaggttttgggttttctagtactgttgaaaactgcaagtattggctatttgtatacttagccataacttggtgaaaaaaaacctgagcagtgtctatgtattaatgcgttggaaagaaagctgcttgtgtttgctttgttaattgcctcaggatatttcttttaaaataagctgttttaagaggaacagaagggaaatctgctacctagtctatacacagcgtgaacctcacagggggcttctgataccctcaaacatggagaacagtaagggagcagagtggttaaggactttcaggaacttaactattctggaataaggaatgaatcaactgaccttgggccagcaggtttttaactaaattgttacttgcctttctcacccagttaatcagtctctgtacttgtttccctttttgaaacaagtgtcttggttaactaattctgttttatggttgtgctaaattcatagcaggtgccttattctttgcttttagtcaaaccattccatatcagaattttccttggtttactatagatatttggctttaagttgttgtttgtgttttttaatgtacaatgttctgataaatttgactgttaaattgctatagctagcaatcattttacatatgtaaaattgcattccctttgtatttcatgtgtaattcaccaattaagtgcagtttatattcaggttggattatgcatgtttaggtaaacgaaagctgtgtcttacttgatttattctttaaaaataaagttccctgaatattgatgcttttcttctaaacggaaatgattttacagttatctgagtgtaccttttatagttagtagaaaatgattttaaagaatgtttagtattgtacttaaatggtatgcagaggcacagatgtaaggtttataactggaaataggtggtaagaaaaatatatagaaagcacaatgatttgaatatttttccacttaggatttcctaatctccttgtcatccaattcaagctcaagatgaagcacaattctttgatctccctttgccagttgaattttatagatcatctaatgttgagcacagtatgagaataaatattggggttgtcaacattactcagttactctttgtggtttagctctaacatttcaacaagttgtcaattaattgtatctgttgggttgtatataatgttgctcaaaataattaagtggacttccaaaaataagatttccattgtaacaggatgcattgtgatgggctttgacttacattaaagaaatgtggatagtcaactgcaaaaaaacacacacaaccaacacaaacaaag

SEQ ID NO: 292479 - DNA, 3025 bp, Homo sapiens
tctgtttaacgtttcactttgcctttcttcttcacttaccaattggaagctttcctgataaatggatgagagccaagcagtttatataacctgaagatgattgaatttcagctttgtgagaatgaggaaacatgcatgtgttacaggccaggccttaaaaggatgcttataaaccaaaataattctatgctggaaaaacctgttggctttggtgctttaagttctttgtaaaatgattacttatctgcaagttctcttggatacttagacataaagttcagcgaagctaagataaaaaaataactcagggatatttcattgttttatttattcagacaggcctgtcttcacttcttattatactgaagttatgtaccatttgcaaatgtaagagtacctttggattcttcagctaccttaataaatatttgttagacaccagacctattttattcaaagcttattttaatatttgctctttctttttacagcaattttccagattattcaaagtatcaggatgggcatgtgaagtgactgaccttaagatgtttccattctcctgtgaattttaacttgaactcattcctgatgtttgataccctggttgaaaacaattcagtaaagcatcctgcctcagaatgactttcctatcatgcttcatgtgtcattccaaggtttcttcatgagtcattccaagttttctagtccataccacagtgccttgcaaaaaacaccacatgaataaagcaataaaatttgattgttaagatacagtagtggaccctacttattcagtcaattaagagtaagtttttttatgtggttattaaaacagtatgaacaattagtctaactctgcatagacagggtctagattttgttaacccaaatgtataactgcagttagcttaaattacaatttgaagtcttgtggtttttatatagctaggcactttattactcttttgaactgaaagcacactcccttataggttcatgtaactgtcctgtaataaggtgcttataaatggaacaactacacagcctagttttgccacaacctttagcatctaaaaagttttaaaagcttctaaatgtctaatataaagggagatgcttatagccacaacatctattttaccaatattgtttccattacactaccttggattttgcatgagtgagtatagtaacccaagatgccataaaaaaaaacttgatcgttttctgacttaatcagttactgtggtttcactaaaagctaccgtggtggagtgaagtcagtcagggaaggtttgtttatgttacatttatttcaccagaactattttaatatatcaaaggggtttactatgccaaacaaaattctagggaaaaatactgctaaaaatggatgcctcatcagaacatgctgttgagtccaatgtgccataagacattttagcatgttaaatagcacttttaatagcaaaaaaaggcacatcaactgcgaagttatccttagtttgcaaatgctttttctagattaatgatttttcaatcattagggtactagacacatcagcctaaagtggcatctggaattgaatggatttactgataatgatcagtctttagtcttccctttgttatatgactttataggttatgattgatcaaatttacgttttactaatggtaagggtgagggtcatagggcaggttttgggttttctagtactgttgaaaactgcaagtattggctatttgtatacttagccataacttggtgaaaaaaaacctgagcagtgtctatgtattaatgcgttggaaagaaagctgcttgtgtttgctttgttaattgcctcaggatatttcttttaaaataagctgttttaagaggaacagaagggaaatctgctacctagtctatacacagcgtgaacctcacagggggcttctgataccctcaaacatggagaacagtaagggagcagagtggttaaggactttcaggaacttaactattctggaataaggaatgaatcaactgaccttgggccagcaggtttttaactaaattgttacttgcctttctcacccagttaatcagtctctgtacttgtttccctttttgaaacaagtgtcttggttaactaattctgttttatggttgtgctaaattcatagcaggtgccttattctttgcttttagtcaaaccattccatatcagaattttccttggtttactatagatatttggctttaagttgttgtttgtgttttttaatgtacaatgttctgataaatttgactgttaaattgctatagctagcaatcattttacatatgtaaaattgcattccctttgtatttcatgtgtaattcaccaattaagtgcagtttatattcaggttggattatgcatgtttaggtaaacgaaagctgtgtcttacttgatttattctttaaaaataaagttccctgaatattgatgcttttcttctaaacggaaatgattttacagttatctgagtgtaccttttatagttagtagaaaatgattttaaagaatgtttagtattgtacttaaatggtatgcagaggcacagatgtaaggtttataactggaaataggtggtaagaaaaatatatagaaagcacaatgatttgaatatttttccacttaggatttcctaatctccttgtcatccaattcaagctcaagatgaagcacaattctttgatctccctttgccagttgaattttatagatcatctaatgttgagcacagtatgagaataaatattggggttgtcaacattactcagttactctttgtggtttagctctaacatttcaacaagttgtcaattaattgtatctgttgggttgtatataatgttgctcaaaataattaagtggacttccaaaaataagatttccattgtaacaggatgcattgtgatgggctttgacttacattaaagaaatgtggatagtcaactgcaaaaaaacacacacaaccaacacaaacaaag

SEQ ID NO: 292480 - DNA, 2766 bp, Homo sapiens
gttgcaatgtcattaaggagagaaggaagagaagtaagccgagggcgttttgattgtgtagtaagggtggaaggtgattttatcggaatgggaggtgattcctagggggttgtttgatcccgtttcgtgcaagaataggaggtggagtgctgctagggctgcaataatgaagggcaagatgaagtgaaaggtaaagaattgtgtgagggtgggaccgtctactgagtagcctcctcagattcattgcaacacggtctctggatgggcatgtgaagtgactgaccttaagatgtttccattctcctgtgaattttaacttgaactcattcctgatgtttgataccctggttgaaaacaattcagtaaagcatcctgcctcagaatgactttcctatcatgcttcatgtgtcattccaaggtttcttcatgagtcattccaagttttctagtccataccacagtgccttgcaaaaaacaccacatgaataaagcaataaaatttgattgttaagatacagtagtggaccctacttattcagtcaattaagagtaagtttttttatgtggttattaaaacagtatgaacaattagtctaactctgcatagacagggtctagattttgttaacccaaatgtataactgcagttagcttaaattacaatttgaagtcttgtggtttttatatagctaggcactttattactcttttgaactgaaagcacactcccttataggttcatgtaactgtcctgtaataaggtgcttataaatggaacaactacacagcctagttttgccacaacctttagcatctaaaaagttttaaaagcttctaaatgtctaatataaagggagatgcttatagccacaacatctattttaccaatattgtttccattacactaccttggattttgcatgagtgagtatagtaacccaagatgccataaaaaaaaacttgatcgttttctgacttaatcagttactgtggtttcactaaaagctaccgtggtggagtgaagtcagtcagggaaggtttgtttatgttacatttatttcaccagaactattttaatatatcaaaggggtttactatgccaaacaaaattctagggaaaaatactgctaaaaatggatgcctcatcagaacatgctgttgagtccaatgtgccataagacattttagcatgttaaatagcacttttaatagcaaaaaaaggcacatcaactgcgaagttatccttagtttgcaaatgctttttctagattaatgatttttcaatcattagggtactagacacatcagcctaaagtggcatctggaattgaatggatttactgataatgatcagtctttagtcttccctttgttatatgactttataggttatgattgatcaaatttacgttttactaatggtaagggtgagggtcatagggcaggttttgggttttctagtactgttgaaaactgcaagtattggctatttgtatacttagccataacttggtgaaaaaaaacctgagcagtgtctatgtattaatgcgttggaaagaaagctgcttgtgtttgctttgttaattgcctcaggatatttcttttaaaataagctgttttaagaggaacagaagggaaatctgctacctagtctatacacagcgtgaacctcacagggggcttctgataccctcaaacatggagaacagtaagggagcagagtggttaaggactttcaggaacttaactattctggaataaggaatgaatcaactgaccttgggccagcaggtttttaactaaattgttacttgcctttctcacccagttaatcagtctctgtacttgtttccctttttgaaacaagtgtcttggttaactaattctgttttatggttgtgctaaattcatagcaggtgccttattctttgcttttagtcaaaccattccatatcagaattttccttggtttactatagatatttggctttaagttgttgtttgtgttttttaatgtacaatgttctgataaatttgactgttaaattgctatagctagcaatcattttacatatgtaaaattgcattccctttgtatttcatgtgtaattcaccaattaagtgcagtttatattcaggttggattatgcatgtttaggtaaacgaaagctgtgtcttacttgatttattctttaaaaataaagttccctgaatattgatgcttttcttctaaacggaaatgattttacagttatctgagtgtaccttttatagttagtagaaaatgattttaaagaatgtttagtattgtacttaaatggtatgcagaggcacagatgtaaggtttataactggaaataggtggtaagaaaaatatatagaaagcacaatgatttgaatatttttccacttaggatttcctaatctccttgtcatccaattcaagctcaagatgaagcacaattctttgatctccctttgccagttgaattttatagatcatctaatgttgagcacagtatgagaataaatattggggttgtcaacattactcagttactctttgtggtttagctctaacatttcaacaagttgtcaattaattgtatctgttgggttgtatataatgttgctcaaaataattaagtggacttccaaaaataagatttccattgtaacaggatgcattgtgatgggctttgacttacattaaagaaatgtggatagtcaactgcaaaaaaacacacacaaccaacacaaacaaag

SEQ ID NO: 292481 - DNA, 1729 bp, Homo sapiens
gggcggacctcacaacgtattttcaccagaactattttaatatatcaaaggggtttactatgccaaacaaaattctagggaaaaatactgctaaaaatggatgcctcatcagaacatgctgttgagtccaatgtgccataagacattttagcatgttaaatagcacttttaatagcaaaaaaaggcacatcaactgcgaagttatccttagtttgcaaatgctttttctagattaatgatttttcaatcattagggtactagacacatcagcctaaagtggcatctggaattgaatggatttactgataatgatcagtctttagtcttccctttgttatatgactttataggttatgattgatcaaatttacgttttactaatggtaagggtgagggtcatagggcaggttttgggttttctagtactgttgaaaactgcaagtattggctatttgtatacttagccataacttggtgaaaaaaaacctgagcagtgtctatgtattaatgcgttggaaagaaagctgcttgtgtttgctttgttaattgcctcaggatatttcttttaaaataagctgttttaagaggaacagaagggaaatctgctacctagtctatacacagcgtgaacctcacagggggcttctgataccctcaaacatggagaacagtaagggagcagagtggttaaggactttcaggaacttaactattctggaataaggaatgaatcaactgaccttgggccagcaggtttttaactaaattgttacttgcctttctcacccagttaatcagtctctgtacttgtttccctttttgaaacaagtgtcttggttaactaattctgttttatggttgtgctaaattcatagcaggtgccttattctttgcttttagtcaaaccattccatatcagaattttccttggtttactatagatatttggctttaagttgttgtttgtgttttttaatgtacaatgttctgataaatttgactgttaaattgctatagctagcaatcattttacatatgtaaaattgcattccctttgtatttcatgtgtaattcaccaattaagtgcagtttatattcaggttggattatgcatgtttaggtaaacgaaagctgtgtcttacttgatttattctttaaaaataaagttccctgaatattgatgcttttcttctaaacggaaatgattttacagttatctgagtgtaccttttatagttagtagaaaatgattttaaagaatgtttagtattgtacttaaatggtatgcagaggcacagatgtaaggtttataactggaaataggtggtaagaaaaatatatagaaagcacaatgatttgaatatttttccacttaggatttcctaatctccttgtcatccaattcaagctcaagatgaagcacaattctttgatctccctttgccagttgaattttatagatcatctaatgttgagcacagtatgagaataaatattggggttgtcaacattactcagttactctttgtggtttagctctaacatttcaacaagttgtcaattaattgtatctgttgggttgtatataatgttgctcaaaataattaagtggacttccaaaaataagatttccattgtaacaggatgcattgtgatgggctttgacttacattaaagaaatgtggatagtcaactgcaaaaaaacacacacaaccaacacaaacaaag

SEQ ID NO: 292482 - DNA, 1748 bp, Homo sapiens
agcttcctagaacagttcgtttgtgtcgcgtgcctagtagtaagtgatcatggtctttcctgtgggctaagaaatcctggtcatgataatgcttggatactgatcaatatggaagcgctcgtgcggaacacgatgcgtgctgaccaagtgccagattggagatctgaggatcgttactgaatctaatcaactaggagtccaaggcacatcaactgcgaagttatccttagtttgcaaatgctttttctagattaatgatttttcaatcattagggtactagacacatcagcctaaagtggcatctggaattgaatggatttactgataatgatcagtctttagtcttccctttgttatatgactttataggttatgattgatcaaatttacgttttactaatggtaagggtgagggtcatagggcaggttttgggttttctagtactgttgaaaactgcaagtattggctatttgtatacttagccataacttggtgaaaaaaaacctgagcagtgtctatgtattaatgcgttggaaagaaagctgcttgtgtttgctttgttaattgcctcaggatatttcttttaaaataagctgttttaagaggaacagaagggaaatctgctacctagtctatacacagcgtgaacctcacagggggcttctgataccctcaaacatggagaacagtaagggagcagagtggttaaggactttcaggaacttaactattctggaataaggaatgaatcaactgaccttgggccagcaggtttttaactaaattgttacttgcctttctcacccagttaatcagtctctgtacttgtttccctttttgaaacaagtgtcttggttaactaattctgttttatggttgtgctaaattcatagcaggtgccttattctttgcttttagtcaaaccattccatatcagaattttccttggtttactatagatatttggctttaagttgttgtttgtgttttttaatgtacaatgttctgataaatttgactgttaaattgctatagctagcaatcattttacatatgtaaaattgcattccctttgtatttcatgtgtaattcaccaattaagtgcagtttatattcaggttggattatgcatgtttaggtaaacgaaagctgtgtcttacttgatttattctttaaaaataaagttccctgaatattgatgcttttcttctaaacggaaatgattttacagttatctgagtgtaccttttatagttagtagaaaatgattttaaagaatgtttagtattgtacttaaatggtatgcagaggcacagatgtaaggtttataactggaaataggtggtaagaaaaatatatagaaagcacaatgatttgaatatttttccacttaggatttcctaatctccttgtcatccaattcaagctcaagatgaagcacaattctttgatctccctttgccagttgaattttatagatcatctaatgttgagcacagtatgagaataaatattggggttgtcaacattactcagttactctttgtggtttagctctaacatttcaacaagttgtcaattaattgtatctgttgggttgtatataatgttgctcaaaataattaagtggacttccaaaaataagatttccattgtaacaggatgcattgtgatgggctttgacttacattaaagaaatgtggatagtcaactgcaaaaaaacacacacaaccaacacaaacaaag

SEQ ID NO: 292483 - DNA, 2319 bp, Homo sapiens
  misc_feature (1360)..(1360): n is a, c, g, or t
ggagtgacgcggaaaaggcgcccgaacgcgcacgcgcaaatctagggcgacgcttgacagagcttgggagggtgcgcctgctttcgccctccttctccagcgggaggggcgcgcacttccgcggggcggagtccgtctagtgctgacgttggcagccgaacccaaagtagatcgaggcggcgggctgcacattcccgttgttgcgttgcgtttccttcctctttcactccgcgctcacggcggcggccaaagcggcggcgacggcggcgcgagaacgacccggcggccagttctcttcctcctgcgcacctgccccgctcggtcagtcagtcggcggccggcgcccggcttgtgctcagacctcgcgcttgcggcgcccaggcccagcggccgtagctagcgtctggcctgagaacctcggcgctccggcggcgcgggcaccacgagccgagcctcgcagcggctccagaggaggcaggcgagtgagcgagtccgaggggtggccggggcaggtggtggcgccgcgaagatggtcgccaagcaaaggatccgtatggccaacgagaagcacagcaagaacatcacccagcgcggcaacgtcgccaagacctcgagaaatgcccccgaagagaaggcgtctgtaggaccctggttattggctctcttcatttttgttgtctgtggttctgcaattttccagattattcaaagtatcaggatgggcatgtgaagtgactgaccttaagatgtttccattctcctgtgaattttaacttgaactcattcctgatgtttgataccctggttgaaaacaattcagtaaagcatcctgcctcagaatgactttcctatcatgcttcatgtgtcattccaaggtttcttcatgagtcattccaagttttctagtccataccacagtgccttgcaaaaaacaccacatgaataaagcaataaaatttgattctatcttcaccctacttttccctatctcttcttcccttaccccccattctcttctctcttcattttcatattcctccctcccctccctcccttctcattctccttctcattcactcctcctacttcatcactctcctcctcctccttcctctcttcttctttcctctctctcttcctccttccggctcttcctcctgcgttcccctctcttctttctcttcttctcttctttttgtgtttgtgtgttttcgtcgttctgtctttttttgtgttccttttttgtttattgttctgtatgttagttgatgttttttcttctctgttttctgtgttgctttcgtttatcttgtctttgttctttgtgttgtctctagttcttctttgtgtactgtgtttnagagaaaattttatagagatgggaaaaagagagaagaaaaaagaacccttggagctgctgtgcttatatactttcttggtgttgtaccaccaccatgtgtgttttgcggggcaactcacggtcccccgcatcgctgcgatgctccgagttccgcgcggggcccttcttcgctatggggttctctagtgtcacatcgccttcccaagaaagcatctggtctgtactaacagcttgctgtcttcagtacaggccttcataatgtcagtcacgctgctcttgcaatgatccctaatgcaaaagagttttcagtgctgataggtggtgctatgatcgatggtgtgggattgaatccatatgcacattgagcttcatttcattgtcaagaatttgaacaagttgttgcatggatggaaggtgaccagattccagcttagaccacacaggtacatcatttaaagttatctcaaatgcacctgttgacatacactggttctcaatcatgttgctcaagaagaaaaccatcatacatgcataaaccttattttcttggccccactgccagatgctaggagcttgcatgccaaagaaagcaaaaggatccttgccaacaattattaagcctattaatactagtttgaagactgacaggaaagatgctatgtgtctatatattggttgagggaggtaattctctccttcaatgcggatgtctgggtaccgctggctaataacccgcatgtactcctcaaacacccgcctataacctcaggaaacacaaatctggaacttgagcagcggccccgtggcgtactgcatctttaatctcttgctgggcacgccgcccagattggccgaggcctcgctccggaccatcgcagacgccgccactaggagaagcagcagaagcctcatcttaaatgagccagccacttcggccgccctcagacagactgcccgct

SEQ ID NO: 292484 - DNA, 1094 bp, Homo sapiens
  misc_feature (11)..(11): n is a, c, g, or t
tgactctagangatcccgcagtcaatatgatgaacagtaagggagcagagtggttaaggactttcaggaacttaactattctggaataaggaatgaatcaactgaccttgggccagcaggtttttaactaaattgttacttgcctttctcacccagttaatcagtctctgtacttgtttccctttttgaaacaagtgtcttggttaactaattctgttttatggttgtgctaaattcatagcaggtgccttattctttgcttttagtcaaaccattccatatcagaattttccttggtttactatagatatttggctttaagttgttgtttgtgttttttaatgtacaatgttctgataaatttgactgttaaattgctatagctagcaatcattttacatatgtaaaattgcattccctttgtatttcatgtgtaattcaccaattaagtgcagtttatattcaggttggattatgcatgtttaggtaaacgaaagctgtgtcttacttgatttattctttaaaaataaagttccctgaatattgatgcttttcttctaaacggaaatgattttacagttatctgagtgtaccttttatagttagtagaaaatgattttaaagaatgtttagtattgtacttaaatggtatgcagaggcacagatgtaaggtttataactggaaataggtggtaagaaaaatatatagaaagcacaatgatttgaatatttttccacttaggatttcctaatctccttgtcatccaattcaagctcaagatgaagcacaattctttgatctccctttgccagttgaattttatagatcatctaatgttgagcacagtatgagaataaatattggggttgtcaacattactcagttactctttgtggtttagctctaacatttcaacaagttgtcaattaattgtatctgttgggttgtatataatgttgctcaaaataattaagtggacttccaaaaataagatttccattgtaacaggatgcattgtgatgggctttgacttacattaaagaaatgtggatagtcaactgcaaaaaaacacacacaaccaacacaaacaaag

SEQ ID NO: 292485 - DNA, 998 bp, Homo sapiens
ggagtgacgcggaaaaggcgcccgaacgcgcacgcgcaaatctagggcgacgcttgacagagcttgggagggtgcgcctgctttcgccctccttctccagcgggaggggcgcgcacttccgcggggcggagtccgtctagtgctgacgttggcagccgaacccaaagtagatcgaggcggcgggctgcacattcccgttgttgcgttgcgtttccttcctctttcactccgcgctcacggcggcggccaaagcggcggcgacggcggcgcgagaacgacccggcggccagttctcttcctcctgcgcacctgccccgctcggtcagtcagtcggcggccggcgcccggcttgtgctcagacctcgcgcttgcggcgcccaggcccagcggccgtagctagcgtctggcctgagaacctcggcgctccggcggcgcgggcaccacgagccgagcctcgcagcggctccagaggaggcaggcgagtgagcgagtccgaggggtggccggggcaggtggtggcgccgcgaagatggtcgccaagcaaaggatccgtatggccaacgagaagcacagcaagaacatcacccagcgcggcaacgtcgccaagacctcgagaaatgcccccgaagagaaggcgtctgtaggaccctggttattggctctcttcatttttgttgtctgtggttctgcaattttccagattattcaaagtatcaggatgggcatgtgaagtgactgaccttaagatgtttccattctcctgtgaattttaacttgaactcattcctgatgtttgataccctggttgaaaacaattcagtaaagcatcctgcctcagaatgactttcctatcatgcttcatgtgtcattccaaggtttcttcatgagtcattccaagttttctagtccataccacagtgccttgcaaaaaacaccacatgaataaagcaataaaatttgatttgatgtggacaaaaaaaaaccggggcttttggggg

SEQ ID NO: 292486 - DNA, 1056 bp, Homo sapiens
  misc_feature (985)..(985): n is a, c, g, or t
  misc_feature (987)..(987): n is a, c, g, or t
  misc_feature (1043)..(1043): n is a, c, g, or t
ggagtgacgcggaaaaggcgcccgaacgcgcacgcgcaaatctagggcgacgcttgacagagcttgggagggtgcgcctgctttcgccctccttctccagcgggaggggcgcgcacttccgcggggcggagtccgtctagtgctgacgttggcagccgaacccaaagtagatcgaggcggcgggctgcacattcccgttgttgcgttgcgtttccttcctctttcactccgcgctcacggcggcggccaaagcggcggcgacggcggcgcgagaacgacccggcggccagttctcttcctcctgcgcacctgccccgctcggtcagtcagtcggcggccggcgcccggcttgtgctcagacctcgcgcttgcggcgcccaggcccagcggccgtagctagcgtctggcctgagaacctcggcgctccggcggcgcgggcaccacgagccgagcctcgcagcggctccagaggaggcaggcgagtgagcgagtccgaggggtggccggggcaggtggtggcgccgcgaagatggtcgccaagcaaaggatccgtatggccaacgagaagcacagcaagaacatcacccagcgcggcaacgtcgccaagacctcgagaaatgcccccgaagagaaggcgtctgtaggaccctggttattggctctcttcatttttgttgtctgtggttctgcaattttccagattattcaaagtatcaggatgggcatgtgaagtgactgaccttaagatgtttccattctcctgtgaattttaacttgaactcattcctgatgtttgataccctggttgaaaacaattcagtaaagcatcctgcctcagaatgactttcctatcatgcttcatgtgtcattccaaggtttcttcatgagtcattccaagttttctagtccataccacagtgccttgcaaaaaacaccacatgaataaagcaataaaatttgatgaaaactcgtgcccgatttcggnangggatttacagggcatgctgatgggtcagttaagttctggggtggttctgcaatanctctacaagtttt

SEQ ID NO: 292487 - DNA, 948 bp, Homo sapiens
ggagtgacgcggaaaaggcgcccgaacgcgcacgcgcaaatctagggcgacgcttgacagagcttgggagggtgcgcctgctttcgccctccttctccagcgggaggggcgcgcacttccgcggggcggagtccgtctagtgctgacgttggcagccgaacccaaagtagatcgaggcggcgggctgcacattcccgttgttgcgttgcgtttccttcctctttcactccgcgctcacggcggcggccaaagcggcggcgacggcggcgcgagaacgacccggcggccagttctcttcctcctgcgcacctgccccgctcggtcagtcagtcggcggccggcgcccggcttgtgctcagacctcgcgcttgcggcgcccaggcccagcggccgtagctagcgtctggcctgagaacctcggcgctccggcggcgcgggcaccacgagccgagcctcgcagcggctccagaggaggcaggcgagtgagcgagtccgaggggtggccggggcaggtggtggcgccgcgaagatggtcgccaagcaaaggatccgtatggccaacgagaagcacagcaagaacatcacccagcgcggcaacgtcgccaagacctcgagaaatgcccccgaagagaaggcgtctgtaggaccctggttattggctctcttcatttttgttgtctgtggttctgcaattttccagattattcaaagtatcaggatgggcatgtgaagtgactgaccttaagatgtttccattctcctgtgaattttaacttgaactcattcctgatgtttgataccctggttgaaaacaattcagtaaagcatcctgcctcagaatgactttcctatcatgcttcatgtgtcattccaaggtttcttcatgagtcattccaagttttctagtccataccacagtgccttgcaaccatcgtcgggtaccgagct

SEQ ID NO: 292488 - DNA, 1093 bp, Homo sapiens
tggaacctgcgactttcatacaggaacgatcatgatatggagcatagggaaacccgagtgacatgtatctatcactattctggaataaggaatgaatcaactgaccttgggccagcaggtttttaactaaattgttacttgcctttctcacccagttaatcagtctctgtacttgtttccctttttgaaacaagtgtcttggttaactaattctgttttatggttgtgctaaattcatagcaggtgccttattctttgcttttagtcaaaccattccatatcagaattttccttggtttactatagatatttggctttaagttgttgtttgtgttttttaatgtacaatgttctgataaatttgactgttaaattgctatagctagcaatcattttacatatgtaaaattgcattccctttgtatttcatgtgtaattcaccaattaagtgcagtttatattcaggttggattatgcatgtttaggtaaacgaaagctgtgtcttacttgatttattctttaaaaataaagttccctgaatattgatgcttttcttctaaacggaaatgattttacagttatctgagtgtaccttttatagttagtagaaaatgattttaaagaatgtttagtattgtacttaaatggtatgcagaggcacagatgtaaggtttataactggaaataggtggtaagaaaaatatatagaaagcacaatgatttgaatatttttccacttaggatttcctaatctccttgtcatccaattcaagctcaagatgaagcacaattctttgatctccctttgccagttgaattttatagatcatctaatgttgagcacagtatgagaataaatattggggttgtcaacattactcagttactctttgtggtttagctctaacatttcaacaagttgtcaattaattgtatctgttgggttgtatataatgttgctcaaaataattaagtggacttccaaaaataagatttccattgtaacaggatgcattgtgatgggctttgacttacattaaagaaatgtggatagtcaactgcaaaaaaacacacacaaccaacacaaacaaag

SEQ ID NO: 292489 - DNA, 1028 bp, Homo sapiens
gccgcccctactactactaaattcgcggccctcgactgaccttgggccagcaggtttttaactaaattgttacttgcctttctcacccagttaatcagtctctgtacttgtttccctttttgaaacaagtgtcttggttaactaattctgttttatggttgtgctaaattcatagcaggtgccttattctttgcttttagtcaaaccattccatatcagaattttccttggtttactatagatatttggctttaagttgttgtttgtgttttttaatgtacaatgttctgataaatttgactgttaaattgctatagctagcaatcattttacatatgtaaaattgcattccctttgtatttcatgtgtaattcaccaattaagtgcagtttatattcaggttggattatgcatgtttaggtaaacgaaagctgtgtcttacttgatttattctttaaaaataaagttccctgaatattgatgcttttcttctaaacggaaatgattttacagttatctgagtgtaccttttatagttagtagaaaatgattttaaagaatgtttagtattgtacttaaatggtatgcagaggcacagatgtaaggtttataactggaaataggtggtaagaaaaatatatagaaagcacaatgatttgaatatttttccacttaggatttcctaatctccttgtcatccaattcaagctcaagatgaagcacaattctttgatctccctttgccagttgaattttatagatcatctaatgttgagcacagtatgagaataaatattggggttgtcaacattactcagttactctttgtggtttagctctaacatttcaacaagttgtcaattaattgtatctgttgggttgtatataatgttgctcaaaataattaagtggacttccaaaaataagatttccattgtaacaggatgcattgtgatgggctttgacttacattaaagaaatgtggatagtcaactgcaaaaaaacacacacaaccaacacaaacaaag

SEQ ID NO: 292490 - DNA, 898 bp, Homo sapiens
ggagtgacgcggaaaaggcgcccgaacgcgcacgcgcaaatctagggcgacgcttgacagagcttgggagggtgcgcctgctttcgccctccttctccagcgggaggggcgcgcacttccgcggggcggagtccgtctagtgctgacgttggcagccgaacccaaagtagatcgaggcggcgggctgcacattcccgttgttgcgttgcgtttccttcctctttcactccgcgctcacggcggcggccaaagcggcggcgacggcggcgcgagaacgacccggcggccagttctcttcctcctgcgcacctgccccgctcggtcagtcagtcggcggccggcgcccggcttgtgctcagacctcgcgcttgcggcgcccaggcccagcggccgtagctagcgtctggcctgagaacctcggcgctccggcggcgcgggcaccacgagccgagcctcgcagcggctccagaggaggcaggcgagtgagcgagtccgaggggtggccggggcaggtggtggcgccgcgaagatggtcgccaagcaaaggatccgtatggccaacgagaagcacagcaagaacatcacccagcgcggcaacgtcgccaagacctcgagaaatgcccccgaagagaaggcgtctgtaggaccctggttattggctctcttcatttttgttgtctgtggttctgcaattttccagattattcaaagtatcaggatgggcatgtgaagtgactgaccttaagatgtttccattctcctgtgaattttaacttgaactcattcctgatgtttgataccctggttgaaaacaattcagtaaagcatcctgcctcagaatgactttcctatcatgcttcatgtgtcattccagcgtcacggtcgcgcccaagcatca

SEQ ID NO: 292491 - DNA, 857 bp, Homo sapiens
tagacatgatagaatcgattcggtaccagtcaaaccattccatatcagaattttccttggtttactatagatatttggctttaagttgttgtttgtgttttttaatgtacaatgttctgataaatttgactgttaaattgctatagctagcaatcattttacatatgtaaaattgcattccctttgtatttcatgtgtaattcaccaattaagtgcagtttatattcaggttggattatgcatgtttaggtaaacgaaagctgtgtcttacttgatttattctttaaaaataaagttccctgaatattgatgcttttcttctaaacggaaatgattttacagttatctgagtgtaccttttatagttagtagaaaatgattttaaagaatgtttagtattgtacttaaatggtatgcagaggcacagatgtaaggtttataactggaaataggtggtaagaaaaatatatagaaagcacaatgatttgaatatttttccacttaggatttcctaatctccttgtcatccaattcaagctcaagatgaagcacaattctttgatctccctttgccagttgaattttatagatcatctaatgttgagcacagtatgagaataaatattggggttgtcaacattactcagttactctttgtggtttagctctaacatttcaacaagttgtcaattaattgtatctgttgggttgtatataatgttgctcaaaataattaagtggacttccaaaaataagatttccattgtaacaggatgcattgtgatgggctttgacttacattaaagaaatgtggatagtcaactgcaaaaaaacacacacaaccaacacaaacaaag

SEQ ID NO: 292492 - DNA, 1112 bp, Homo sapiens
ggagtgacgcggaaaaggcgcccgaacgcgcacgcgcaaatctagggcgacgcttgacagagcttgggagggtgcgcctgctttcgccctccttctccagcgggaggggcgcgcacttccgcggggcggagtccgtctagtgctgacgttggcagccgaacccaaagtagatcgaggcggcgggctgcacattcccgttgttgcgttgcgtttccttcctctttcactccgcgctcacggcggcggccaaagcggcggcgacggcggcgcgagaacgacccggcggccagttctcttcctcctgcgcacctgccccgctcggtcagtcagtcggcggccggcgcccggcttgtgctcagacctcgcgcttgcggcgcccaggcccagcggccgtagctagcgtctggcctgagaacctcggcgctccggcggcgcgggcaccacgagccgagcctcgcagcggctccagaggaggcaggcgagtgagcgagtccgaggggtggccggggcaggtggtggcgccgcgaagatggtcgccaagcaaaggatccgtatggccaacgagaagcacagcaagaacatcacccagcgcggcaacgtcgccaagacctcgagaaatgcccccgaagagaaggcgtctgtaggaccctggttattggctctcttcatttttgttgtctgtggttctggtaagtggcttgggggctcccatcaggtagagtcttgggttgaaaggatttgggatgacgtggtgaccggtcagtagtgagtcctacctgcgtagttctcaacccacctgccgaggactccacataattctgtttcgtctgaaccaaattacttgttccacatatgcacagagggtggtgctccagaaacttctcccagcttaatttgtactcacaggagatcaaaaaggaggtcaggtcttggtaatgatccagttggaataaatgttaagaccggacaaaacctaacgaaatgagaatttagaatgttttgtaactccattatcagtctttgcaaagaaaattataaatatgtactatagatgttagaacttgatttaacatataccagaatctaatgtcttaatgtcaaaattgagtata

SEQ ID NO: 292493 - DNA, 840 bp, Homo sapiens
cagactccccggctcctcgggtagttctcaaaggcaaagacaaaaataagaaactagtctgaagaaagagagtccctcgcttcttcagaactcacctgtcaagagcggcgtggacggcgccatgttgtcccggaaagagaaaccgctcgggtgagagttcaccagggccgaacccggcccctacacgtctcctcatgcgtggagacagcgaattggtgtttccggagccatcagcctcggggccaattcacttccggttacggagtgacgcggaaaaggcgcccgaacgcgcacgcgcaaatctagggcgacgcttgacagagcttgggagggtgcgcctgctttcgccctccttctccagcgggaggggcgcgcacttccgcggggcggagtccgtctagtgctgacgttggcagccgaacccaaagtagatcgaggcggcgggctgcacattcccgttgttgcgttgcgtttccttcctctttcactccgcgctcacggcggcggccaaagcggcggcgacggcggcgcgagaacgacccggcggccagttctcttcctcctgcgcacctgccccgctcggtcagtcagtcggcggccggcgcccggcttgtgctcagacctcgcgcttgcggcgcccaggcccagcggccgtagctagcgtctggcctgagaacctcggcgctccggcggcgcgggcaccacgagccgagcctcgcagcggctccagaggaggcaggcgagtgagcgagtccgaggggtggccggggcaggtggtggcgccgcgaagatggtcgccaagcaaaggatccgtatggccaacgagaagcacagcaagaa

SEQ ID NO: 292494 - DNA, 868 bp, Homo sapiens
gggggggatgcgtgcatttatcagaccgaacccaaagtagatcgaggcggcgggctgcacattcccgttgttgcgttgcgtttccttcctctttcactccgcgctcacggcggcggccaaagcggcggcgacggcggcgcgagaacgacccggcggccagttctcttcctcctgcgcacctgccccgctcggtcagtcagtcggcggccggcgcccggcttgtgctcagacctcgcgcttgcggcgcccaggcccagcggccgtagctagcgtctggcctgagaacctcggcgctccggcggcgcgggcaccacgagccgagcctcgcagcggctccagaggaggcaggcgagtgagcgagtccgaggggtggccggggcaggtggtggcgccgcgaagatggtcgccaagcaaaggatccgtatggccaacgagaagcacagcaagaacatcacccagcgcggcaacgtcgccaagacctcgagaaatgcccccgaagagaaggcgtctgtaggaccctggttattggctctcttcatttttgttgtctgtggttctgcaattttccagattattcaaagtatcaggatgggcatgtgaagtgactgaccttaagatgtttccattctcctgtgaattttaacttgaactcattcctgatgtttgataccctggttgaaaacaattcagtaaagcatcctgcctcagaatgactttcctatcatgcttcatgtgtcattccaaggtttcttcatgagtcattccaagttttctagtccataccacagtgccttgcaaaaaacaccacatgaataaagcaataaaatttgatttgatgtggacaaaaaaaaaccggggcttttggggg

SEQ ID NO: 292495 - DNA, 3223 bp, Homo sapiens
ggagtgacgcggaaaaggcgcccgaacgcgcacgcgcaaatctagggcgacgcttgacagagcttgggagggtgcgcctgctttcgccctccttctccagcgggaggggcgcgcacttccgcggggcggagtccgtctagtgctgacgttggcagccgaacccaaagtagatcgaggcggcgggctgcacattcccgttgttgcgttgcgtttccttcctctttcactccgcgctcacggcggcggccaaagcggcggcgacggcggcgcgagaacgacccggcggccagttctcttcctcctgcgcacctgccccgctcggtcagtcagtcggcggccggcgcccggcttgtgctcagacctcgcgcttgcggcgcccaggcccagcggccgtagctagcgtctggcctgagaacctcggcgctccggcggcgcgggcaccacgagccgagcctcgcagcggctccagaggaggcaggcgagtgagcgagtccgaggggtggccggggcaggtggtggcgccgcgaagatggtcgccaagcaaaggatccgtatggccaacgagaagcacagcaagaacatcacccagcgcggcaacgtcgccaagacctcgagaaatgcccccgaagagaaggcgtctgtaggaccctggttattggctctcttcatttttgttgtctgtggttctgcaattttccagattattcaaagtatcaggatgggcatgtgaagtgactgaccttaagatgtttccattctcctgtgaattttaacttgaactcattcctgatgtttgataccctggttgaaaacaattcagtaaagcatcctgcctcagaatgactttcctatcatgcttcatgtgtcattccaaggtttcttcatgagtcattccaagttttctagtccataccacagtgccttgcaaaaaacaccacatgaataaagcaataaaatttgattgttaagatacagtagtggaccctacttattcagtcaattaagagtaagtttttttatgtggttattaaaacagtatgaacaattagtctaactctgcatagacagggtctagattttgttaacccaaatgtataactgcagttagcttaaattacaatttgaagtcttgtggtttttatatagctaggcactttattactcttttgaactgaaagcacactcccttataggttcatgtaactgtcctgtaataaggtgcttataaatggaacaactacacagcctagttttgccacaacctttagcatctaaaaagttttaaaagcttctaaatgtctaatataaagggagatgcttatagccacaacatctattttaccaatattgtttccattacactaccttggattttgcatgagtgagtatagtaacccaagatgccataaaaaaaaacttgatcgttttctgacttaatcagttactgtggtttcactaaaagctaccgtggtggagtgaagtcagtcagggaaggtttgtttatgttacatttatttcaccagaactattttaatatatcaaaggggtttactatgccaaacaaaattctagggaaaaatactgctaaaaatggatgcctcatcagaacatgctgttgagtccaatgtgccataagacattttagcatgttaaatagcacttttaatagcaaaaaaaggcacatcaactgcgaagttatccttagtttgcaaatgctttttctagattaatgatttttcaatcattagggtactagacacatcagcctaaagtggcatctggaattgaatggatttactgataatgatcagtctttagtcttccctttgttatatgactttataggttatgattgatcaaatttacgttttactaatggtaagggtgagggtcatagggcaggttttgggttttctagtactgttgaaaactgcaagtattggctatttgtatacttagccataacttggtgaaaaaaaacctgagcagtgtctatgtattaatgcgttggaaagaaagctgcttgtgtttgctttgttaattgcctcaggatatttcttttaaaataagctgttttaagaggaacagaagggaaatctgctacctagtctatacacagcgtgaacctcacagggggcttctgataccctcaaacatggagaacagtaagggagcagagtggttaaggactttcaggaacttaactattctggaataaggaatgaatcaactgaccttgggccagcaggtttttaactaaattgttacttgcctttctcacccagttaatcagtctctgtacttgtttccctttttgaaacaagtgtcttggttaactaattctgttttatggttgtgctaaattcatagcaggtgccttattctttgcttttagtcaaaccattccatatcagaattttccttggtttactatagatatttggctttaagttgttgtttgtgttttttaatgtacaatgttctgataaatttgactgttaaattgctatagctagcaatcattttacatatgtaaaattgcattccctttgtatttcatgtgtaattcaccaattaagtgcagtttatattcaggttggattatgcatgtttaggtaaacgaaagctgtgtcttacttgatttattctttaaaaataaagttccctgaatattgatgcttttcttctaaacggaaatgattttacagttatctgagtgtaccttttatagttagtagaaaatgattttaaagaatgtttagtattgtacttaaatggtatgcagaggcacagatgtaaggtttataactggaaataggtggtaagaaaaatatatagaaagcacaatgatttgaatatttttccacttaggatttcctaatctccttgtcatccaattcaagctcaagatgaagcacaattctttgatctccctttgccagttgaattttatagatcatctaatgttgagcacagtatgagaataaatattggggttgtcaacattactcagttactctttgtggtttagctctaacatttcaacaagttgtcaattaattgtatctgttgggttgtatataatgttgctcaaaataattaagtggacttccaaaaataagatttccattgtaacaggatgcattgtgatgggctttgacttacattaaagaaatgtggatagtcaactgcaaaaaaacacacacaaccaacacaaacaaag

SEQ ID NO: 292496 - DNA, 3008 bp, Homo sapiens
ggagtgacgcggaaaaggcgcccgaacgcgcacgcgcaaatctagggcgacgcttgacagagcttgggagggtgcgcctgctttcgccctccttctccagcgggaggggcgcgcacttccgcggggcggagtccgtctagtgctgacgttggcagccgaacccaaagtagatcgaggcggcgggctgcacattcccgttgttgcgttgcgtttccttcctctttcactccgcgctcacggcggcggccaaagcggcggcgacggcggcgcgagaacgacccggcggccagttctcttcctcctgcgcacctgccccgctcggtcagtcagtcggcggccggcgcccggcttgtgctcagacctcgcgcttgcggcgcccaggcccagcggccgtagctagcgtctggcctgagaacctcggcgctccggcggcgcgggcaccacgagccgagcctcgcagcggctccagaggaggcaggcgagtgagcgagtccgaggggtggccggggcaggtggtggcgccgcgaagatggtcgccaagcaaaggatccgtatggccaacgagaagcacagcaagaacatcacccagcgcggcaacgtcgccaagacctcgagaaatgcccccgaagagaaggcgtctgtaggaccctggttattggctctcttcatttttgttgtctgtggttctgcaattttccagattattcaaagtatcaggatgggcatgtgaagtgactgaccttaagatgtttccattctcctgtgaattttaacttgaactcattcctgatgtttgataccctggttgaaaacaattcagtaaagcatcctgcctcagaatgactttcctatcatgcttcatgtgtcattccaaggtttcttcatgagtcattccaagttttctagtccataccacagtgccttgcaaaaaacaccacatgaataaagcaataaaatttgattgttaagatacagtagtggaccctacttattcagtcaattaagagtaagtttttttatgtggttattaaaacagtatgaacaattagtctaactctgcatagacagggtctagattttgttaacccaaatgtataactgcagttagcttaaattacaatttgaagtcttgtggtttttatatagctaggcactttattactcttttgaactgaaagcacactcccttataggttcatgtaactgtcctgtaataaggtgcttataaatggaacaactacacagcctagttttgccacaacctttagcatctaaaaagttttaaaagcttctaaatgtctaatataaagggagatgcttatagccacaacatctattttaccaatattgtttccattacactaccttggattttgcatgagtgagtatagtaacccaagatgccataaaaaaaaacttgatcgttttctgacttaatcagttactgtggtttcactaaaagctaccgtggtggagtgaagtcagtcagggaaggtttgtttatgttacatttatttcaccagaactattttaatatatcaaaggggtttactatgccaaacaaaattctagggaaaaatactgctaaaaatggatgcctcatcagaacatgctgttgagtccaatgtgccataagacattttagcatgttaaatagcacttttaatagcaaaaaaaggcacatcaactgcgaagttatccttagtttgcaaatgctttttctagattaatgatttttcaatcattagggtactagacacatcagcctaaagtggcatctggaattgaatggatttactgataatgatcagtctttagtcttccctttgttatatgactttataggttatgattgatcaaatttacgttttactaatggtaagggtgagggtcatagggcaggttttgggttttctagtactgttgaaaactgcaagtattggctatttgtatacttagccataacttggtgaaaaaaaacctgagcagtgtctatgtattaatgcgttggaaagaaagctgcttgtgtttgctttgttaattgcctcaggatatttcttttaaaataagctgttttaagaggaacagaagggaaatctgctacctagtctatacacagcgtgaacctcacagggggcttctgataccctcaaacatggagaacagtaagggagcagagtggttaaggactttcaggaacttaactattctggaataaggaatgaatcaactgaccttgggccagcaggtttttaactaaattgttacttgcctttctcacccagttaatcagtctctgtacttgtttccctttttgaaacaagtgtcttggttaactaattctgttttatggttgtgctaaattcatagcaggtgccttattctttgcttttagtcaaaccattccatatcagaattttccttggtttactatagatatttggctttaagttgttgtttgtgttttttaatgtacaatgttctgataaatttgactgttaaattgctatagctagcaatcattttacatatgtaaaattgcattccctttgtatttcatgtgtaattcaccaattaagtgcagtttatattcaggttggattatgcatgtttaggtaaacgaaagctgtgtcttacttgatttattctttaaaaataaagttccctgaatattgatgcttttcttctaaacggaaatgattttacagttatctgagtgtaccttttatagttagtagaaaatgattttaaagaatgtttagtattgtacttaaatggtatgcagaggcacagatgtaaggtttataactggaaataggtggtaagaaaaatatatagaaagcacaatgatttgaatatttttccacttaggatttcctaatctccttgtcatccaattcaagctcaagatgaagcacaattctttgatctccctttgccagttgaattttatagatcatctaatgttgagcacagtatgagaataaatattggggttgtcaacatta

SEQ ID NO: 292497 - DNA, 2954 bp, Homo sapiens
cgccccgtccgggctggggcggaggagcgggcggggaccaaaggttggtgtctttgcgctcggaccttcgccagaggggccgggacatcatgacggtgggagccaggctccgaagcaaggcggagagcagcctcctgcgccgcgggccccgagggcgagggcgaaccgagggggacgaggaggcggccgccatcctggagcacctggagtacgcggacgaggcggaggcggcggccgagagcgggacgagcgcggcggacgagcggggcccggggacccggggcgcgcggagggtgcacttcgccctcctgcccgagcgctacgagccactggaggagccggcgccgagcgagcagcccaggaagaggtaccggaggaagctgaagaagtacggcaagaatgtcgggaaggtcatcatcaaaggatgccgctacgtggtcatcggcctgcaaggcttcgctgcagcctactccgccccgtttgcggtagccaccagcgtggtatccttcgtgcgctaatgggagctgctgtggcaggtgcccccagagtgaacgggagcccctgctgtgggaactttgtgaatcctggagcatctcagacttgaacacacagcatatttggaagagaaaacatgcctttctttgttgaatcacattagtatgatgagtgagtcatccctgcccatctgctgagcttctcacatctctcagtcacacgtggacccagtggtcaatcctgcagagaattcggcggaggttaggtttgggagtggagctagcgtgctaaagccagagccttcacgtgaaggtggcaggcactggggcggaagccaacactcaacagatgcaagcagtgtgggtgtgcagcagaacagtgatcttgggggaggaagaggatgttactagagtcagatgatttgctgtattctcctgaaaggtcgtaggctgacaggcgctcacattccttggctgcctcggttctgagggcagctaaggagctgtttattcctcaagtcatgctccccgatctccttcctctaccactctgtcaccaggagtttaattacaggcttgaggagaagaaaggaagaaaagatatcttgatgctttgaaaactgtgttggcagtgtggcatgactgtttaaagtagataaaaccttgtcattttaccccatccctgcatgactgtgaagctggcgaggaaggaggaagaagggcaagttcagatgcaggctgggtggctgggacaggttggctaagggactactctggagggctcttctgcctggcattgcccacttcggcccagccacgtgtttgcagcgaccagagtccctgcaaaggtgtggctggctgtggtcagggtgctactagcaccatcagcgcactcccgccattggctcagctcctctctgccagtccaactaagagtgctttgtcctgggtgggacataggggctgagagagatggggggagacataacacccaggaatgaaaatacagatttagagaaggaaccagtaagtaggagacagatgtgaaggaaatggaaatgaggcaagaggacattggaagagagaagtttgctgtccaggagccaggtctggagcatcagtgtgagggagttcaggtaggctgggcctgtgcctctaggtagggacaagggaggctgggtagccagggctggtgcttaaaacccctgaggccatgagctcattggctgcctttgtagcatcctgtcttcttctgtgctgcctggtttgatctcatctcacctggattcaaagggtaaggtgggcatgggtcttgggcctgacacccaccaaggatgacctgtggactgccatcggatgctgaacagggagatgaaaggaggtcctcttaccatacccctctgccaaccccccagtaggccactgttctgactttgtttccagaatatccagaaatccaaaggggctgttgctgaacagtctgcaggaccagtgacagcacctacctgttgtcccaaggcatacaaaggaggcctcaacgctcatgcttctctaatcaagccctaccaagacagacagaaagacagacagaaaaaaggaaggggtagaggagaaggttgaagctgtggagctagactctgcttcacttcctgaagcttcaacttcatgtcgaagattcactgggacccaattcctgcattgttaatatttgtgaggaaaagtgaaacaagtgatctggttttagcccagatgatgaaagtggatatggcacattttcacacacgtgagataattacagcttgccccacaacactgggtgttggagaaagggagagatagtcataagtggaagaaaaagccaagcatagtgagtgggaaagagagtgagagcctgtgcaggctgctgacgagccccaggcagcccacaagtttctcgtggggagatggaggcagagcccagggtaggggacagagctgctggggcctttccttgcctgggaatctgtcccaggaagagcttccccactcccatcccccaaattggaaaaaccgtacattcaagcctgtttggccctgaaattcttaagaatctggttaagaattaactcactaatgtcaaaagtcaaaacctcctaggggttgtcctgggagtcaggttcacgggtacagaagatgaatctcagatgtcactcaacctgagccgtcattctctgtggcagggctgccctgggtttctcttactcaatccctggagtgtaagcatttggattgtgtcacagattacctttttaccttttctttctttttttttctttttttcaatatcagtgcccacaccttactgagtattgagttttagagctttcgcttgatgtgcttgaccaagagacttcttttgtatccttttcttgtcctatgatgtaaataaaagcctcgatttatgtaaaaaaaaatctggtg

SEQ ID NO: 292498 - DNA, 2901 bp, Homo sapiens
cgccccgtccgggctggggcggaggagcgggcggggaccaaaggttggtgtctttgcgctcggaccttcgccagaggggccgggacatcatgacggtgggagccaggctccgaagcaaggcggagagcagcctcctgcgccgcgggccccgagggcgagggcgaaccgagggggacgaggaggcggccgccatcctggagcacctggagtacgcggacgaggcggaggcggcggccgagagcgggacgagcgcggcggacgagcggggcccggggacccggggcgcgcggagggtgcacttcgccctcctgcccgagcgctacgagccactggaggagccggcgccgagcgagcagcccaggaagaggtaccggaggaagctgaagaagtacggcaagaatgtcgggaaggtcatcatcaaaggatgccgctacgtggtcatcggcctgcaaggcttcgctgcagcctactccgccccgtttgcggtagccaccagcgtggtatccttcgtgcgctaatgggagctgctgtggcaggtgcccccagagtgaacgggagcccctgctgtgggaactttgtgaatcctggagcatctcagacttgaacacacagcatatttggaagagaaaacatgcctttctttgttgaatcacattagtatgatgagtgagtcatccctgcccatctgctgagcttctcacatctctcagtcacacgtggacccagtggtcaatcctgcagagaattcggcggaggttaggtttgggagtggagctagcgtgctaaagccagagccttcacgtgaaggtggcaggcactggggcggaagccaacactcaacagatgcaagcagtgtgggtgtgcagcagaacagtgatcttgggggaggaagaggatgttactagagtcagatgatttgctgtattctcctgaaaggtcgtaggctgacaggcgctcacattccttggctgcctcggttctgagggcagctaaggagctgtttattcctcaagtcatgctccccgatctccttcctctaccactctgtcaccaggagtttaattacaggcttgaggagaagaaaggaagaaaagatatcttgatgctttgaaaactgtgttggcagtgtggcatgactgtttaaagtagatgaggaagaagggcaagttcagatgcaggctgggtggctgggacaggttggctaagggactactctggagggctcttctgcctggcattgcccacttcggcccagccacgtgtttgcagcgaccagagtccctgcaaaggtgtggctggctgtggtcagggtgctactagcaccatcagcgcactcccgccattggctcagctcctctctgccagtccaactaagagtgctttgtcctgggtgggacataggggctgagagagatggggggagacataacacccaggaatgaaaatacagatttagagaaggaaccagtaagtaggagacagatgtgaaggaaatggaaatgaggcaagaggacattggaagagagaagtttgctgtccaggagccaggtctggagcatcagtgtgagggagttcaggtaggctgggcctgtgcctctaggtagggacaagggaggctgggtagccagggctggtgcttaaaacccctgaggccatgagctcattggctgcctttgtagcatcctgtcttcttctgtgctgcctggtttgatctcatctcacctggattcaaagggtaaggtgggcatgggtcttgggcctgacacccaccaaggatgacctgtggactgccatcggatgctgaacagggagatgaaaggaggtcctcttaccatacccctctgccaaccccccagtaggccactgttctgactttgtttccagaatatccagaaatccaaaggggctgttgctgaacagtctgcaggaccagtgacagcacctacctgttgtcccaaggcatacaaaggaggcctcaacgctcatgcttctctaatcaagccctaccaagacagacagaaagacagacagaaaaaaggaaggggtagaggagaaggttgaagctgtggagctagactctgcttcacttcctgaagcttcaacttcatgtcgaagattcactgggacccaattcctgcattgttaatatttgtgaggaaaagtgaaacaagtgatctggttttagcccagatgatgaaagtggatatggcacattttcacacacgtgagataattacagcttgccccacaacactgggtgttggagaaagggagagatagtcataagtggaagaaaaagccaagcatagtgagtgggaaagagagtgagagcctgtgcaggctgctgacgagccccaggcagcccacaagtttctcgtggggagatggaggcagagcccagggtaggggacagagctgctggggcctttccttgcctgggaatctgtcccaggaagagcttccccactcccatcccccaaattggaaaaaccgtacattcaagcctgtttggccctgaaattcttaagaatctggttaagaattaactcactaatgtcaaaagtcaaaacctcctaggggttgtcctgggagtcaggttcacgggtacagaagatgaatctcagatgtcactcaacctgagccgtcattctctgtggcagggctgccctgggtttctcttactcaatccctggagtgtaagcatttggattgtgtcacagattacctttttaccttttctttctttttttttctttttttcaatatcagtgcccacaccttactgagtattgagttttagagctttcgcttgatgtgcttgaccaagagacttcttttgtatccttttcttgtcctatgatgtaaataaaagcctcgatttatgtaaaaaaaaatctggtg

SEQ ID NO: 292499 - DNA, 2160 bp, Homo sapiens
  misc_feature (17)..(18): n is a, c, g, or t
gagatagccggtccacnntctcactggggcggaagccaacactcaacagatgcaagcagtgtgggtgtgcagcagaacagtgatcttgggggaggaagaggatgttactagagtcagatgatttgctgtattctcctgaaaggtcgtaggctgacaggcgctcacattccttggctgcctcggttctgagggcagctaaggagctgtttattcctcaagtcatgctccccgatctccttcctctaccactctgtcaccaggagtttaattacaggcttgaggagaagaaaggaagaaaagatatcttgatgctttgaaaactgtgttggcagtgtggcatgactgtttaaagtagataaaaccttgtcattttaccccatccctgcatgactgtgaagctggcgaggaaggaggaagaagggcaagttcagatgcaggctgggtggctgggacaggttggctaagggactactctggagggctcttctgcctggcattgcccacttcggcccagccacgtgtttgcagcgaccagagtccctgcaaaggtgtggctggctgtggtcagggtgctactagcaccatcagcgcactcccgccattggctcagctcctctctgccagtccaactaagagtgctttgtcctgggtgggacataggggctgagagagatggggggagacataacacccaggaatgaaaatacagatttagagaaggaaccagtaagtaggagacagatgtgaaggaaatggaaatgaggcaagaggacattggaagagagaagtttgctgtccaggagccaggtctggagcatcagtgtgagggagttcaggtaggctgggcctgtgcctctaggtagggacaagggaggctgggtagccagggctggtgcttaaaacccctgaggccatgagctcattggctgcctttgtagcatcctgtcttcttctgtgctgcctggtttgatctcatctcacctggattcaaagggtaaggtgggcatgggtcttgggcctgacacccaccaaggatgacctgtggactgccatcggatgctgaacagggagatgaaaggaggtcctcttaccatacccctctgccaaccccccagtaggccactgttctgactttgtttccagaatatccagaaatccaaaggggctgttgctgaacagtctgcaggaccagtgacagcacctacctgttgtcccaaggcatacaaaggaggcctcaacgctcatgcttctctaatcaagccctaccaagacagacagaaagacagacagaaaaaaggaaggggtagaggagaaggttgaagctgtggagctagactctgcttcacttcctgaagcttcaacttcatgtcgaagattcactgggacccaattcctgcattgttaatatttgtgaggaaaagtgaaacaagtgatctggttttagcccagatgatgaaagtggatatggcacattttcacacacgtgagataattacagcttgccccacaacactgggtgttggagaaagggagagatagtcataagtggaagaaaaagccaagcatagtgagtgggaaagagagtgagagcctgtgcaggctgctgacgagccccaggcagcccacaagtttctcgtggggagatggaggcagagcccagggtaggggacagagctgctggggcctttccttgcctgggaatctgtcccaggaagagcttccccactcccatcccccaaattggaaaaaccgtacattcaagcctgtttggccctgaaattcttaagaatctggttaagaattaactcactaatgtcaaaagtcaaaacctcctaggggttgtcctgggagtcaggttcacgggtacagaagatgaatctcagatgtcactcaacctgagccgtcattctctgtggcagggctgccctgggtttctcttactcaatccctggagtgtaagcatttggattgtgtcacagattacctttttaccttttctttctttttttttctttttttcaatatcagtgcccacaccttactgagtattgagttttagagctttcgcttgatgtgcttgaccaagagacttcttttgtatccttttcttgtcctatgatgtaaataaaagcctcgatttatgtaaaaaaaaatctggtg

SEQ ID NO: 292500 - DNA, 2895 bp, Homo sapiens
cgccccgtccgggctggggcggaggagcgggcggggaccaaaggttggtgtctttgcgctcggaccttcgccagaggggccgggacatcatgacggtgggagccaggctccgaagcaaggcggagagcagcctcctgcgccgcgggccccgagggcgagggcgaaccgagggggacgaggaggcggccgccatcctggagcacctggagtacgcggacgaggcggaggcggcggccgagagcgggacgagcgcggcggacgagcggggcccggggacccggggcgcgcggagggtgcacttcgccctcctgcccgagcgctacgagccactggaggagccggcgccgagcgagcagcccaggaagaggtaccggaggaagctgaagaagtacggcaagaatgtcgggaaggtcatcatcaaaggatgccgctacgtggtcatcggcctgcaaggcttcgctgcagcctactccgccccgtttgcggtagccaccagcgtggtatccttcgtgcgctaatgggagctgctgtggcaggtgcccccagagtgaacgggagcccctgctgtgggaactttgtgaatcctggagcatctcagacttgaacacacagcatatttggaagagaaaacatgcctttctttgttgaatcacattagtatgatgagtgagtcatccctgcccatctgctgagcttctcacatctctcagtcacacgtggacccagtggtcaatcctgcagagaattcggcggaggttaggtttgggagtggagctagcgtgctaaagccagagccttcacgtgaaggtggcaggcactggggcggaagccaacactcaacagatgcaagcagtgtgggtgtgcagcagaacagtgatcttgggggaggaagaggatgttactagagtcagatgatttgctgtattctcctgaaaggtcgtaggctgacaggcgctcacattccttggctgcctcggttctgagggcagctaaggagctgtttattcctcaagtcatgctccccgatctccttcctctaccactctgtcaccaggagtttaattacaggcttgaggagaagaaaggaagaaaagatatcttgatgctttgaaaactgtgttggcagtgtggcatgactgtttaaagtagataaaaccttgtcattttaccccatccctgcatgactgtgaagctggcgaggaaggaggaagaagggcaagttcagatgcaggctgggtggctgggacaggttggctaagggactactctggagggctcttctgcctggcattgcccacttcggcccagccacgtgtttgcagcgaccagagtccctgcaaaggtgtggctggctgtggtcagggtgctactagcaccatcagcgcactcccgccattggctcagctcctctctgccagtccaactaagagtgctttgtcctgggtgggacataggggctgagagagatggggggagacataacacccaggaatgaaaatacagatttagagaaggaaccagtaagtaggagacagatgtgaaggaaatggaaatgaggcaagaggacattggaagagagaagtttgctgtccaggagccaggtctggagcatcagtgtgagggagttcaggtaggctgggcctgtgcctctaggtagggacaagggaggctgggtagccagggctggtgcttaaaacccctgaggccatgagctcattggctgcctttgtagcatcctgtcttcttctgtgctgcctggtttgatctcatctcacctggattcaaagggtaaggtgggcatgggtcttgggcctgacacccaccaaggatgacctgtggactgccatcggatgctgaacagggagatgaaaggaggtcctcttaccatacccctctgccaaccccccagtaggccactgttctgactttgtttccagaatatccagaaatccaaaggggctgttgctgaacagtctgcaggaccagtgacagcacctacctgttgtcccaaggcatacaaaggaggcctcaacgctcatgcttctctaatcaagccctaccaagacagacagaaagacagacagaaaaaaggaaggggtagaggagaaggttgaagctgtggagctagactctgcttcacttcctgaagcttcaacttcatgtcgaagattcactgggacccaattcctgcattgttaatatttgtgaggaaaagtgaaacaagtgatctggttttagcccagatgatgaaagtggatatggcacattttcacacacgtgagataattacagcttgccccacaacactgggtgttggagaaagggagagatagtcataagtggaagaaaaagccaagcatagtgagtgggaaagagagtgagagcctgtgcaggctgctgacgagccccaggcagcccacaagtttctcctgggaatctgtcccaggaagagcttccccactcccatcccccaaattggaaaaaccgtacattcaagcctgtttggccctgaaattcttaagaatctggttaagaattaactcactaatgtcaaaagtcaaaacctcctaggggttgtcctgggagtcaggttcacgggtacagaagatgaatctcagatgtcactcaacctgagccgtcattctctgtggcagggctgccctgggtttctcttactcaatccctggagtgtaagcatttggattgtgtcacagattacctttttaccttttctttctttttttttctttttttcaatatcagtgcccacaccttactgagtattgagttttagagctttcgcttgatgtgcttgaccaagagacttcttttgtatccttttcttgtcctatgatgtaaataaaagcctcgatttatgtaaaaaaaaatctggtg

SEQ ID NO: 292501 - DNA, 2067 bp, Homo sapiens
cgccccgtccgggctggggcggaggagcgggcggggaccaaaggttggtgtctttgcgctcggaccttcgccagaggggccgggacatcatgacggtgggagccaggctccgaagcaaggcggagagcagcctcctgcgccgcgggccccgagggcgagggcgaaccgagggggacgaggaggcggccgccatcctggagcacctggagtacgcggacgaggcggaggcggcggccgagagcgggacgagcgcggcggacgagcggggcccggggacccggggcgcgcggagggtgcacttcgccctcctgcccgagcgctacgagccactggaggagccggcgccgagcgagcagcccaggaagaggtaccggaggaagctgaagaagtacggcaagaatgtcgggaaggtcatcatcaaaggatgccgctacgtggtcatcggcctgcaaggcttcgctgcagcctactccgccccgtttgcggtagccaccagcgtggtatccttcgtgcgctaatgggagctgctgtggcaggtgcccccagagtgaacgggagcccctgctgtgggaactttgtgaatcctggagcatctcagacttgaacacacagcatatttggaagagaaaacatgcctttctttgttgaatcacattagtatgatgagtgagtcatccctgcccatctgctgagcttctcacatctctcagtcacacgtggacccagtggtcaatcctgcagagaattcggcggaggttaggtttgggagtggagctagcgtgctaaagccagagccttcacgtgaaggtggcaggcactggggcggaagccaacactcaacagatgcaagcagtgtgggtgtgcagcagaacagtgatcttgggggaggaagaggatgttactagagtcagatgatttgctgtattctcctgaaaggtcgtaggctgacaggcgctcacattccttggctgcctcggttctgagggcagctaaggagctgtttattcctcaagtcatgctccccgatctccttcctctaccactctgtcaccaggagtttaattacaggcttgaggagaagaaaggaagaaaagatatcttgatgctttgaaaactgtgttggcagtgtggcatgactgtttaaagtagataaaaccttgtcattttaccccatccctgcatgactgtgaagctggcgaggaaggaggaagaagggcaagttcagatgcaggctgggtggctgggacaggttggctaagggactactctggagggctcttctgcctggcattgcccacttcggcccagccacgtgtttgcagcgaccagagtccctgcaaaggtgtggctggctgtggtcagggtgctactagcaccatcagcgcactcccgccattggctcagctcctctctgccagtccaactaagagtgctttgtcctgggtgggacataggggctgagagagatggggggagacataacacccaggaatgaaaatacagatttagagaaggaaccagtaagtaggagacagatgtgaaggaaatggaaatgaggcaagaggacattggaagagagaagtttgctgtccaggagccaggtctggagcatcagtgtgagggagttcaggtaggctgggcctgtgcctctaggtagggacaagggaggctgggtagccagggctggtgcttaaaacccctgaggccatgagctcattggctgcctttgtagcatcctgtcttcttctgtgctgcctggtttgatctcatctcacctggattcaaagggtaaggtgggcatgggtcttgggcctgacacccaccaaggatgacctgtggactgccatcggatgctgaacagggagatgaaaggaggtcctcttaccatacccctctgccaaccccccagtaggccactgttctgactttgtttccagaatatccagaaatccaaaggggctgttgctgaacagtctgcaggaccagtgacagcacctaccttttgtatccttttcttgtcctatgatgtaaataaaagcctcgatttatgtaaaaaaaaatctggtg

SEQ ID NO: 292502 - DNA, 1156 bp, Homo sapiens
  misc_feature (1136)..(1136): n is a, c, g, or t
cgccccgtccgggctggggcggaggagcgggcggggaccaaaggttggtgtctttgcgctcggaccttcgccagaggggccgggacatcatgacggtgggagccaggctccgaagcaaggcggagagcagcctcctgcgccgcgggccccgagggcgagggcgaaccgagggggacgaggaggcggccgccatcctggagcacctggagtacgcggacgaggcggaggcggcggccgagagcgggacgagcgcggcggacgagcggggcccggggacccggggcgcgcggagggtgcacttcgccctcctgcccgagcgctacgagccactggaggagccggcgccgagcgagcagcccaggaagaggtaccggaggaagctgaagaagtacggcaagaatgtcgggaaggtcatcatcaaaggatgccgctacgtggtcatcggcctgcaaggcttcgctgcagcctactccgccccgtttgcggtagccaccagcgtggtatccttcgtgcgctaatgggagctgctgtggcaggtgcccccagagtgaacgggagcccctgctgtgggaactttgtgaatcctggagcatctcagacttgaacacacagcatatttggaagagaaaacatgcctttctttgttgaatcacattagtatgatgagtgagtcatccctgcccatctgctgagcttctcacatctctcagtcacacgtggacccagtggtcaatcctgcagagaattcggcggaggttaggtttgggagtggagctagcgtgctaaagccagagccttcacgtgaaggtggcaggcactggggcggaagccaacactcaacagatgcaagcagtgtgggtgtgcagcagaacagtgatcttgggggaggaagaggatgttactagagtcagatgatttgctgtattctcctgaaaggtcgtaggctgacaggcgctcacattccttggctgcctcggttctgagggcagctaaggagctgtttattcctcaagtcatgctccccgatctccttcctctaccactctgtcaccaggagtttaattacaggcttgaggagaagaaaggaagaaaagatatcttgatgctttgaaaactgtgttgcttccagatgtggnccggctcgatcttcgtgggt

SEQ ID NO: 292503 - DNA, 306 bp, Homo sapiens
ccccgcccccgggctcagctgctcaggcgcgcgcgggaggagggggtgggggtagtggcggagtaggtggtgggaacgggaaggctggggaagggaggactcaggaacagagactgagggtcggcgaagcgggaggggaggaagcgaggaggaacgccgccgccgggttctcagccgccctgttgccgctgccgctgctgctgctgctgctgctgccgccgccggccgggcagcgcctcacggggcgggctgcgctccgctgtcgccgcgacgcttcctgctgctgctgctgttgccggcggccgc

SEQ ID NO: 292504 - DNA, 380 bp, Homo sapiens
acgcgatcgctggggagctggggtcgctgcgctcccggcctgcagttacctggtccagcgggatgcccaggagctcgctgagcgggtgcaggtgccccagctttgtccctgaatatgtgcttaatctgccagccagggatccagaagcaccatctccctgtctgcattctgatcacccacctcacttccagagcatgagagaaccacgatgaagaaagtcatgtgctaagaaaggcagagaagaaaagctgaagaaatctgggtgattgacagaaaccatgattaatgacatcacggagctactagaccagcccgggcctgcctgtctccatgcttcttggaacgtgagaaaaataaactgtatttgattatgttccttt

SEQ ID NO: 292505 - DNA, 1172 bp, Homo sapiens
tttttttaaagagagaaaagggaatttcttgtgtttgaaactaagcaaacctcagatgagtctattcccttcatgtcagatatggggaatggtatcatatcacagttcataattactaaggatgaaaataggggcccaacttaatagtcatacgtaaacactacccaaaaattaacacttaagccaatgtgaatgttacgttgacagatcctcagacccagaaatcttcccatttgtaaaataggattagactagcccaaattttctccttttggaagaaatgctccatgctcaaacaacatagagcatatttgctatgtgcagtagggcagctttgtttatatgttacatattttatcaccgatgtattttttcctctggggctcatgctttttccctctctctagttcagatggtttgtcaacagtgaccctggttggaatcatagttggggtcttactagccatcggcttcattggtggaatcatcgttgtggttatgcgaaaaatgtcgggaaggtactcggaggtaaatagcttacacccatgtgataggcaaatgaaagccatcgtgtctagaactcaaatctttgaactaatagaaatctctgatataagctgggtgtggtggctcgtgcctgtagtctcagctgctgggcaactgcagaccagcctgggcaacatagtaagaccctgtctcaaaaaaataatctctggtacaatggtcatgttccaaagttccttacttgggcctcttgagtgcagtggctcacacctggaatcccagtgctttgagaggctgaggaggcaggaggttcacttgtgcccaggaatttgaggctgcagtgagctatgattgtgccactgcactccagcctgggtgacagagcaagactgtgctctcttaaaaataagaaagagcctcttcatcttcaaaaggactacatctgaagtttccccagaaggacaaatgtctacttagaccttataaatttccaaaataagagagtcagagccagaggtggcttgtaagttgacttctgttgagatctgaccacatttgatctcttgttttaattttccaactaactgaacttggaagaaaacccaaaccaagttttaatctgatgcctaatcagcccgtctccaaccatcagagaaaaggcttctaga

SEQ ID NO: 292506 - DNA, 2817 bp, Homo sapiens
agaccaccttgcggccgaccccgctcccccgcctcctcgggagagataaatgctgactccgctcggaaagttctcaactgcaaagtttgctgtccggctgcctagggtctgggaagctcgggcaccctccctctccggggctcctgctcccacccctccggcccccccaccgtcgcgctcctccaggctgggcctgtggccgcggtgctttttaattttcccccagctcagaatcttgctgctcggcccccaggagagcaacaactcaacgggaacgatgtggaaggtgtcagctctgctcttcgttttgggaagcgcgtcgctctgggtcctggcagaaggagccagcacaggccagccagaagatgacactgagactacaggtttggaaggcggcgttgccatgccaggtgccgaagatgatgtggtgactccaggaaccagcgaagaccgctataagtctggcttgacaactctggtggcaacaagtgtcaacagtgtaacaggcattcgcatcgaggatctgccaacttcagaaagcacagtccacgcgcaagaacaaagtccaagcgccacagcctcaaacgtggccaccagtcactccacggagaaagtggatggagacacacagacaacagttgagaaagatggtttgtcaacagtgaccctggttggaatcatagttggggtcttactagccatcggcttcattggtggaatcatcgttgtggttatgcgaaaaatgtcgggaaggtactcgccctaaagagctgaagggttacgccctgctgccaacgtgcttaaaaaaagaccgtttctgactctgtgccctgtccctgagctcgtgggagaagatgacccgtggaacacttgcctggcccactcagaatccacggtgacctctccgcttgccaaaataaccgaaggaaagaccgttcaccagacttggctcctctaaacatttgctgttcaaacatgtttttgaatatacattctataaaagattatttgaaagacaaaattcatagaaaatggagcaaaactgtataaactgatttgtaactaacactggaccattggatcgatattatatgctgtaaccatgtgtctccgtctgaccattcttgttattgttaaaatgcagaggaatctggaaatatttatatccacggagtccttggatccagtgctacgtcagtaaatagcaccagcattttgcaattgctgatctgctgaaatgtacacattctggtctagtttggtctatcttttaaagcctgatctggtgtgaataatcaactaggaaatctaaacttggataacacgtggtgaacaactgcctttagctggtccagattaatcatttcaaagacatccattttagatcacaagcaggaagtcgatagtctcaaaggcactttgtttctcccaagtaggccaccaggcagcctctagagttgctttacccaaatccttctccagccatgacttggtgactctaagcttgctcccacctgccccctccacttccctcagatgatgaggagccagggctaagggggcagccttctctcttcccagtgatgcacatccttcacattggctgctttgttctggaatatggatatctcagcctggatgccgaggaagctgctggatgcttaatggtgctagaggctcaagtgtgtttgaaaccaagagccagttgtcccccatgcagaaagaaatcctgtgtgagcctctggtatgagaaataaaatctgccagttttataacattcactttctgcctctgaggaaagatacagggaacaaaaatcaatttgtacagtcttaatattaaaagcagcttgactaaatacctgatttaaaaatagaagacatccccagtcctcatgacataccgcaaatatctgtggggtcctgttgaaaagaacaaaataaaggagcccaaggggtcattctgtctcagcaccatccagcctggcacttctcttcccatatatccattggattttttttttttttcctaaacaaagtttttacactgagcagatgctctgtcatgatggcggttgtgcaattctggtatcctctaaatttgtaagcattcataaaacaggaaaaagtaaactatcattcggaagcacagcccattcctcccatttttggcaatgatgtctggatgttattttaaacagtgtgtctgtgtgttcccaaatccagctggccccaccagctcagattccatttttttgtgtgtgtgtgtgtgaaacgtagtctgcaactctgcctcccggcaattatacatgtgtcaggatgtcaaaaagcaattctcctgcctcagcctcctgagtagctgggactacaggttcctaccaccacacccggccaatttttgtatttttagtagagatggggtttcaccgtatcggcgaggatgatctctatctcttgacctcgtgatctgcccgcctcggcctcccaaagtgctgggattacaggcgtgtgccactgcgctcggcctcagattccatatttgaacaccagctgattgagagaaggggaatgagaagagctggatgagtttaaataactttcattgttcagattcctgaacaggagttgggataatggccatcttttctttcctatcctttcttcccccctcactgtgaaaaataacagtccaccccaagtcatacactggacccagtgcctgcggggacaggactgtgggtttcttggtcacacctgtgttggtgctcaatgcagtgtagacatgttttcaaataaaacaaatgattgtgtacaacaa

SEQ ID NO: 292507 - DNA, 2413 bp, Homo sapiens
agaccaccttgcggccgaccccgctcccccgcctcctcgggagagataaatgctgactccgctcggaaagttctcaactgcaaagtttgctgtccggctgcctagggtctgggaagctcgggcaccctccctctccggggctcctgctcccacccctccggcccccccaccgtcgcgctcctccaggctgggcctgtggccgcggtgctttttaattttcccccagctcagaatcttgctgctcggcccccaggagagcaacaactcaacgggaacgatgtggaaggtgtcagctctgctcttcgttttgggaagcgcgtcgctctgggtcctggcagaaggagccagcacaggccagccagaagatgacactgagactacaggtttggaaggcggcgttgccatgccaggtgccgaagatgatgtggtgactccaggaaccagcgaagaccgctataagtctggcttgacaactctggtggcaacaagtgtcaacagtgtaacaggcattcgcatcgaggatctgccaacttcagaaagcacagtccacgcgcaagaacaaagtccaagcgccacagcctcaaacgtggccaccagtcactccacggagaaagtggatggagacacacagacaacagttgagaaagatggtttgtcaacagtgaccctggttggaatcatagttggggtcttactagccatcggcttcattggtggaatcatcgttgtggttatgcgaaaaatgtcgggaaggtactcgccctaaagagctgaagggttacgccctgctgccaacgtgcttaaaaaaagaccgtttctgactctgtgccctgtccctgagctcgtgggagaagatgacccgtggaacacttgcctggcccactcagaatccacggtgacctctccgcttgccaaaataaccgaaggaaagaccgttcaccagacttggctcctctaaacatttgctgttcaaacatgtttttgaatatacattctataaaagattatttgaaagacaaaattcatagaaaatggagcaaaactgtataaactgatttgtaactaacactggaccattggatcgatattatatgctgtaaccatgtgtctccgtctgaccattcttgttattgttaaaatgcagaggaatctggaaatatttatatccacggagtccttggatccagtgctacgtcagtaaatagcaccagcattttgcaattgctgatctgctgaaatgtacacattctggtctagtttggtctatcttttaaagcctgatctggtgtgaataatcaactaggaaatctaaacttggataacacgtggtgaacaactgcctttagctggtccagattaatcatttcaaagacatccattttagatcacaagcaggaagtcgatagtctcaaaggcactttgtttctcccaagtaggccaccaggcagcctctagagttgctttacccaaatccttctccagccatgacttggtgactctaagcttgctcccacctgccccctccacttccctcagatgatgaggagccagggctaagggggcagccttctctcttcccagtgatgcacatccttcacattggctgctttgttctggaatatggatatctcagcctggatgccgaggaagctgctggatgcttaatggtgctagaggctcaagtgtgtttgaaaccaagagccagttgtcccccatgcagaaagaaatcctgtgtgagcctctggtatgagaaataaaatctgccagttttataacattcactttctgcctctgaggaaagatacagggaacaaaaatcaatttgtacagtcttaatattaaaagcagcttgactaaatacctgatttaaaaatagaagacatccccagtcctcatgacataccgcaaatatctgtggggtcctgttgaaaagaacaaaataaaggagcccaaggggtcattctgtctcagcaccatccagcctggcacttctcttcccatatatccattggattttttttttttttcctaaacaaagtttttacactgagcagatgctctgtcatgatggcggttgtgcaattctggtatcctctaaatttgtaagcattcataaaacaggaaaaagtaaactatcattcggaagcacagcccattcctcccatttttggcaatgatgtctggatgttattttaaacagtgtgtctgtgtgttcccaaatccagctggccccaccagctcagattccatttttttgtgtgtgtgtgtgtgaaacgtagtctgcaactctgcctcccggcaattatacatgtgtcagaattgcttgaatctgggagatggaggttgcagtgagctgagatcgtgcccctgcactccagcctaggcgacagagtgggactccatctcaaataaa

SEQ ID NO: 292508 - DNA, 2655 bp, Homo sapiens
ttcctttttggcgagacaatgtgcaaatgacaccgttttgtgctcaccagggcaaagcaagggagcgccctcacttcagcatctcagccctgctaaagaaaaagctgctgggtaacatcctttgtttttgcccagggaagctttagctgtgattcccttcagccggctcctgaatgtcaaagccagcacaggccagccagaagatgacactgagactacaggtttggaaggcggcgttgccatgccaggtgccgaagatgatgtggtgactccaggaaccagcgaagaccgctataagtctggcttgacaactctggtggcaacaagtgtcaacagtgtaacaggcattcgcatcgaggatctgccaacttcagaaagcacagtccacgcgcaagaacaaagtccaagcgccacagcctcaaacgtggccaccagtcactccacggagaaagtggatggagacacacagacaacagttgagaaagatggtttgtcaacagtgaccctggttggaatcatagttggggtcttactagccatcggcttcattggtggaatcatcgttgtggttatgcgaaaaatgtcgggaaggtactcgccctaaagagctgaagggttacgccctgctgccaacgtgcttaaaaaaagaccgtttctgactctgtgccctgtccctgagctcgtgggagaagatgacccgtggaacacttgcctggcccactcagaatccacggtgacctctccgcttgccaaaataaccgaaggaaagaccgttcaccagacttggctcctctaaacatttgctgttcaaacatgtttttgaatatacattctataaaagattatttgaaagacaaaattcatagaaaatggagcaaaactgtataaactgatttgtaactaacactggaccattggatcgatattatatgctgtaaccatgtgtctccgtctgaccattcttgttattgttaaaatgcagaggaatctggaaatatttatatccacggagtccttggatccagtgctacgtcagtaaatagcaccagcattttgcaattgctgatctgctgaaatgtacacattctggtctagtttggtctatcttttaaagcctgatctggtgtgaataatcaactaggaaatctaaacttggataacacgtggtgaacaactgcctttagctggtccagattaatcatttcaaagacatccattttagatcacaagcaggaagtcgatagtctcaaaggcactttgtttctcccaagtaggccaccaggcagcctctagagttgctttacccaaatccttctccagccatgacttggtgactctaagcttgctcccacctgccccctccacttccctcagatgatgaggagccagggctaagggggcagccttctctcttcccagtgatgcacatccttcacattggctgctttgttctggaatatggatatctcagcctggatgccgaggaagctgctggatgcttaatggtgctagaggctcaagtgtgtttgaaaccaagagccagttgtcccccatgcagaaagaaatcctgtgtgagcctctggtatgagaaataaaatctgccagttttataacattcactttctgcctctgaggaaagatacagggaacaaaaatcaatttgtacagtcttaatattaaaagcagcttgactaaatacctgatttaaaaatagaagacatccccagtcctcatgacataccgcaaatatctgtggggtcctgttgaaaagaacaaaataaaggagcccaaggggtcattctgtctcagcaccatccagcctggcacttctcttcccatatatccattggattttttttttttttcctaaacaaagtttttacactgagcagatgctctgtcatgatggcggttgtgcaattctggtatcctctaaatttgtaagcattcataaaacaggaaaaagtaaactatcattcggaagcacagcccattcctcccatttttggcaatgatgtctggatgttattttaaacagtgtgtctgtgtgttcccaaatccagctggccccaccagctcagattccatttttttgtgtgtgtgtgtgtgaaacgtagtctgcaactctgcctcccggcaattatacatgtgtcaggatgtcaaaaagcaattctcctgcctcagcctcctgagtagctgggactacaggttcctaccaccacacccggccaatttttgtatttttagtagagatggggtttcaccgtatcggcgaggatgatctctatctcttgacctcgtgatctgcccgcctcggcctcccaaagtgctgggattacaggcgtgtgccactgcgctcggcctcagattccatatttgaacaccagctgattgagagaaggggaatgagaagagctggatgagtttaaataactttcattgttcagattcctgaacaggagttgggataatggccatcttttctttcctatcctttcttcccccctcactgtgaaaaataacagtccaccccaagtcatacactggacccagtgcctgcggggacaggactgtgggtttcttggtcacacctgtgttggtgctcaatgcagtgtagacatgttttcaaataaaacaaatgattgtgtacaacaa

SEQ ID NO: 292509 - DNA, 2790 bp, Homo sapiens
ttcctttttggcgagacaatgtgcaaatgacaccgttttgtgctcaccagggcaaagcaagggagcgccctcacttcagcatctcagccctgctaaagaaaaagctgctgggtaacatcctttgtttttgcccagggaagctttagctgtgattcccttcagccggctcctgaatgtcaaaggtactcctaaaagatggcgttaaaaccgaaaaaccatcgttggtgctggaaactccactactaaagaaagaagtgccagcacaggccagccagaagatgacactgagactacaggtttggaaggcggcgttgccatgccaggtgccgaagatgatgtggtgactccaggaaccagcgaagaccgctataagtctggcttgacaactctgcccctggcagccactgttctactttctatcttatgaatttgactcctctaggcacctcatgtggcaacaagtgtcaacagtgtaacaggcattcgcatcgaggatctgccaacttcagaaagcacagtccacgcgcaagaacaaagtccaagcgccacagcctcaaacgtggccaccagtcactccacggagaaagtggatggagacacacagacaacagttgagaaagatggtttgtcaacagtgaccctggttggaatcatagttggggtcttactagccatcggcttcattggtggaatcatcgttgtggttatgcgaaaaatgtcgggaaggtactcgccctaaagagctgaagggttacgccctgctgccaacgtgcttaaaaaaagaccgtttctgactctgtgccctgtccctgagctcgtgggagaagatgacccgtggaacacttgcctggcccactcagaatccacggtgacctctccgcttgccaaaataaccgaaggaaagaccgttcaccagacttggctcctctaaacatttgctgttcaaacatgtttttgaatatacattctataaaagattatttgaaagacaaaattcatagaaaatggagcaaaactgtataaactgatttgtaactaacactggaccattggatcgatattatatgctgtaaccatgtgtctccgtctgaccattcttgttattgttaaaatgcagaggaatctggaaatatttatatccacggagtccttggatccagtgctacgtcagtaaatagcaccagcattttgcaattgctgatctgctgaaatgtacacattctggtctagtttggtctatcttttaaagcctgatctggtgtgaataatcaactaggaaatctaaacttggataacacgtggtgaacaactgcctttagctggtccagattaatcatttcaaagacatccattttagatcacaagcaggaagtcgatagtctcaaaggcactttgtttctcccaagtaggccaccaggcagcctctagagttgctttacccaaatccttctccagccatgacttggtgactctaagcttgctcccacctgccccctccacttccctcagatgatgaggagccagggctaagggggcagccttctctcttcccagtgatgcacatccttcacattggctgctttgttctggaatatggatatctcagcctggatgccgaggaagctgctggatgcttaatggtgctagaggctcaagtgtgtttgaaaccaagagccagttgtcccccatgcagaaagaaatcctgtgtgagcctctggtatgagaaataaaatctgccagttttataacattcactttctgcctctgaggaaagatacagggaacaaaaatcaatttgtacagtcttaatattaaaagcagcttgactaaatacctgatttaaaaatagaagacatccccagtcctcatgacataccgcaaatatctgtggggtcctgttgaaaagaacaaaataaaggagcccaaggggtcattctgtctcagcaccatccagcctggcacttctcttcccatatatccattggattttttttttttttcctaaacaaagtttttacactgagcagatgctctgtcatgatggcggttgtgcaattctggtatcctctaaatttgtaagcattcataaaacaggaaaaagtaaactatcattcggaagcacagcccattcctcccatttttggcaatgatgtctggatgttattttaaacagtgtgtctgtgtgttcccaaatccagctggccccaccagctcagattccatttttttgtgtgtgtgtgtgtgaaacgtagtctgcaactctgcctcccggcaattatacatgtgtcaggatgtcaaaaagcaattctcctgcctcagcctcctgagtagctgggactacaggttcctaccaccacacccggccaatttttgtatttttagtagagatggggtttcaccgtatcggcgaggatgatctctatctcttgacctcgtgatctgcccgcctcggcctcccaaagtgctgggattacaggcgtgtgccactgcgctcggcctcagattccatatttgaacaccagctgattgagagaaggggaatgagaagagctggatgagtttaaataactttcattgttcagattcctgaacaggagttgggataatggccatcttttctttcctatcctttcttcccccctcactgtgaaaaataacagtccaccccaagtcatacactggacccagtgcctgcggggacaggactgtgggtttcttggtcacacctgtgttggtgctcaatgcagtgtagacatgttttcaaataaaacaaatgattgtgtacaacaa

SEQ ID NO: 292510 - DNA, 2525 bp, Homo sapiens
ttcctttttggcgagacaatgtgcaaatgacaccgttttgtgctcaccagggcaaagcaagggagcgccctcacttcagcatctcagccctgctaaagaaaaagctgctgggtaacatcctttgtttttgcccagggaagctttagctgtgattcccttcagccggctcctgaatgtcaaagccagcacaggccagccagaagatgacactgagactacaggtttggaaggcggcgttgccatgccaggtgccgaagatgatgtggtgactccaggaaccagcgaagaccgctataagtctggcttgacaactctgagaaagtggatggagacacacagacaacagttgagaaagatggtttgtcaacagtgaccctggttggaatcatagttggggtcttactagccatcggcttcattggtggaatcatcgttgtggttatgcgaaaaatgtcgggaaggtactcgccctaaagagctgaagggttacgccctgctgccaacgtgcttaaaaaaagaccgtttctgactctgtgccctgtccctgagctcgtgggagaagatgacccgtggaacacttgcctggcccactcagaatccacggtgacctctccgcttgccaaaataaccgaaggaaagaccgttcaccagacttggctcctctaaacatttgctgttcaaacatgtttttgaatatacattctataaaagattatttgaaagacaaaattcatagaaaatggagcaaaactgtataaactgatttgtaactaacactggaccattggatcgatattatatgctgtaaccatgtgtctccgtctgaccattcttgttattgttaaaatgcagaggaatctggaaatatttatatccacggagtccttggatccagtgctacgtcagtaaatagcaccagcattttgcaattgctgatctgctgaaatgtacacattctggtctagtttggtctatcttttaaagcctgatctggtgtgaataatcaactaggaaatctaaacttggataacacgtggtgaacaactgcctttagctggtccagattaatcatttcaaagacatccattttagatcacaagcaggaagtcgatagtctcaaaggcactttgtttctcccaagtaggccaccaggcagcctctagagttgctttacccaaatccttctccagccatgacttggtgactctaagcttgctcccacctgccccctccacttccctcagatgatgaggagccagggctaagggggcagccttctctcttcccagtgatgcacatccttcacattggctgctttgttctggaatatggatatctcagcctggatgccgaggaagctgctggatgcttaatggtgctagaggctcaagtgtgtttgaaaccaagagccagttgtcccccatgcagaaagaaatcctgtgtgagcctctggtatgagaaataaaatctgccagttttataacattcactttctgcctctgaggaaagatacagggaacaaaaatcaatttgtacagtcttaatattaaaagcagcttgactaaatacctgatttaaaaatagaagacatccccagtcctcatgacataccgcaaatatctgtggggtcctgttgaaaagaacaaaataaaggagcccaaggggtcattctgtctcagcaccatccagcctggcacttctcttcccatatatccattggattttttttttttttcctaaacaaagtttttacactgagcagatgctctgtcatgatggcggttgtgcaattctggtatcctctaaatttgtaagcattcataaaacaggaaaaagtaaactatcattcggaagcacagcccattcctcccatttttggcaatgatgtctggatgttattttaaacagtgtgtctgtgtgttcccaaatccagctggccccaccagctcagattccatttttttgtgtgtgtgtgtgtgaaacgtagtctgcaactctgcctcccggcaattatacatgtgtcaggatgtcaaaaagcaattctcctgcctcagcctcctgagtagctgggactacaggttcctaccaccacacccggccaatttttgtatttttagtagagatggggtttcaccgtatcggcgaggatgatctctatctcttgacctcgtgatctgcccgcctcggcctcccaaagtgctgggattacaggcgtgtgccactgcgctcggcctcagattccatatttgaacaccagctgattgagagaaggggaatgagaagagctggatgagtttaaataactttcattgttcagattcctgaacaggagttgggataatggccatcttttctttcctatcctttcttcccccctcactgtgaaaaataacagtccaccccaagtcatacactggacccagtgcctgcggggacaggactgtgggtttcttggtcacacctgtgttggtgctcaatgcagtgtagacatgttttcaaataaaacaaatgattgtgtacaacaa

SEQ ID NO: 292511 - DNA, 758 bp, Homo sapiens
aactatacgctaggtacgaggctgggtggcgcgctcttcggttctgctctgtccgccgccatggcccaagctgacatcgcgctgatcggattggccgtcatgggccagaacttaattctgaacatgaatgaccacggctttgtggtctgtgcttttaataggactgtctccaaagttgatgatttcttggccaatgaggcaaagggaaccaaagtggtgggtgcccagtccctgaaagagatggtctccaagctgaagaagccccggcggatcatcctcctggtgaaggctgggcaagctgtggatgatttcatcgagaaattggtaccattgttggatactggtgacatcatcattgacggaggaaattctgaatatagggacaccacaagacggtgccgagacctcaaggccaagggaattttatttgtggggagcggagtcagtggtggagaggaaggggcccggtatggcccatcgctcatgccaggagggaacaaagaagcgtggccccacatcaagaccatcttccaaggcattgctgcaaaagtgggaactggagaaccctgctgtgactgggtgggagatgagggagcaggccacttcgtgaagatggtgcacaacgggatagagtatggggacatgcagctgatctgtgaggcataccacctgatgaaagacgtgctgggcatggcgcaggacgagatggcccagggccttgaggttcggctcccccggctaacccttcccgtttgacc

SEQ ID NO: 292512 - DNA, 478 bp, Homo sapiens
cgcagtttctggagggagccgctgcgggtctttccctcactcgtcctccgcgcgtcgccgctcttcggttctgctctgtccgccgccatggcccaagctgacatcgcgctgatcggattggccgtcatgggccagaacttaattctgaacatgaatgaccacggctttgtggtaagcggcgtgggcgcgttgtcttctctctggttcccgggcgctttagccgaggccggcgataggtttgggagcttacgggtctcctggccgtgctttgctaatgtgctctgttgctgctcgtggcatttttgtatggaaaggagaagcaccctgtaggcgtgggcgggccgatcccgaacttagtcctgcggagtgtgcctgtgggtccgtgaggttcacagcccgaatgaacgaattagtgtcttaagtagagaagaagggtgcgggaggagaacccttgctggctgtgtagagctctaacttg

SEQ ID NO: 292513 - DNA, 2309 bp, Homo sapiens
cgcagtttctggagggagccgctgcgggtctttccctcactcgtcctccgcgcgtcgccgctcttcggttctgctctgtccgccgccatggcccaagctgacatcgcgctgatcggattggccgtcatgggccagaacttaattctgaacatgaatgaccacggctttgtggtctgtgcttttaataggactgtctccaaagttgatgatttcttggccaatgaggcaaagggaaccaaagtggtgggtgcccagtccctgaaagagatggtctccaagctgaagaagccccggcggatcatcctcctggtgaaggctgggcaagctgtggatgatttcatcgagaaattggtaccattgttggatactggtgacatcatcattgacggaggaaattctgaatatagggacaccacaagacggtgccgagacctcaaggccaagggaattttatttgtggggagcggagtcagtggtggagaggaaggggcccggtatggcccatcgctcatgccaggagggaacaaagaagcgtggccccacatcaagaccatcttccaaggcattgctgcaaaagtgggaactggagaaccctgctgtgactgggtgggagatgagggagcaggccacttcgtgaagatggtgcacaacgggatagagtatggggacatgcagctgatctgtgaggcataccacctgatgaaagacgtgctgggcatggcgcaggacgagatggcccaggcctttgaggattggaataagacagagctagactcattcctgattgaaatcacagccaatattctcaagttccaagacaccgatggcaaacacctgctgccaaagatcagggacagcgcggggcagaagggcacagggaagtggaccgccatctccgccctggaatacggcgtacccgtcaccctcattggagaagctgtctttgctcggtgcttatcatctctgaaggatgagagaattcaagctagcaaaaagctgaagggtccccagaagttccagtttgatggtgataagaaatcattcctggaggacattcggaaggcactctacgcttccaagatcatctcttacgctcaaggctttatgctgctaaggcaggcagccaccgagtttggctggactctcaattatggtggcatcgccctgatgtggagagggggctgcatcattagaagtgtattcctaggaaagataaaggatgcatttgatcgaaacccggaacttcagaacctcctactggacgacttctttaagtcagctgttgaaaactgccaggactcctggcggcgggcagtcagcactggggtccaggctggcattcccatgccctgttttaccactgccctctccttctatgacgggtacagacatgagatgcttccagccagcctcatccaggctcagcgggattacttcggggctcacacctatgaactcttggccaaaccagggcagtttatccacaccaactggacaggccatggtggcaccgtgtcatcctcgtcatacaatgcctgatcatgctgctcctgtcaccctccacgattccacagaccaggacattccatgtgcctcatggcactgccacctggccctttgccctattttctgttcagttttttaaaagtgttgtaagagactcctgaggaagacacacagtttatttgtaaagtagctctgtgagagccaccatgccctctgcccttgcctcttgggactgaccaggagctgctcatgtgcgtgagagtgggaaccatctccttgcggcagtggcttccgcgtgccccgtgtgctggtgcggttcccatcacgcagacaggaagggtgtttgcgcactctgatcaactggaacctctgtatcatgcggctgaattccctttttcctttactcaataaaagctacatcagactgatgctctttctccagattcttagtctcacctcggccacatggagccattatccccattggcagaaagatttttctttaaaaaaaaagactagaataacacaagaaaccacatttaggattatgcttcactcagaggaggcaggcagggaggacacaccaggggctttaatacactgggcatgttttctttctccaattgggcaatgggtacatggacgttcactgtaacgtgctttttctttcgtcttttttttttttttttttttttttgctcctggcaagctgtgcgtgacattctttatggctttttgtatgtcaaatacttcatactaaactttctagagaattaaactttaatgatgggctcagcttggtc

SEQ ID NO: 292514 - DNA, 2116 bp, Homo sapiens
cgcagtttctggagggagccgctgcgggtctttccctcactcgtcctccgcgcgtcgccgctcttcggttctgctctgtccgccgccatggcccaagctgacatcgcgctgatcggattggccgtcatgggccagaacttaattctgaacatgaatgaccacggctttgtggtctgtgcttttaataggactgtctccaaagttgatgatttcttggccaatgaggcaaagggaaccaaagtggtgggtgcccagtccctgaaagagatggtctccaagctgaagaagccccggcggatcatcctcctggtgaaggctgggcaagctgtggatgatttcatcgagaaattggtaccattgttggatactggtgacatcatcattgacggaggaaattctgaatatagggacaccacaagacggtgccgagacctcaaggccaagggaattttatttgtggggagcggagtcagtggtggagaggaaggggcccggtatggcccatcgctcatgccaggagggaacaaagaagcgtggccccacatcaagaccatcttccaaggcattgctgcaaaagtgggaactggagaaccctgctgtgactgggtgggagatgagggagcaggccacttcgtgaagatggtgcacaacgggatagagtatggggacatgcagctgatctgtgaggcataccacctgatgaaagacgtgctgggcatggcgcaggacgagatggcccaggcctttgaggattggaataagacagagctagactcattcctgattgaaatcacagccaatattctcaagttccaagacaccgatggcaaacacctgctgccaaagatcagggacagcgcggggcagaagggcacagggaagtggaccgccatctccgccctggaatacggcgtacccgtcaccctcattggagaagctgtctttgctcggtgcttatcatctctgaaggatgagagaattcaagctagcaaaaagctgaagggtccccagaagttccagtttgatggtgataagaaatcattcctggaggacattcggaaggcactctacgcttccaagatcatctcttacgctcaaggctttatgctgctaaggcaggcagccaccgagtttggctggactctcaattatggtggcatcgccctgatgtggagagggggctgcatcattagaagtgtattcctaggaaagataaaggatgcatttgatcgaaacccggaacttcagaacctcctactggacgacttctttaagtcagctgttgaaaactgccaggactcctggcggcgggcagtcagcactggggtccaggctggcattcccatgccctgttttaccactgccctctccttctatgacgggtacagacatgagatgcttccagccagcctcatccaggctcagcgggattacttcggggctcacacctatgaactcttggccaaaccagggcagtttatccacaccaactggacaggccatggtggcaccgtgtcatcctcgtcatacaatgcctgatcatgctgctcctgtcaccctccacgattccacagaccaggacattccatgtgcctcatggcactgccacctggccctttgccctattttctgttcagttttttaaaagtgttgtaagagactcctgaggaagacacacagtttatttgtaaagtagctctgtgagagccaccatgccctctgcccttgcctcttgggactgaccaggagctgctcatgtgcgtgagagtgggaaccatctccttgcggcagtggcttccgcgtgccccgtgtgctggtgcggttcccatcacgcagacaggaagggtgtttgcgcactctgatcaactggaacctctgtatcatgcggctgaattccctttttcctttactcaataaaagctacatcagactgatgctctttctccagattcttagtctcacctcggccacatggagccattatccccattggcagaaagatttttctttaaaaaaaaagactagaataacacaagaaaccacatttaggattatgcttcactcagaggaggcagtccagatcgagtgactgggatcctctagaacagctatacat

SEQ ID NO: 292515 - DNA, 2288 bp, Homo sapiens
  misc_feature (21)..(21): n is a, c, g, or t
caggctgtaccggcccgaggngtaaggatcgcgtcgccgctcttcggttctgctctgtccgccgccatggcccaagctgacatcgcgctgatcggattggccgtcatgggccagaacttaattctgaacatgaatgaccacggctttgtggtctgtgcttttaataggactgtctccaaagttgatgatttcttggccaatgaggcaaagggaaccaaagtggtgggtgcccagtccctgaaagagatggtctccaagctgaagaagccccggcggatcatcctcctggtgaaggctgggcaagctgtggatgatttcatcgagaaattggtaccattgttggatactggtgacatcatcattgacggaggaaattctgaatatagggacaccacaagacggtgccgagacctcaaggccaagggaattttatttgtggggagcggagtcagtggtggagaggaaggggcccggtatggcccatcgctcatgccaggagggaacaaagaagcgtggccccacatcaagaccatcttccaaggcattgctgcaaaagtgggaactggagaaccctgctgtgactgggtgggagatgagggagcaggccacttcgtgaagatggtgcacaacgggatagagtatggggacatgcagctgatctgtgaggcataccacctgatgaaagacgtgctgggcatggcgcaggacgagatggcccaggcctttgaggattggaataagacagagctagactcattcctgattgaaatcacagccaatattctcaagttccaagacaccgatggcaaacacctgctgccaaagatcagggacagcgcggggcagaagggcacagggaagtggaccgccatctccgccctggaatacggcgtacccgtcaccctcattggagaagctgtctttgctcggtgcttatcatctctgaaggatgagagaattcaagctagcaaaaagctgaagggtccccagaagttccagtttgatggtgataagaaatcattcctggaggacattcggaaggcactctacgcttccaagatcatctcttacgctcaaggctttatgctgctaaggcaggcagccaccgagtttggctggactctcaattatggtggcatcgccctgatgtggagagggggctgcatcattagaagtgtattcctaggaaagataaaggatgcatttgatcgaaacccggaacttcagaacctcctactggacgacttctttaagtcagctgttgaaaactgccaggactcctggcggcgggcagtcagcactggggtccaggctggcattcccatgccctgttttaccactgccctctccttctatgacgggtacagacatgagatgcttccagccagcctcatccaggctcagcgggattacttcggggctcacacctatgaactcttggccaaaccagggcagtttatccacaccaactggacaggccatggtggcaccgtgtcatcctcgtcatacaatgcctgatcatgctgctcctgtcaccctccacgattccacagaccaggacattccatgtgcctcatggcactgccacctggccctttgccctattttctgttcagttttttaaaagtgttgtaagagactcctgaggaagacacacagtttatttgtaaagtagctctgtgagagccaccatgccctctgcccttgcctcttgggactgaccaggagctgctcatgtgcgtgagagtgggaaccatctccttgcggcagtggcttccgcgtgccccgtgtgctggtgcggttcccatcacgcagacaggaagggtgtttgcgcactctgatcaactggaacctctgtatcatgcggctgaattccctttttcctttactcaataaaagctacatcagactgatgctctttctccagattcttagtctcacctcggccacatggagccattatccccattggcagaaagatttttctttaaaaaaaaagactagaataacacaagaaaccacatttaggattatgcttcactcagaggaggcaggcagggaggacacaccaggggctttaatacactgggcatgttttctttctccaattgggcaatgggtacatggacgttcactgtaacgtgctttttctttcgtcttttttttttttttttttttttttgctcctggcaagctgtgcgtgacattctttatggctttttgtatgtcaaatacttcatactaaactttctagagaattaaactttaatgatgggctcagcttggtc

SEQ ID NO: 292516 - DNA, 2303 bp, Homo sapiens
gtataaataggctaggtacgaagctggtggtgaatcggcagaggcgcgtcgccgctcttcggttctgctctgtccgccgccatggcccaagctgacatcgcgctgatcggattggccgtcatgggccagaacttaattctgaacatgaatgaccacggctttgtggtctgtgcttttaataggactgtctccaaagttgatgatttcttggccaatgaggcaaagggaaccaaagtggtgggtgcccagtccctgaaagagatggtctccaagctgaagaagccccggcggatcatcctcctggtgaaggctgggcaagctgtggatgatttcatcgagaaattggtaccattgttggatactggtgacatcatcattgacggaggaaattctgaatatagggacaccacaagacggtgccgagacctcaaggccaagggaattttatttgtggggagcggagtcagtggtggagaggaaggggcccggtatggcccatcgctcatgccaggagggaacaaagaagcgtggccccacatcaagaccatcttccaaggcattgctgcaaaagtgggaactggagaaccctgctgtgactgggtgggagatgagggagcaggccacttcgtgaagatggtgcacaacgggatagagtatggggacatgcagctgatctgtgaggcataccacctgatgaaagacgtgctgggcatggcgcaggacgagatggcccaggcctttgaggattggaataagacagagctagactcattcctgattgaaatcacagccaatattctcaagttccaagacaccgatggcaaacacctgctgccaaagatcagggacagcgcggggcagaagggcacagggaagtggaccgccatctccgccctggaatacggcgtacccgtcaccctcattggagaagctgtctttgctcggtgcttatcatctctgaaggatgagagaattcaagctagcaaaaagctgaagggtccccagaagttccagtttgatggtgataagaaatcattcctggaggacattcggaaggcactctacgcttccaagatcatctcttacgctcaaggctttatgctgctaaggcaggcagccaccgagtttggctggactctcaattatggtggcatcgccctgatgtggagagggggctgcatcattagaagtgtattcctaggaaagataaaggatgcatttgatcgaaacccggaacttcagaacctcctactggacgacttctttaagtcagctgttgaaaactgccaggactcctggcggcgggcagtcagcactggggtccaggctggcattcccatgccctgttttaccactgccctctccttctatgacgggtacagacatgagatgcttccagccagcctcatccaggctcagcgggattacttcggggctcacacctatgaactcttggccaaaccagggcagtttatccacaccaactggacaggccatggtggcaccgtgtcatcctcgtcatacaatgcctgatcatgctgctcctgtcaccctccacgattccacagaccaggacattccatgtgcctcatggcactgccacctggccctttgccctattttctgttcagttttttaaaagtgttgtaagagactcctgaggaagacacacagtttatttgtaaagtagctctgtgagagccaccatgccctctgcccttgcctcttgggactgaccaggagctgctcatgtgcgtgagagtgggaaccatctccttgcggcagtggcttccgcgtgccccgtgtgctggtgcggttcccatcacgcagacaggaagggtgtttgcgcactctgatcaactggaacctctgtatcatgcggctgaattccctttttcctttactcaataaaagctacatcagactgatgctctttctccagattcttagtctcacctcggccacatggagccattatccccattggcagaaagatttttctttaaaaaaaaagactagaataacacaagaaaccacatttaggattatgcttcactcagaggaggcaggcagggaggacacaccaggggctttaatacactgggcatgttttctttctccaattgggcaatgggtacatggacgttcactgtaacgtgctttttctttcgtcttttttttttttttttttttttttgctcctggcaagctgtgcgtgacattctttatggctttttgtatgtcaaatacttcatactaaactttctagagaattaaactttaatgatgggctcagcttggtc

SEQ ID NO: 292517 - DNA, 2284 bp, Homo sapiens
ggacgcgtgggtcgacccacgcggtcgcgtcgccgctcttcggttctgctctgtccgccgccatggcccaagctgacatcgcgctgatcggattggccgtcatgggccagaacttaattctgaacatgaatgaccacggctttgtggtctgtgcttttaataggactgtctccaaagttgatgatttcttggccaatgaggcaaagggaaccaaagtggtgggtgcccagtccctgaaagagatggtctccaagctgaagaagccccggcggatcatcctcctggtgaaggctgggcaagctgtggatgatttcatcgagaaattggtaccattgttggatactggtgacatcatcattgacggaggaaattctgaatatagggacaccacaagacggtgccgagacctcaaggccaagggaattttatttgtggggagcggagtcagtggtggagaggaaggggcccggtatggcccatcgctcatgccaggagggaacaaagaagcgtggccccacatcaagaccatcttccaaggcattgctgcaaaagtgggaactggagaaccctgctgtgactgggtgggagatgagggagcaggccacttcgtgaagatggtgcacaacgggatagagtatggggacatgcagctgatctgtgaggcataccacctgatgaaagacgtgctgggcatggcgcaggacgagatggcccaggcctttgaggattggaataagacagagctagactcattcctgattgaaatcacagccaatattctcaagttccaagacaccgatggcaaacacctgctgccaaagatcagggacagcgcggggcagaagggcacagggaagtggaccgccatctccgccctggaatacggcgtacccgtcaccctcattggagaagctgtctttgctcggtgcttatcatctctgaaggatgagagaattcaagctagcaaaaagctgaagggtccccagaagttccagtttgatggtgataagaaatcattcctggaggacattcggaaggcactctacgcttccaagatcatctcttacgctcaaggctttatgctgctaaggcaggcagccaccgagtttggctggactctcaattatggtggcatcgccctgatgtggagagggggctgcatcattagaagtgtattcctaggaaagataaaggatgcatttgatcgaaacccggaacttcagaacctcctactggacgacttctttaagtcagctgttgaaaactgccaggactcctggcggcgggcagtcagcactggggtccaggctggcattcccatgccctgttttaccactgccctctccttctatgacgggtacagacatgagatgcttccagccagcctcatccaggctcagcgggattacttcggggctcacacctatgaactcttggccaaaccagggcagtttatccacaccaactggacaggccatggtggcaccgtgtcatcctcgtcatacaatgcctgatcatgctgctcctgtcaccctccacgattccacagaccaggacattccatgtgcctcatggcactgccacctggccctttgccctattttctgttcagttttttaaaagtgttgtaagagactcctgaggaagacacacagtttatttgtaaagtagctctgtgagagccaccatgccctctgcccttgcctcttgggactgaccaggagctgctcatgtgcgtgagagtgggaaccatctccttgcggcagtggcttccgcgtgccccgtgtgctggtgcggttcccatcacgcagacaggaagggtgtttgcgcactctgatcaactggaacctctgtatcatgcggctgaattccctttttcctttactcaataaaagctacatcagactgatgctctttctccagattcttagtctcacctcggccacatggagccattatccccattggcagaaagatttttctttaaaaaaaaagactagaataacacaagaaaccacatttaggattatgcttcactcagaggaggcaggcagggaggacacaccaggggctttaatacactgggcatgttttctttctccaattgggcaatgggtacatggacgttcactgtaacgtgctttttctttcgtcttttttttttttttttttttttttgctcctggcaagctgtgcgtgacattctttatggctttttgtatgtcaaatacttcatactaaactttctagagaattaaactttaatgatgggctcagcttggtc

SEQ ID NO: 292518 - DNA, 2488 bp, Homo sapiens
cgcagtttctggagggagccgctgcgggtctttccctcactcgtcctccgcgcgtcgccgctcttcggttctgctctgtccgccgccatggcccaagctgacatcgcgctgatcggattggccgtcatgggccagaacttaattctgaacatgaatgaccacggctttgtggtctgtgcttttaataggactgtctccaaagttgatgatttcttggccaatgaggcaaagggaaccaaagtggtgggtgcccagtccctgaaagagatggtctccaagctgaagaagccccggcggatcatcctcctggtgaaggctgggcaagctgtggatgatttcatcgagaaattggtaccattgttggatactggtgacatcatcattgacggaggaaattctgaatatagggacaccacaagacggtgccgagacctcaaggccaagggaattttatttgtggggagcggagtcagtggtggagaggaaggggcccggtatggcccatcgctcatgccaggagggaacaaagaagcgtggccccacatcaagaccatcttccaaggcattgctgcaaaagtgggaactggagaaccctgctgtgactgggtgggagatgagggagcaggccacttcgtgaagatggtgcacaacgggatagagtatggggacatgcagctgatctgtgaggcataccacctgatgaaagacgtgctgggcatggcgcaggacgagatggcccaggcctttgaggattggaataagacagagctagactcattcctgattgaaatcacagccaatattctcaagttccaagacaccgatggcaaacacctgctgccaaagatcagggacagcgcggggcagaagggcacagggaagtggaccgccatctccgccctggaatacggcgtacccgtcaccctcattggagaagctgtctttgctcggtgcttatcatctctgaaggatgagagaattcaagctagcaaaaagctgaagggtccccagaagttccagtttgatggtgataagaaatcattcctggaggacattcggaaggcactctacgcttccaagatcatctcttacgctcaaggctttatgctgctaaggcaggcagccaccgagtttggctggactctcaattatggtggcatcgccctgatgtggagagggggctgcatcattagaagtgtattcctaggaaagataaaggatgcatttgatcgaaacccggaacttcagaacctcctactggacgacttctttaagtcagctgttgaaaactgccaggactcctggcggcgggcagtcagcactggggtccaggctggcattcccatgccctgttttaccactgccctctccttctatgacgggtacagacatgagatgcttccagccagcctcatccaggctcagcgggattacttcggggctcacacctatgaactcttggccaaaccagggcagtttatccacaccaactggacaggccatggtggcaccgtgtcatcctcgtcatacaatgcctgatcatgctgctcctgtcaccctccacgattccacagaccaggacattccatgtgcctcatggcactgccacctggccctttgccctattttctgttcagttttttaaaagtgttgtaagagactcctgaggaagacacacagtttatttgtaaagtagctctgtgagagccaccatgccctctgcccttgcctcttgggactgaccaggagctgctcatgtgcgtgagagtgggaaccatctccttgcggcagtggcttccgcgtgccccgtgtgctggtgcggttcccatcacgcagacaggaagggtgtttgcgcactctgatcaactggaacctctgtatcatgcggctgaattccctttttcctttactcaataaaagctacatcagactaaaaaaaaaaaaaaaaaaaaaaaaaaaaataaaaaataagacaccaatatccataatctactatataaatcaacacattactataccataaaagcatctgagatcgtcgcccgctcgacaccactctatatctacttacatggcgcctccacatatcactctctcccactcacttctacctcttttctcttttcctcacgccaggacgcaatcaaacacatagaagggatacaactcgtgggatgctcaatgacagaatcggacagccgacagtgcggagagcaacgcgcgacaccgccgtaacatacgatgccgatgtcggtcgcggacggcgcgtgcgcgcgtcagcaggagtgcggctcagtacctaattactagactatgtctagctagagtctcatgtgaagcgcgtctggcttctgcgtgctctggccgaagctatcccactactcctttcatctcatggtcagtgagttgtgactatagaatagtatctgaatatatctgacaagggatcggagtggtaccgaaaagactatgtcactactatgcagta

SEQ ID NO: 292519 - DNA, 1984 bp, Homo sapiens
cgcagtttctggagggagccgctgcgggtctttccctcactcgtcctccgcgcgtcgccgctcttcggttctgctctgtccgccgccatggcccaagctgacatcgcgctgatcggattggccgtcatgggccagaacttaattctgaacatgaatgaccacggctttgtggtctgtgcttttaataggactgtctccaaagttgatgatttcttggccaatgaggcaaagggaaccaaagtggtgggtgcccagtccctgaaagagatggtctccaagctgaagaagccccggcggatcatcctcctggtgaaggctgggcaagctgtggatgatttcatcgagaaattggtaccattgttggatactggtgacatcatcattgacggaggaaattctgaatatagggacaccacaagacggtgccgagacctcaaggccaagggaattttatttgtggggagcggagtcagtggtggagaggaaggggcccggtatggcccatcgctcatgccaggagggaacaaagaagcgtggccccacatcaagaccatcttccaaggcattgctgcaaaagtgggaactggagaaccctgctgtgactgggtgggagatgagggagcaggccacttcgtgaagatggtgcacaacgggatagagtatggggacatgcagctgatctgtgaggcataccacctgatgaaagacgtgctgggcatggcgcaggacgagatggcccaggcctttgaggattggaataagacagagctagactcattcctgattgaaatcacagccaatattctcaagttccaagacaccgatggcaaacacctgctgccaaagatcagggacagcgcggggcagaagggcacagggaagtggaccgccatctccgccctggaatacggcgtacccgtcaccctcattggagaagctgtctttgctcggtgcttatcatctctgaaggatgagagaattcaagctagcaaaaagctgaagggtccccagaagttccagtttgatggtgataagaaatcattcctggaggacattcggaaggcactctacgcttccaagatcatctcttacgctcaaggctttatgctgctaaggcaggcagccaccgagtttggctggactctcaattatggtggcatcgccctgatgtggagagggggctgcatcattagaagtgtattcctaggaaagataaaggatgcatttgatcgaaacccggaacttcagaacctcctactggacgacttctttaagtcagctgttgaaaactgccaggactcctggcggcgggcagtcagcactggggtccaggctggcattcccatgccctgttttaccactgccctctccttctatgacgggtacagacatgagatgcttccagccagcctcatccaggctcagcgggattacttcggggctcacacctatgaactcttggccaaaccagggcagtttatccacaccaactggacaggccatggtggcaccgtgtcatcctcgtcatacaatgcctgatcatgctgctcctgtcaccctccacgattccacagaccaggacattccatgtgcctcatggcactgccacctggccctttgccctattttctgttcagttttttaaaagtgttgtaagagactcctgaggaagacacacagtttatttgtaaagtagctctgtgagagccaccatgccctctgcccttgcctcttgggactgaccaggagctgctcatgtgcgtgagagtgggaaccatctccttgcggcagtggcttccgcgtgccccgtgtgctggtgcggttcccatcacgcagacaggaagggtgtttgcgcactctgatcaactggaacctctgtatcatgcggctgaattccctttttcctttactcaataaaagctacatcagactcaaaaaaccaaacccaacaaacccaacacacaaccatacacaccaaccaggg

SEQ ID NO: 292520 - DNA, 2523 bp, Homo sapiens
cgcagtttctggagggagccgctgcgggtctttccctcactcgtcctccgcgcgtcgccgctcttcggttctgctctgtccgccgccatggcccaagctgacatcgcgctgatcggattggccgtcatgggccagaacttaattctgaacatgaatgaccacggctttgtggtctgtgcttttaataggactgtctccaaagttgatgatttcttggccaatgaggcaaagggaaccaaagtggtgggtgcccagtccctgaaagagatggtctccaagctgaagaagccccggcggatcatcctcctggtgaaggctgggcaagctgtggatgatttcatcgagaaattggtaccattgttggatactggtgacatcatcattgacggaggaaattctgaatatagggacaccacaagacggtgccgagacctcaaggccaagggaattttatttgtggggagcggagtcagtggtggagaggaaggggcccggtatggcccatcgctcatgccaggagggaacaaagaagcgtggccccacatcaagaccatcttccaaggcattgctgcaaaagtgggaactggagaaccctgctgtgactgggtgggagatgagggagcaggccacttcgtgaagatggtgcacaacgggatagagtatggggacatgcagctgatctgtgaggcataccacctgatgaaagacgtgctgggcatggcgcaggacgagatggcccaggcctttgaggattggaataagacagagctagactcattcctgattgaaatcacagccaatattctcaagttccaagacaccgatggcaaacacctgctgccaaagatcagggacagcgcggggcagaagggcacagggaagtggaccgccatctccgccctggaatacggcgtacccgtcaccctcattggagaagctgtctttgctcggtgcttatcatctctgaaggatgagagaattcaagctagcaaaaagctgaagggtccccagaagttccagtttgatggtgataagaaatcattcctggaggacattcggaaggcactctacgcttccaagatcatctcttacgctcaaggctttatgctgctaaggcaggcagccaccgagtttggctggactctcaattatggtggcatcgccctgatgtggagagggggctgcatcattagaagtgtattcctaggaaagataaaggatgcatttgatcgaaacccggaacttcagaacctcctactggacgacttctttaagtcagctgttgaaaactgccaggactcctggcggcgggcagtcagcactggggtccaggctggcattcccatgccctgttttaccactgccctctccttctatgacgggtacagacatgagatgcttccagccagcctcatccaggctcagcgggattacttcggggctcacacctatgaactcttggccaaaccagggcagtttatccacaccaactggacaggccatggtggcaccgtgtcatcctcgtcatacaatgcctgatcatgctgctcctgtcaccctccacgattccacagaccaggacattccatgtgcctcatggcactgccacctggccctttgccctattttctgttcagttttttaaaagtgttgtaagagactcctgaggaagacacacagtttatttgtaaagtagctctgtgagagccaccatgccctctgcccttgcctcttgggactgaccaggagctgctcatgtgcgtgagagtgggaaccatctccttgcggcagtggcttccgcgtgccccgtgtgctggtgcggttcccatcacgcagacaggaagggtgtttgcgcactctgatcaactggaacctctgtatcatgcggctgaattccctttttcctttactcaataaaagctacatcagactaaaaaaaaaaaaataaaaaaaaaaaaaaaaaaaccaaaaaaaaaaaaaaaaaaaaaaaaaaaaataaaaaataagacaccaatatccataatctactatataaatcaacacattactataccataaaagcatctgagatcgtcgcccgctcgacaccactctatatctacttacatggcgcctccacatatcactctctcccactcacttctacctcttttctcttttcctcacgccaggacgcaatcaaacacatagaagggatacaactcgtgggatgctcaatgacagaatcggacagccgacagtgcggagagcaacgcgcgacaccgccgtaacatacgatgccgatgtcggtcgcggacggcgcgtgcgcgcgtcagcaggagtgcggctcagtacctaattactagactatgtctagctagagtctcatgtgaagcgcgtctggcttctgcgtgctctggccgaagctatcccactactcctttcatctcatggtcagtgagttgtgactatagaatagtatctgaatatatctgacaagggatcggagtggtaccgaaaagactatgtcactactatgcagta

SEQ ID NO: 292521 - DNA, 2098 bp, Homo sapiens
cgcagtttctggagggagccgctgcgggtctttccctcactcgtcctccgcgcgtcgccgctcttcggttctgctctgtccgccgccatggcccaagctgacatcgcgctgatcggattggccgtcatgggccagaacttaattctgaacatgaatgaccacggctttgtggtctgtgcttttaataggactgtctccaaagttgatgatttcttggccaatgaggcaaagggaaccaaagtggtgggtgcccagtccctgaaagagatggtctccaagctgaagaagccccggcggatcatcctcctggtgaaggctgggcaagctgtggatgatttcatcgagaaattggtaccattgttggatactggtgacatcatcattgacggaggaaattctgaatatagggacaccacaagacggtgccgagacctcaaggccaagggaattttatttgtggggagcggagtcagtggtggagaggaaggggcccggtatggcccatcgctcatgccaggagggaacaaagaagcgtggccccacatcaagaccatcttccaaggcattgctgcaaaagtgggaactggagaaccctgctgtgactgggtgggagatgagggagcaggccacttcgtgaagatggtgcacaacgggatagagtatggggacatgcagctgatctgtgaggcataccacctgatgaaagacgtgctgggcatggcgcaggacgagatggcccaggcctttgaggattggaataagacagagctagactcattcctgattgaaatcacagccaatattctcaagttccaagacaccgatggcaaacacctgctgccaaagatcagggacagcgcggggcagaagggcacagggaagtggaccgccatctccgccctggaatacggcgtacccgtcaccctcattggagaagctgtctttgctcggtgcttatcatctctgaaggatgagagaattcaagctagcaaaaagctgaagggtccccagaagttccagtttgatggtgataagaaatcattcctggaggacattcggaaggcactctacgcttccaagatcatctcttacgctcaaggctttatgctgctaaggcaggcagccaccgagtttggctggactctcaattatggtggcatcgccctgatgtggagagggggctgcatcattagaagtgtattcctaggaaagataaaggatgcatttgatcgaaacccggaacttcagaacctcctactggacgacttctttaagtcagctgttgaaaactgccaggactcctggcggcgggcagtcagcactggggtccaggctggcattcccatgccctgttttaccactgccctctccttctatgacgggtacagacatgagatgcttccagccagcctcatccaggctcagcgggattacttcggggctcacacctatgaactcttggccaaaccagggcagtttatccacaccaactggacaggccatggtggcaccgtgtcatcctcgtcatacaatgcctgatcatgctgctcctgtcaccctccacgattccacagaccaggacattccatgtgcctcatggcactgccacctggccctttgccctattttctgttcagttttttaaaagtgttgtaagagactcctgaggaagacacacagtttatttgtaaagtagctctgtgagagccaccatgccctctgcccttgcctcttgggactgaccaggagctgctcatgtgcgtgagagtgggaaccatctccttgcggcagtggcttccgcgtgccccgtgtgctggtgcggttcccatcacgcagacaggaagggtgtttgcgcactctgatcaactggaacctcttacaacacttttaaaaaactgaacagaaaatagggcaaagggcgaggtggcagtgccatgaggcacatggaatgtcctggtctgtggaatcgtggagggtgacaggagcagcatgatcaggcattgtatgacgaggatgacacggtgccaccatggcctgtcccgttggtgtggataaactgccctggtttggccaagagttcataggtgtgagccccgaa

SEQ ID NO: 292522 - DNA, 2313 bp, Homo sapiens
aacacatagaccaccagcaaagcacaataggcagtggagccgcgtgtaaatcggacgaggcgcgctcttcggttctgctctgtccgccgccatggcccaagctgacatcgcgctgatcggattggccgtcatgggccagaacttaattctgaacatgaatgaccacggctttgtggtctgtgcttttaataggactgtctccaaagttgatgatttcttggccaatgaggcaaagggaaccaaagtggtgggtgcccagtccctgaaagagatggtctccaagctgaagaagccccggcggatcatcctcctggtgaaggctgggcaagctgtggatgatttcatcgagaaattggtaccattgttggatactggtgacatcatcattgacggaggaaattctgaatatagggacaccacaagacggtgccgagacctcaaggccaagggaattttatttgtggggagcggagtcagtggtggagaggaaggggcccggtatggcccatcgctcatgccaggagggaacaaagaagcgtggccccacatcaagaccatcttccaaggcattgctgcaaaagtgggaactggagaaccctgctgtgactgggtgggagatgagggagcaggccacttcgtgaagatggtgcacaacgggatagagtatggggacatgcagctgatctgtgaggcataccacctgatgaaagacgtgctgggcatggcgcaggacgagatggcccaggcctttgaggattggaataagacagagctagactcattcctgattgaaatcacagccaatattctcaagttccaagacaccgatggcaaacacctgctgccaaagatcagggacagcgcggggcagaagggcacagggaagtggaccgccatctccgccctggaatacggcgtacccgtcaccctcattggagaagctgtctttgctcggtgcttatcatctctgaaggatgagagaattcaagctagcaaaaagctgaagggtccccagaagttccagtttgatggtgataagaaatcattcctggaggacattcggaaggcactctacgcttccaagatcatctcttacgctcaaggctttatgctgctaaggcaggcagccaccgagtttggctggactctcaattatggtggcatcgccctgatgtggagagggggctgcatcattagaagtgtattcctaggaaagataaaggatgcatttgatcgaaacccggaacttcagaacctcctactggacgacttctttaagtcagctgttgaaaactgccaggactcctggcggcgggcagtcagcactggggtccaggctggcattcccatgccctgttttaccactgccctctccttctatgacgggtacagacatgagatgcttccagccagcctcatccaggctcagcgggattacttcggggctcacacctatgaactcttggccaaaccagggcagtttatccacaccaactggacaggccatggtggcaccgtgtcatcctcgtcatacaatgcctgatcatgctgctcctgtcaccctccacgattccacagaccaggacattccatgtgcctcatggcactgccacctggccctttgccctattttctgttcagttttttaaaagtgttgtaagagactcctgaggaagacacacagtttatttgtaaagtagctctgtgagagccaccatgccctctgcccttgcctcttgggactgaccaggagctgctcatgtgcgtgagagtgggaaccatctccttgcggcagtggcttccgcgtgccccgtgtgctggtgcggttcccatcacgcagacaggaagggtgtttgcgcactctgatcaactggaacctctgtatcatgcggctgaattccctttttcctttactcaataaaagctacatcagactgatgctctttctccagattcttagtctcacctcggccacatggagccattatccccattggcagaaagatttttctttaaaaaaaaagactagaataacacaagaaaccacatttaggattatgcttcactcagaggaggcaggcagggaggacacaccaggggctttaatacactgggcatgttttctttctccaattgggcaatgggtacatggacgttcactgtaacgtgctttttctttcgtcttttttttttttttttttttttttgctcctggcaagctgtgcgtgacattctttatggctttttgtatgtcaaatacttcatactaaactttctagagaattaaactttaatgatgggctcagcttggtc

SEQ ID NO: 292523 - DNA, 2282 bp, Homo sapiens
aactatacgctaggtacgaggctgggtggcgcgctcttcggttctgctctgtccgccgccatggcccaagctgacatcgcgctgatcggattggccgtcatgggccagaacttaattctgaacatgaatgaccacggctttgtggtctgtgcttttaataggactgtctccaaagttgatgatttcttggccaatgaggcaaagggaaccaaagtggtgggtgcccagtccctgaaagagatggtctccaagctgaagaagccccggcggatcatcctcctggtgaaggctgggcaagctgtggatgatttcatcgagaaattggtaccattgttggatactggtgacatcatcattgacggaggaaattctgaatatagggacaccacaagacggtgccgagacctcaaggccaagggaattttatttgtggggagcggagtcagtggtggagaggaaggggcccggtatggcccatcgctcatgccaggagggaacaaagaagcgtggccccacatcaagaccatcttccaaggcattgctgcaaaagtgggaactggagaaccctgctgtgactgggtgggagatgagggagcaggccacttcgtgaagatggtgcacaacgggatagagtatggggacatgcagctgatctgtgaggcataccacctgatgaaagacgtgctgggcatggcgcaggacgagatggcccaggcctttgaggattggaataagacagagctagactcattcctgattgaaatcacagccaatattctcaagttccaagacaccgatggcaaacacctgctgccaaagatcagggacagcgcggggcagaagggcacagggaagtggaccgccatctccgccctggaatacggcgtacccgtcaccctcattggagaagctgtctttgctcggtgcttatcatctctgaaggatgagagaattcaagctagcaaaaagctgaagggtccccagaagttccagtttgatggtgataagaaatcattcctggaggacattcggaaggcactctacgcttccaagatcatctcttacgctcaaggctttatgctgctaaggcaggcagccaccgagtttggctggactctcaattatggtggcatcgccctgatgtggagagggggctgcatcattagaagtgtattcctaggaaagataaaggatgcatttgatcgaaacccggaacttcagaacctcctactggacgacttctttaagtcagctgttgaaaactgccaggactcctggcggcgggcagtcagcactggggtccaggctggcattcccatgccctgttttaccactgccctctccttctatgacgggtacagacatgagatgcttccagccagcctcatccaggctcagcgggattacttcggggctcacacctatgaactcttggccaaaccagggcagtttatccacaccaactggacaggccatggtggcaccgtgtcatcctcgtcatacaatgcctgatcatgctgctcctgtcaccctccacgattccacagaccaggacattccatgtgcctcatggcactgccacctggccctttgccctattttctgttcagttttttaaaagtgttgtaagagactcctgaggaagacacacagtttatttgtaaagtagctctgtgagagccaccatgccctctgcccttgcctcttgggactgaccaggagctgctcatgtgcgtgagagtgggaaccatctccttgcggcagtggcttccgcgtgccccgtgtgctggtgcggttcccatcacgcagacaggaagggtgtttgcgcactctgatcaactggaacctctgtatcatgcggctgaattccctttttcctttactcaataaaagctacatcagactgatgctctttctccagattcttagtctcacctcggccacatggagccattatccccattggcagaaagatttttctttaaaaaaaaagactagaataacacaagaaaccacatttaggattatgcttcactcagaggaggcaggcagggaggacacaccaggggctttaatacactgggcatgttttctttctccaattgggcaatgggtacatggacgttcactgtaacgtgctttttctttcgtcttttttttttttttttttttttttgctcctggcaagctgtgcgtgacattctttatggctttttgtatgtcaaatacttcatactaaactttctagagaattaaactttaatgatgggctcagcttggtc

SEQ ID NO: 292524 - DNA, 2290 bp, Homo sapiens
aatcgaaagatgtacgagggcagttacgcggtttgtaatttcagtcaccagggcctcggcgttcaattgtacaattagctgacatcgcgctgatcggattggccgtcatgggccagaacttaattctgaacatgaatgaccacggctttgtggtctgtgcttttaataggactgtctccaaagttgatgatttcttggccaatgaggcaaagggaaccaaagtggtgggtgcccagtccctgaaagagatggtctccaagctgaagaagccccggcggatcatcctcctggtgaaggctgggcaagctgtggatgatttcatcgagaaattggtaccattgttggatactggtgacatcatcattgacggaggaaattctgaatatagggacaccacaagacggtgccgagacctcaaggccaagggaattttatttgtggggagcggagtcagtggtggagaggaaggggcccggtatggcccatcgctcatgccaggagggaacaaagaagcgtggccccacatcaagaccatcttccaaggcattgctgcaaaagtgggaactggagaaccctgctgtgactgggtgggagatgagggagcaggccacttcgtgaagatggtgcacaacgggatagagtatggggacatgcagctgatctgtgaggcataccacctgatgaaagacgtgctgggcatggcgcaggacgagatggcccaggcctttgaggattggaataagacagagctagactcattcctgattgaaatcacagccaatattctcaagttccaagacaccgatggcaaacacctgctgccaaagatcagggacagcgcggggcagaagggcacagggaagtggaccgccatctccgccctggaatacggcgtacccgtcaccctcattggagaagctgtctttgctcggtgcttatcatctctgaaggatgagagaattcaagctagcaaaaagctgaagggtccccagaagttccagtttgatggtgataagaaatcattcctggaggacattcggaaggcactctacgcttccaagatcatctcttacgctcaaggctttatgctgctaaggcaggcagccaccgagtttggctggactctcaattatggtggcatcgccctgatgtggagagggggctgcatcattagaagtgtattcctaggaaagataaaggatgcatttgatcgaaacccggaacttcagaacctcctactggacgacttctttaagtcagctgttgaaaactgccaggactcctggcggcgggcagtcagcactggggtccaggctggcattcccatgccctgttttaccactgccctctccttctatgacgggtacagacatgagatgcttccagccagcctcatccaggctcagcgggattacttcggggctcacacctatgaactcttggccaaaccagggcagtttatccacaccaactggacaggccatggtggcaccgtgtcatcctcgtcatacaatgcctgatcatgctgctcctgtcaccctccacgattccacagaccaggacattccatgtgcctcatggcactgccacctggccctttgccctattttctgttcagttttttaaaagtgttgtaagagactcctgaggaagacacacagtttatttgtaaagtagctctgtgagagccaccatgccctctgcccttgcctcttgggactgaccaggagctgctcatgtgcgtgagagtgggaaccatctccttgcggcagtggcttccgcgtgccccgtgtgctggtgcggttcccatcacgcagacaggaagggtgtttgcgcactctgatcaactggaacctctgtatcatgcggctgaattccctttttcctttactcaataaaagctacatcagactgatgctctttctccagattcttagtctcacctcggccacatggagccattatccccattggcagaaagatttttctttaaaaaaaaagactagaataacacaagaaaccacatttaggattatgcttcactcagaggaggcaggcagggaggacacaccaggggctttaatacactgggcatgttttctttctccaattgggcaatgggtacatggacgttcactgtaacgtgctttttctttcgtcttttttttttttttttttttttttgctcctggcaagctgtgcgtgacattctttatggctttttgtatgtcaaatacttcatactaaactttctagagaattaaactttaatgatgggctcagcttggtc

SEQ ID NO: 292525 - DNA, 2186 bp, Homo sapiens
cgcagtttctggagggagccgctgcgggtctttccctcactcgtcctccgcgcgtcgccgctcttcggttctgctctgtccgccgccatggcccaagctgacatcgcgctgatcggattggccgtcatgggccagaacttaattctgaacatgaatgaccacggctttgtggtctgtgcttttaataggactgtctccaaagttgatgatttcttggccaatgaggcaaagggaaccaaagtggtgggtgcccagtccctgaaagagatggtctccaagctgaagaagccccggcggatcatcctcctggtgaaggctgggcaagctgtggatgatttcatcgagaaattggtaccattgttggatactggtgacatcatcattgacggaggaaattctgaatatagggacaccacaagacggtgccgagacctcaaggccaagggaattttatttgtggggagcggagtcagtggtggagaggaaggggcccggtatggcccatcgctcatgccaggagggaacaaagaagcgtggccccacatcaagaccatcttccaaggcattgctgcaaaagtgggaactggagaaccctgctgtgactgggtgggagatgagggagcaggccacttcgtgaagatggtgcacaacgggatagagtatggggacatgcagctgatctgtgaggcataccacctgatgaaagacgtgctgggcatggcgcaggacgagatggcccaggcctttgaggattggaataagacagagctagactcattcctgattgaaatcacagccaatattctcaagttccaagacaccgatggcaaacacctgctgccaaagatcagggacagcgcggggcagaagggcacagggaagtggaccgccatctccgccctggaatacggcgtacccgtcaccctcattggagaagctgtctttgctcggtgcttatcatctctgaaggatgagagaattcaagctagcaaaaagctgaagggtccccagaagttccagtttgatggtgataagaaatcattcctggaggacattcggaaggcactctacgcttccaagatcatctcttacgctcaaggctttatgctgctaaggcaggcagccaccgagtttggctggactctcaattatggtggcatcgccctgatgtggagagggggctgcatcattagaagtgtattcctaggaaagataaaggatgcatttgatcgaaacccggaacttcagaacctcctactggacgacttctttaagtcagctgttgaaaactgccaggctcagcgggattacttcggggctcacacctatgaactcttggccaaaccagggcagtttatccacaccaactggacaggccatggtggcaccgtgtcatcctcgtcatacaatgcctgatcatgctgctcctgtcaccctccacgattccacagaccaggacattccatgtgcctcatggcactgccacctggccctttgccctattttctgttcagttttttaaaagtgttgtaagagactcctgaggaagacacacagtttatttgtaaagtagctctgtgagagccaccatgccctctgcccttgcctcttgggactgaccaggagctgctcatgtgcgtgagagtgggaaccatctccttgcggcagtggcttccgcgtgccccgtgtgctggtgcggttcccatcacgcagacaggaagggtgtttgcgcactctgatcaactggaacctctgtatcatgcggctgaattccctttttcctttactcaataaaagctacatcagactgatgctctttctccagattcttagtctcacctcggccacatggagccattatccccattggcagaaagatttttctttaaaaaaaaagactagaataacacaagaaaccacatttaggattatgcttcactcagaggaggcaggcagggaggacacaccaggggctttaatacactgggcatgttttctttctccaattgggcaatgggtacatggacgttcactgtaacgtgctttttctttcgtcttttttttttttttttttttttttgctcctggcaagctgtgcgtgacattctttatggctttttgtatgtcaaatacttcatactaaactttctagagaattaaactttaatgatgggctcagcttggtc

SEQ ID NO: 292526 - DNA, 2121 bp, Homo sapiens
acccacgcgtcgcggacgcgtgggcttggccaatgaggcaaagggaaccaaagtggtgggtgcccagtccctgaaagagatggtctccaagctgaagaagccccggcggatcatcctcctggtgaaggctgggcaagctgtggatgatttcatcgagaaattggtaccattgttggatactggtgacatcatcattgacggaggaaattctgaatatagggacaccacaagacggtgccgagacctcaaggccaagggaattttatttgtggggagcggagtcagtggtggagaggaaggggcccggtatggcccatcgctcatgccaggagggaacaaagaagcgtggccccacatcaagaccatcttccaaggcattgctgcaaaagtgggaactggagaaccctgctgtgactgggtgggagatgagggagcaggccacttcgtgaagatggtgcacaacgggatagagtatggggacatgcagctgatctgtgaggcataccacctgatgaaagacgtgctgggcatggcgcaggacgagatggcccaggcctttgaggattggaataagacagagctagactcattcctgattgaaatcacagccaatattctcaagttccaagacaccgatggcaaacacctgctgccaaagatcagggacagcgcggggcagaagggcacagggaagtggaccgccatctccgccctggaatacggcgtacccgtcaccctcattggagaagctgtctttgctcggtgcttatcatctctgaaggatgagagaattcaagctagcaaaaagctgaagggtccccagaagttccagtttgatggtgataagaaatcattcctggaggacattcggaaggcactctacgcttccaagatcatctcttacgctcaaggctttatgctgctaaggcaggcagccaccgagtttggctggactctcaattatggtggcatcgccctgatgtggagagggggctgcatcattagaagtgtattcctaggaaagataaaggatgcatttgatcgaaacccggaacttcagaacctcctactggacgacttctttaagtcagctgttgaaaactgccaggactcctggcggcgggcagtcagcactggggtccaggctggcattcccatgccctgttttaccactgccctctccttctatgacgggtacagacatgagatgcttccagccagcctcatccaggctcagcgggattacttcggggctcacacctatgaactcttggccaaaccagggcagtttatccacaccaactggacaggccatggtggcaccgtgtcatcctcgtcatacaatgcctgatcatgctgctcctgtcaccctccacgattccacagaccaggacattccatgtgcctcatggcactgccacctggccctttgccctattttctgttcagttttttaaaagtgttgtaagagactcctgaggaagacacacagtttatttgtaaagtagctctgtgagagccaccatgccctctgcccttgcctcttgggactgaccaggagctgctcatgtgcgtgagagtgggaaccatctccttgcggcagtggcttccgcgtgccccgtgtgctggtgcggttcccatcacgcagacaggaagggtgtttgcgcactctgatcaactggaacctctgtatcatgcggctgaattccctttttcctttactcaataaaagctacatcagactgatgctctttctccagattcttagtctcacctcggccacatggagccattatccccattggcagaaagatttttctttaaaaaaaaagactagaataacacaagaaaccacatttaggattatgcttcactcagaggaggcaggcagggaggacacaccaggggctttaatacactgggcatgttttctttctccaattgggcaatgggtacatggacgttcactgtaacgtgctttttctttcgtcttttttttttttttttttttttttgctcctggcaagctgtgcgtgacattctttatggctttttgtatgtcaaatacttcatactaaactttctagagaattaaactttaatgatgggctcagcttggtc

SEQ ID NO: 292527 - DNA, 2243 bp, Homo sapiens
cgcagtttctggagggagccgctgcgggtctttccctcactcgtcctccgcgcgtcgccgctcttcggttctgctctgtccgccgccatggcccaagctgacatcgcgctgatcggattggccgtcatgggccagaacttaattctgaacatgaatgaccacggctttgtggtctgtgcttttaataggactgtctccaaagttgatgatttcttggccaatgaggcaaagggaaccaaagtggtgggtgcccagtccctgaaagagatggtctccaagctgaagaagccccggcggatcatcctcctggtgaaggctgggcaagctgtggatgatttcatcgagaaattgagacggtgccgagacctcaaggccaagggaattttatttgtggggagcggagtcagtggtggagaggaaggggcccggtatggcccatcgctcatgccaggagggaacaaagaagcgtggccccacatcaagaccatcttccaaggcattgctgcaaaagtgggaactggagaaccctgctgtgactgggtgggagatgagggagcaggccacttcgtgaagatggtgcacaacgggatagagtatggggacatgcagctgatctgtgaggcataccacctgatgaaagacgtgctgggcatggcgcaggacgagatggcccaggcctttgaggattggaataagacagagctagactcattcctgattgaaatcacagccaatattctcaagttccaagacaccgatggcaaacacctgctgccaaagatcagggacagcgcggggcagaagggcacagggaagtggaccgccatctccgccctggaatacggcgtacccgtcaccctcattggagaagctgtctttgctcggtgcttatcatctctgaaggatgagagaattcaagctagcaaaaagctgaagggtccccagaagttccagtttgatggtgataagaaatcattcctggaggacattcggaaggcactctacgcttccaagatcatctcttacgctcaaggctttatgctgctaaggcaggcagccaccgagtttggctggactctcaattatggtggcatcgccctgatgtggagagggggctgcatcattagaagtgtattcctaggaaagataaaggatgcatttgatcgaaacccggaacttcagaacctcctactggacgacttctttaagtcagctgttgaaaactgccaggactcctggcggcgggcagtcagcactggggtccaggctggcattcccatgccctgttttaccactgccctctccttctatgacgggtacagacatgagatgcttccagccagcctcatccaggctcagcgggattacttcggggctcacacctatgaactcttggccaaaccagggcagtttatccacaccaactggacaggccatggtggcaccgtgtcatcctcgtcatacaatgcctgatcatgctgctcctgtcaccctccacgattccacagaccaggacattccatgtgcctcatggcactgccacctggccctttgccctattttctgttcagttttttaaaagtgttgtaagagactcctgaggaagacacacagtttatttgtaaagtagctctgtgagagccaccatgccctctgcccttgcctcttgggactgaccaggagctgctcatgtgcgtgagagtgggaaccatctccttgcggcagtggcttccgcgtgccccgtgtgctggtgcggttcccatcacgcagacaggaagggtgtttgcgcactctgatcaactggaacctctgtatcatgcggctgaattccctttttcctttactcaataaaagctacatcagactgatgctctttctccagattcttagtctcacctcggccacatggagccattatccccattggcagaaagatttttctttaaaaaaaaagactagaataacacaagaaaccacatttaggattatgcttcactcagaggaggcaggcagggaggacacaccaggggctttaatacactgggcatgttttctttctccaattgggcaatgggtacatggacgttcactgtaacgtgctttttctttcgtcttttttttttttttttttttttttgctcctggcaagctgtgcgtgacattctttatggctttttgtatgtcaaatacttcatactaaactttctagagaattaaactttaatgatgggctcagcttggtc

SEQ ID NO: 292528 - DNA, 2229 bp, Homo sapiens
cgcagtttctggagggagccgctgcgggtctttccctcactcgtcctccgcgcgtcgccgctcttcggttctgctctgtccgccgccatggcccaagctgacatcgcgctgatcggattggccgtcatgggccagaacttaattctgaacatgaatgaccacggctttgtggtctgtgcttttaataggactgtctccaaagttgatgatttcttggccaatgaggcaaagggaaccaaagtggtgggtgcccagtccctgaaagagatggtctccaagctgaagaagccccggcggatcatcctcctggtgaaggctgggcaagctgtggatgatttcatcgagaaattggtaccattgttggatactggtgacatcatcattgacggaggaaattctgaatatagggacaccacaagacggtgccgagacctcaaggccaagggaattttatttgtggggagcggagtcagtggtggagaggaaggggcccggtatggcccatcgctcatgccaggagggaacaaagaagcgtggccccacatcaagaccatcttccaaggcattgctgcaaaagtgggaactggagaaccctgctgtgactgggtgggagatgagggagcaggccacttcgtgaagatggtgcacaacgggatagagtatggggacatgcagctgatctgtgaggcataccacctgatgaaagacgtgctgggcatggcgcaggacgagatggcccaggcctttgaggattggaataagacagagctagactcattcctgattgaaatcacagccaatattctcaagttccaagacaccgatggcaaacacctgctgccaaagatcagggacagcgcggggcagaagggcacagggaagtggaccgccatctccgccctggaatacggcgtacccgtcaccctcattggagaagctgtctttgctcggtgcttatcatctctgaaggatgagagaattcaagctagcaaaaagctgaagggtccccagaagttccagtttgatggtgataagaaatcattcctggaggacattcggaaggcactctacgcttccaagatcatctcttacgctcaaggctttatgctgctaaggcaggcagccaccgagtttggctggactctcaattatggtggcatcgccctgatgtggagagggggctgcatcattagaagtgtattcctaggaaagataaaggatgcatttgatcgaaacccggaacttcagaacctcctactggacgacttctttaagtcagctgttgaaaactgccaggactcctggcggcgggcagtcagcactggggtccaggctggcattcccatgccctgttttaccactgccctctccttctatgacgggtacagacatgagatgcttccagccagcctcatccaggctcagcgggattacttcggggctcacacctatgaactcttggccaaaccagggcagtttatccacaccaactggacaggccatggtggcaccgtgtcatcctcgtcatacaatgcctttgccctattttctgttcagttttttaaaagtgttgtaagagactcctgaggaagacacacagtttatttgtaaagtagctctgtgagagccaccatgccctctgcccttgcctcttgggactgaccaggagctgctcatgtgcgtgagagtgggaaccatctccttgcggcagtggcttccgcgtgccccgtgtgctggtgcggttcccatcacgcagacaggaagggtgtttgcgcactctgatcaactggaacctctgtatcatgcggctgaattccctttttcctttactcaataaaagctacatcagactgatgctctttctccagattcttagtctcacctcggccacatggagccattatccccattggcagaaagatttttctttaaaaaaaaagactagaataacacaagaaaccacatttaggattatgcttcactcagaggaggcaggcagggaggacacaccaggggctttaatacactgggcatgttttctttctccaattgggcaatgggtacatggacgttcactgtaacgtgctttttctttcgtcttttttttttttttttttttttttgctcctggcaagctgtgcgtgacattctttatggctttttgtatgtcaaatacttcatactaaactttctagagaattaaactttaatgatgggctcagcttggtc

SEQ ID NO: 292529 - DNA, 2254 bp, Homo sapiens
cgcagtttctggagggagccgctgcgggtctttccctcactcgtcctccgcgcgtcgccgctcttcggttctgctctgtccgccgccatggcccaagctgacatcgcgctgatcggattggccgtcatgggccagaacttaattctgaacatgaatgaccacggctttgtggtctgtgcttttaataggactgtctccaaagttgatgatttcttggccaatgaggcaaagggaaccaaagtggtgggtgcccagtccctgaaagagatggtctccaagctgaagaagccccggcggatcatcctcctggtgaaggctgggcaagctgtggatgatttcatcgagaaattggtaccattgttggatactggtgacatcatcattgacggaggaaattctgaatatagggacaccacaagacggtgccgagacctcaaggccaagggaattttatttgtggggagcggagtcagtggtggagaggaaggggcccggtatggcccatcgctcatgccaggagggaacaaagaagcgtggccccacatcaagaccatcttccaaggcattgctgccacttcgtgaagatggtgcacaacgggatagagtatggggacatgcagctgatctgtgaggcataccacctgatgaaagacgtgctgggcatggcgcaggacgagatggcccaggcctttgaggattggaataagacagagctagactcattcctgattgaaatcacagccaatattctcaagttccaagacaccgatggcaaacacctgctgccaaagatcagggacagcgcggggcagaagggcacagggaagtggaccgccatctccgccctggaatacggcgtacccgtcaccctcattggagaagctgtctttgctcggtgcttatcatctctgaaggatgagagaattcaagctagcaaaaagctgaagggtccccagaagttccagtttgatggtgataagaaatcattcctggaggacattcggaaggcactctacgcttccaagatcatctcttacgctcaaggctttatgctgctaaggcaggcagccaccgagtttggctggactctcaattatggtggcatcgccctgatgtggagagggggctgcatcattagaagtgtattcctaggaaagataaaggatgcatttgatcgaaacccggaacttcagaacctcctactggacgacttctttaagtcagctgttgaaaactgccaggactcctggcggcgggcagtcagcactggggtccaggctggcattcccatgccctgttttaccactgccctctccttctatgacgggtacagacatgagatgcttccagccagcctcatccaggctcagcgggattacttcggggctcacacctatgaactcttggccaaaccagggcagtttatccacaccaactggacaggccatggtggcaccgtgtcatcctcgtcatacaatgcctgatcatgctgctcctgtcaccctccacgattccacagaccaggacattccatgtgcctcatggcactgccacctggccctttgccctattttctgttcagttttttaaaagtgttgtaagagactcctgaggaagacacacagtttatttgtaaagtagctctgtgagagccaccatgccctctgcccttgcctcttgggactgaccaggagctgctcatgtgcgtgagagtgggaaccatctccttgcggcagtggcttccgcgtgccccgtgtgctggtgcggttcccatcacgcagacaggaagggtgtttgcgcactctgatcaactggaacctctgtatcatgcggctgaattccctttttcctttactcaataaaagctacatcagactgatgctctttctccagattcttagtctcacctcggccacatggagccattatccccattggcagaaagatttttctttaaaaaaaaagactagaataacacaagaaaccacatttaggattatgcttcactcagaggaggcaggcagggaggacacaccaggggctttaatacactgggcatgttttctttctccaattgggcaatgggtacatggacgttcactgtaacgtgctttttctttcgtcttttttttttttttttttttttttgctcctggcaagctgtgcgtgacattctttatggctttttgtatgtcaaatacttcatactaaactttctagagaattaaactttaatgatgggctcagcttggtc

SEQ ID NO: 292530 - DNA, 1874 bp, Homo sapiens
cgcagtttctggagggagccgctgcgggtctttccctcactcgtcctccgcgcgtcgccgctcttcggttctgctctgtccgccgccatggcccaagctgacatcgcgctgatcggattggccgtcatgggccagaacttaattctgaacatgaatgaccacggctttgtggtgggagatgagggagcaggccacttcgtgaagatggtgcacaacgggatagagtatggggacatgcagctgatctgtgaggcataccacctgatgaaagacgtgctgggcatggcgcaggacgagatggcccaggcctttgaggattggaataagacagagctagactcattcctgattgaaatcacagccaatattctcaagttccaagacaccgatggcaaacacctgctgccaaagatcagggacagcgcggggcagaagggcacagggaagtggaccgccatctccgccctggaatacggcgtacccgtcaccctcattggagaagctgtctttgctcggtgcttatcatctctgaaggatgagagaattcaagctagcaaaaagctgaagggtccccagaagttccagtttgatggtgataagaaatcattcctggaggacattcggaaggcactctacgcttccaagatcatctcttacgctcaaggctttatgctgctaaggcaggcagccaccgagtttggctggactctcaattatggtggcatcgccctgatgtggagagggggctgcatcattagaagtgtattcctaggaaagataaaggatgcatttgatcgaaacccggaacttcagaacctcctactggacgacttctttaagtcagctgttgaaaactgccaggactcctggcggcgggcagtcagcactggggtccaggctggcattcccatgccctgttttaccactgccctctccttctatgacgggtacagacatgagatgcttccagccagcctcatccaggctcagcgggattacttcggggctcacacctatgaactcttggccaaaccagggcagtttatccacaccaactggacaggccatggtggcaccgtgtcatcctcgtcatacaatgcctgatcatgctgctcctgtcaccctccacgattccacagaccaggacattccatgtgcctcatggcactgccacctggccctttgccctattttctgttcagttttttaaaagtgttgtaagagactcctgaggaagacacacagtttatttgtaaagtagctctgtgagagccaccatgccctctgcccttgcctcttgggactgaccaggagctgctcatgtgcgtgagagtgggaaccatctccttgcggcagtggcttccgcgtgccccgtgtgctggtgcggttcccatcacgcagacaggaagggtgtttgcgcactctgatcaactggaacctctgtatcatgcggctgaattccctttttcctttactcaataaaagctacatcagactgatgctctttctccagattcttagtctcacctcggccacatggagccattatccccattggcagaaagatttttctttaaaaaaaaagactagaataacacaagaaaccacatttaggattatgcttcactcagaggaggcaggcagggaggacacaccaggggctttaatacactgggcatgttttctttctccaattgggcaatgggtacatggacgttcactgtaacgtgctttttctttcgtcttttttttttttttttttttttttgctcctggcaagctgtgcgtgacattctttatggctttttgtatgtcaaatacttcatactaaactttctagagaattaaactttaatgatgggctcagcttggtc

SEQ ID NO: 292531 - DNA, 1881 bp, Homo sapiens
gaaggaccttcttcgtgctcagggcctgggagatattattgatacatccatggggtccctcacttcatccccatcttcctgctcactcagtagtcaggtgggcttgacgtctgtgaccagtattcaagagaggatcatgtctacacctggaggagaggaagctattgaacgtttaaaggtgggagatgagggagcaggccacttcgtgaagatggtgcacaacgggatagagtatggggacatgcagctgatctgtgaggcataccacctgatgaaagacgtgctgggcatggcgcaggacgagatggcccaggcctttgaggattggaataagacagagctagactcattcctgattgaaatcacagccaatattctcaagttccaagacaccgatggcaaacacctgctgccaaagatcagggacagcgcggggcagaagggcacagggaagtggaccgccatctccgccctggaatacggcgtacccgtcaccctcattggagaagctgtctttgctcggtgcttatcatctctgaaggatgagagaattcaagctagcaaaaagctgaagggtccccagaagttccagtttgatggtgataagaaatcattcctggaggacattcggaaggcactctacgcttccaagatcatctcttacgctcaaggctttatgctgctaaggcaggcagccaccgagtttggctggactctcaattatggtggcatcgccctgatgtggagagggggctgcatcattagaagtgtattcctaggaaagataaaggatgcatttgatcgaaacccggaacttcagaacctcctactggacgacttctttaagtcagctgttgaaaactgccaggactcctggcggcgggcagtcagcactggggtccaggctggcattcccatgccctgttttaccactgccctctccttctatgacgggtacagacatgagatgcttccagccagcctcatccaggctcagcgggattacttcggggctcacacctatgaactcttggccaaaccagggcagtttatccacaccaactggacaggccatggtggcaccgtgtcatcctcgtcatacaatgcctgatcatgctgctcctgtcaccctccacgattccacagaccaggacattccatgtgcctcatggcactgccacctggccctttgccctattttctgttcagttttttaaaagtgttgtaagagactcctgaggaagacacacagtttatttgtaaagtagctctgtgagagccaccatgccctctgcccttgcctcttgggactgaccaggagctgctcatgtgcgtgagagtgggaaccatctccttgcggcagtggcttccgcgtgccccgtgtgctggtgcggttcccatcacgcagacaggaagggtgtttgcgcactctgatcaactggaacctctgtatcatgcggctgaattccctttttcctttactcaataaaagctacatcagactgatgctctttctccagattcttagtctcacctcggccacatggagccattatccccattggcagaaagatttttctttaaaaaaaaagactagaataacacaagaaaccacatttaggattatgcttcactcagaggaggcaggcagggaggacacaccaggggctttaatacactgggcatgttttctttctccaattgggcaatgggtacatggacgttcactgtaacgtgctttttctttcgtcttttttttttttttttttttttttgctcctggcaagctgtgcgtgacattctttatggctttttgtatgtcaaatacttcatactaaactttctagagaattaaactttaatgatgggctcagcttggtc

SEQ ID NO: 292532 - DNA, 1821 bp, Homo sapiens
cgcagtttctggagggagccgctgcgggtctttccctcactcgtcctccgcgcgtcgccgctcttcggttctgctctgtccgccgccatggcccaagctgacatcgcgctgatcggattggccgtcatgggccagaacttaattctgaacatgaatgaccacggctttgtggtctgtgcttttaataggactgtctccaaagttgatgatttcttggccaatgaggcaaagggaaccaaagtggtgggtgcccagtccctgaaagagatggtctccaagctgaagaagccccggcggatcatcctcctggtgaaggctgggcaagctgtggatgatttcatcgagaaattggtaccattgttggatactggtgacatcatcattgacggaggaaattctgaatatagggacaccacaagacggtgccgagacctcaaggccaagggaattttatttgtggggagcggagtcagtggtggagaggaaggggcccggtatggcccatcgctcatgccaggagggaacaaagaagcgtggccccacatcaagaccatcttccaaggcattgctgcaaaagtgggaactggagaaccctgctgtgactgggtgggagatgagggagcaggccacttcgtgaagatggtgcacaacgggatagagtatggggacatgcagctgatctgtgaggcataccacctgatgaaagacgtgctgggcatggcgcaggacgagatggcccaggcctttgaggattggaataagacagagctagactcattcctgattgaaatcacagccaatattctcaagttccaagacaccgatggcaaacacctgctgccaaagatcagggacagcgcggggcagaagggcacagggaagtggaccgccatctccgccctggaatacggcgtacccgtcaccctcattggagaagctgtctttgctcggtgcttatcatctctgaaggatgagagaattcaagctagcaaaaagctgaagggtccccagaagttccagtttgatggtgataagaaatcattcctggaggacattcggaaggcactctacgcttccaagatcatctcttacgctcaaggctttatgctgctaaggcaggcagccaccgagtttggctggactctcaattatggtggcatcgccctgatgtggagagggggctgcatcattagaagtgtattcctaggaaagataaaggatgcatttgatcgaaacccggaacttcagaacctcctactggacgacttctttaagtcagctgttgaaaactgccaggctcagcgggattacttcggggctcacacctatgaactcttggccaaaccagggcagtttatccacaccaactggacaggccatggtggcaccgtgtcatcctcgtcatacaatgcctgatcatgctgctcctgtcaccctccacgattccacagaccaggacattccatgtgcctcatggcactgccacctggccctttgccctattttctgttcagttttttaaaagtgttgtaagagactcctgaggaagacacacagtttatttgtaaagtagctctgtgagagccaccatgccctctgcccttgcctcttgggactgaccaggagctgctcatgtgcgtgagagtgggaaccatctccttgcggcagtggcttccgcgtgccccgtgtgctggtgcggttcccatcacgcagacaggaagggtgtttgcgcatggtcaatggaactctgataaaagggtaattccacgcactggctcatactgtatttttatgtgaactagattttatagctataattcg

SEQ ID NO: 292533 - DNA, 1441 bp, Homo sapiens
cgcagtttctggagggagccgctgcgggtctttccctcactcgtcctccgcgcgtcgccgctcttcggttctgctctgtccgccgccatggcccaagctgacatcgcgctgatcggattggccgtcatgggccagaacttaattctgaacatgaatgaccacggctttgtggtctgtgcttttaataggactgtctccaaagttgatgatttcttggccaatgaggcaaagggaaccaaagtggtgggtgcccagtccctgaaagagatggtctccaagctgaagaagccccggcggatcatcctcctggtgaaggctgggcaagctgtggatgatttcatcgagaaattggtaccattgttggatactggtgacatcatcattgacggaggaaattctgaatatagggacaccacaagacggtgccgagacctcaaggccaagggaattttatttgtggggagcggagtcagtggtggagaggaaggggcccggtatggcccatcgctcatgccaggagggaacaaagaagcgtggccccacatcaagaccatcttccaaggcattgctgcaaaagtgggaactggagaaccctgctgtgactgggtgggagatgagggagcaggccacttcgtgaagatggtgcacaacgggatagagtatggggacatgcagctgatctgtgaggcataccacctgatgaaagacgtgctgggcatggcgcaggacgagatggcccaggcctttgaggattggaataagacagagctagactcattcctgattgaaatcacagccaatattctcaagttccaagacaccgatggcaaacacctgctgccaaagatcagggacagcgcggggcagaagggcacagggaagtggaccgccatctccgccctggaatacggcgtacccgtcaccctcattggagaagctgtctttgctcggtgcttatcatctctgaaggatgagagaattcaagctagcaaaaagctgaagggtccccagaagttccagtttgatggtgataagaaatcattcctggaggacattcggaaggcactctacgcttccaagatcatctcttacgctcaaggctttatgctgctaaggcaggcagccaccgagtttggctggactctcaattatggtggcatcgccctgatgtggagagggggctgcatcattagaagtgtattctaggacagatccagcgtgccttgatcgaaacgagaattcagaacttctacggcagactcctaaactacagctggtgaaaccggcacggactcccggacgagagacacagaccgggcgccaggcgcgaatcccatgccggtaacacacggcacccgactaactaaggagcacaaacagcaaggatcaggcagccactaaggcacacgaaagacaggggacaccacaaacgtggacaagg

SEQ ID NO: 292534 - DNA, 1479 bp, Homo sapiens
aggaagttggctgcttttagccgatctgagccataacataggtgaggagggaggggccaatagctaggagcaatttattcatcacggactcaagtatatgtgagaagctgtctttgctcggtgcttatcatctctgaaggatgagagaattcaagctagcaaaaagctgaagggtccccagaagttccagtttgatggtgataagaaatcattcctggaggacattcggaaggcactctacgcttccaagatcatctcttacgctcaaggctttatgctgctaaggcaggcagccaccgagtttggctggactctcaattatggtggcatcgccctgatgtggagagggggctgcatcattagaagtgtattcctaggaaagataaaggatgcatttgatcgaaacccggaacttcagaacctcctactggacgacttctttaagtcagctgttgaaaactgccaggactcctggcggcgggcagtcagcactggggtccaggctggcattcccatgccctgttttaccactgccctctccttctatgacgggtacagacatgagatgcttccagccagcctcatccaggctcagcgggattacttcggggctcacacctatgaactcttggccaaaccagggcagtttatccacaccaactggacaggccatggtggcaccgtgtcatcctcgtcatacaatgcctgatcatgctgctcctgtcaccctccacgattccacagaccaggacattccatgtgcctcatggcactgccacctggccctttgccctattttctgttcagttttttaaaagtgttgtaagagactcctgaggaagacacacagtttatttgtaaagtagctctgtgagagccaccatgccctctgcccttgcctcttgggactgaccaggagctgctcatgtgcgtgagagtgggaaccatctccttgcggcagtggcttccgcgtgccccgtgtgctggtgcggttcccatcacgcagacaggaagggtgtttgcgcactctgatcaactggaacctctgtatcatgcggctgaattccctttttcctttactcaataaaagctacatcagactgatgctctttctccagattcttagtctcacctcggccacatggagccattatccccattggcagaaagatttttctttaaaaaaaaagactagaataacacaagaaaccacatttaggattatgcttcactcagaggaggcaggcagggaggacacaccaggggctttaatacactgggcatgttttctttctccaattgggcaatgggtacatggacgttcactgtaacgtgctttttctttcgtcttttttttttttttttttttttttgctcctggcaagctgtgcgtgacattctttatggctttttgtatgtcaaatacttcatactaaactttctagagaattaaactttaatgatgggctcagcttggtc

SEQ ID NO: 292535 - DNA, 1362 bp, Homo sapiens
tggcgaattcggcacgagggagagagagagagagagaactagcaaaaagctgaagggtccccagaagttccagtttgatggtgataagaaatcattcctggaggacattcggaaggcactctacgcttccaagatcatctcttacgctcaaggctttatgctgctaaggcaggcagccaccgagtttggctggactctcaattatggtggcatcgccctgatgtggagagggggctgcatcattagaagtgtattcctaggaaagataaaggatgcatttgatcgaaacccggaacttcagaacctcctactggacgacttctttaagtcagctgttgaaaactgccaggactcctggcggcgggcagtcagcactggggtccaggctggcattcccatgccctgttttaccactgccctctccttctatgacgggtacagacatgagatgcttccagccagcctcatccaggctcagcgggattacttcggggctcacacctatgaactcttggccaaaccagggcagtttatccacaccaactggacaggccatggtggcaccgtgtcatcctcgtcatacaatgcctgatcatgctgctcctgtcaccctccacgattccacagaccaggacattccatgtgcctcatggcactgccacctggccctttgccctattttctgttcagttttttaaaagtgttgtaagagactcctgaggaagacacacagtttatttgtaaagtagctctgtgagagccaccatgccctctgcccttgcctcttgggactgaccaggagctgctcatgtgcgtgagagtgggaaccatctccttgcggcagtggcttccgcgtgccccgtgtgctggtgcggttcccatcacgcagacaggaagggtgtttgcgcactctgatcaactggaacctctgtatcatgcggctgaattccctttttcctttactcaataaaagctacatcagactgatgctctttctccagattcttagtctcacctcggccacatggagccattatccccattggcagaaagatttttctttaaaaaaaaagactagaataacacaagaaaccacatttaggattatgcttcactcagaggaggcaggcagggaggacacaccaggggctttaatacactgggcatgttttctttctccaattgggcaatgggtacatggacgttcactgtaacgtgctttttctttcgtcttttttttttttttttttttttttgctcctggcaagctgtgcgtgacattctttatggctttttgtatgtcaaatacttcatactaaactttctagagaattaaactttaatgatgggctcagcttggtc

SEQ ID NO: 292536 - DNA, 979 bp, Homo sapiens
  misc_feature (891)..(892): n is a, c, g, or t
  misc_feature (896)..(896): n is a, c, g, or t
  misc_feature (899)..(899): n is a, c, g, or t
cgcagtttctggagggagccgctgcgggtctttccctcactcgtcctccgcgcgtcgccgctcttcggttctgctctgtccgccgccatggcccaagctgacatcgcgctgatcggattggccgtcatgggccagaacttaattctgaacatgaatgaccacggctttgtggtctgtgcttttaataggactgtctccaaagttgatgatttcttggccaatgaggcaaagggaaccaaagtggtgggtgcccagtccctgaaagagatggtctccaagctgaagaagccccggcggatcatcctcctggtgaaggctgggcaagctgtggatgatttcatcgagaaattggtaccattgttggatactggtgacatcatcattgacggaggaaattctgaatatagggacaccacaagacggtgccgagacctcaaggccaagggaattttatttgtggggagcggagtcagtggtggagaggaaggggcccggtatggcccatcgctcatgccaggagggaacaaagaagcgtggccccacatcaagaccatcttccaaggcattgctgcaaaagtgggaactggagaaccctgctgtgactgggtgggagatgagggagcaggccacttcgtgaagatggtgcacaacgggatagagtatggggacatgcagctgatctgtgaggcataccacctgatgaaagacgtgctgggcatggcgcaggacgagatggcccaggcctttgaggattggaataagacagagctagactcattcctgattgaaatcacagccaatattctcaagttccaagacaccgatggcaaacacctgctgccaaagatcagggacagcgcaaaggcccggaatggcgcattcgcctggatnnggtncgncccctgggaagcggttggccgggttcccctgaggggggattcggaagcgggcccatcctgtggtgaaacctggcgggccg

SEQ ID NO: 292537 - DNA, 1109 bp, Homo sapiens
ggcgtaccggcggaatttgggatatttgatcgaaacccggaacttcagaacctcctactggacgacttctttaagtcagctgttgaaaactgccaggactcctggcggcgggcagtcagcactggggtccaggctggcattcccatgccctgttttaccactgccctctccttctatgacgggtacagacatgagatgcttccagccagcctcatccaggctcagcgggattacttcggggctcacacctatgaactcttggccaaaccagggcagtttatccacaccaactggacaggccatggtggcaccgtgtcatcctcgtcatacaatgcctgatcatgctgctcctgtcaccctccacgattccacagaccaggacattccatgtgcctcatggcactgccacctggccctttgccctattttctgttcagttttttaaaagtgttgtaagagactcctgaggaagacacacagtttatttgtaaagtagctctgtgagagccaccatgccctctgcccttgcctcttgggactgaccaggagctgctcatgtgcgtgagagtgggaaccatctccttgcggcagtggcttccgcgtgccccgtgtgctggtgcggttcccatcacgcagacaggaagggtgtttgcgcactctgatcaactggaacctctgtatcatgcggctgaattccctttttcctttactcaataaaagctacatcagactgatgctctttctccagattcttagtctcacctcggccacatggagccattatccccattggcagaaagatttttctttaaaaaaaaagactagaataacacaagaaaccacatttaggattatgcttcactcagaggaggcaggcagggaggacacaccaggggctttaatacactgggcatgttttctttctccaattgggcaatgggtacatggacgttcactgtaacgtgctttttctttcgtcttttttttttttttttttttttttgctcctggcaagctgtgcgtgacattctttatggctttttgtatgtcaaatacttcatactaaactttctagagaattaaactttaatgatgggctcagcttggtc

SEQ ID NO: 292538 - DNA, 1132 bp, Homo sapiens
cgcagtttctggagggagccgctgcgggtctttccctcactcgtcctccgcgcgtcgccgctcttcggttctgctctgtccgccgccatggcccaagctgacatcgcgctgatcggattggccgtcatgggccagaacttaattctgaacatgaatgaccacggctttgtgcctgttttaccactgccctctccttctatgacgggtacagacatgagatgcttccagccagcctcatccaggctcagcgggattacttcggggctcacacctatgaactcttggccaaaccagggcagtttatccacaccaactggacaggccatggtggcaccgtgtcatcctcgtcatacaatgcctgatcatgctgctcctgtcaccctccacgattccacagaccaggacattccatgtgcctcatggcactgccacctggccctttgccctattttctgttcagttttttaaaagtgttgtaagagactcctgaggaagacacacagtttatttgtaaagtagctctgtgagagccaccatgccctctgcccttgcctcttgggactgaccaggagctgctcatgtgcgtgagagtgggaaccatctccttgcggcagtggcttccgcgtgccccgtgtgctggtgcggttcccatcacgcagacaggaagggtgtttgcgcactctgatcaactggaacctctgtatcatgcggctgaattccctttttcctttactcaataaaagctacatcagactgatgctctttctccagattcttagtctcacctcggccacatggagccattatccccattggcagaaagatttttctttaaaaaaaaagactagaataacacaagaaaccacatttaggattatgcttcactcagaggaggcaggcagggaggacacaccaggggctttaatacactgggcatgttttctttctccaattgggcaatgggtacatggacgttcactgtaacgtgctttttctttcgtcttttttttttttttttttttttttgctcctggcaagctgtgcgtgacattctttatggctttttgtatgtcaaatacttcatactaaactttctagagaattaaactttaatgatgggctcagcttggtc

SEQ ID NO: 292539 - DNA, 1329 bp, Homo sapiens
cgcagtttctggagggagccgctgcgggtctttccctcactcgtcctccgcgcgtcgccgctcttcggttctgctctgtccgccgccatggcccaagctgacatcgcgctgatcggattggccgtcatgggccagaacttaattctgaacatgaatgaccacggctttgtggtctgtgcttttaataggactgtctccaaagttgatgatttcttggccaatgaggcaaagggaaccaaagtggtgggtgcccagtccctgaaagagatggtctccaagctgaagaagccccggcggatcatcctcctggtgaaggctgggcaagctgtggatgatttcatcgagaaattggtaccattgttggatactggtgacatcatcattgacggaggaaattctgaatatagggacaccacaagacggtgccgagacctcaaggccaagggaattttatttgtggggagcggagtcagtggtggagaggaaggggcccggtatggcccatcgctcatgccaggagggaacaaagaagcgtggccccacatcaagaccatcttccaaggcattgctgcaaaagtgggaactggagaaccctgctgtgactgggtgggagatgagggagcaggccacttcgtgaagatggtgcacaacgggatagagtatggggacatgcagctgatctgtgaggcataccacctgatgaaagacgtgctgggcatggcgcaggacgagatggcccaggcccttgcctcttgggactgaccaggagctgctcatgtgcgtgagagtgggaaccatctccttgcggcagtggcttccgcgtgccccgtgtgctggtgcggttcccatcacgcagacaggaagggtgtttgcgcactctgatcaactggaacctctgtatcatgcggctgaattccctttttcctttactcaataaaagctacatcagactgatgctctttctccagattcttagtctcacctcggccacatggagccattatccccattggcagaaagatttttctttaaaaaaaaagactagaataacacaagaaaccacatttaggattatgcttcactcagaggaggcaggcagggaggacacaccaggggctttaatacactgggcatgttttctttctccaattgggcaatgggtacatggacgttcactgtaacgtgctttttctttcgtcttttttttttttttttttttttttgctcctggcaagctgtgcgtgacattctttatggctttttgtatgtcaaatacttcatactaaactttctagagaattaaactttaatgatgggctcagcttggtc

SEQ ID NO: 292540 - DNA, 897 bp, Homo sapiens
ctagagtagtttgttcctttccattgctgagtcgtattccactgctggttatgccacatttttttcttaattcaccaactggacaggccatggtggcaccgtgtcatcctcgtcatacaatgcctgatcatgctgctcctgtcaccctccacgattccacagaccaggacattccatgtgcctcatggcactgccacctggccctttgccctattttctgttcagttttttaaaagtgttgtaagagactcctgaggaagacacacagtttatttgtaaagtagctctgtgagagccaccatgccctctgcccttgcctcttgggactgaccaggagctgctcatgtgcgtgagagtgggaaccatctccttgcggcagtggcttccgcgtgccccgtgtgctggtgcggttcccatcacgcagacaggaagggtgtttgcgcactctgatcaactggaacctctgtatcatgcggctgaattccctttttcctttactcaataaaagctacatcagactgatgctctttctccagattcttagtctcacctcggccacatggagccattatccccattggcagaaagatttttctttaaaaaaaaagactagaataacacaagaaaccacatttaggattatgcttcactcagaggaggcaggcagggaggacacaccaggggctttaatacactgggcatgttttctttctccaattgggcaatgggtacatggacgttcactgtaacgtgctttttctttcgtcttttttttttttttttttttttttgctcctggcaagctgtgcgtgacattctttatggctttttgtatgtcaaatacttcatactaaactttctagagaattaaactttaatgatgggctcagcttggtc

SEQ ID NO: 292541 - DNA, 1263 bp, Homo sapiens
cgcagtttctggagggagccgctgcgggtctttccctcactcgtcctccgcgcgtcgccgctcttcggttctgctctgtccgccgccatggcccaagctgacatcgcgctgatcggattggccgtcatgggccagaacttaattctgaacatgaatgaccacggctttgtggtctgtgcttttaataggactgtctccaaagttgatgatttcttggccaatgaggcaaagggaaccaaagtggtgggtgcccagtccctgaaagagatggtctccaagctgaagaagccccggcggatcatcctcctggtgaaggctgggcaagctgtggatgatttcatcgagaaattgagacggtgccgagacctcaaggccaagggaattttatttgtggggagcggagtcagtggtggagaggaaggggcccggtatggcccatcgctcatgccaggagggaacaaagaagcgtggccccacatcaagaccatcttccaaggcattgctgcaaaagtgggaactggagaaccctgctgtgactgggtgggagatgagggagcaggccacttcgtgaagatggtgcacaacgggatagagtatggggacatgcagctgatctgtgaggcataccacctgatgaaagacgtgctgggcatggcgcaggacgagatggcccaggcccttgcctcttgggactgaccaggagctgctcatgtgcgtgagagtgggaaccatctccttgcggcagtggcttccgcgtgccccgtgtgctggtgcggttcccatcacgcagacaggaagggtgtttgcgcactctgatcaactggaacctctgtatcatgcggctgaattccctttttcctttactcaataaaagctacatcagactgatgctctttctccagattcttagtctcacctcggccacatggagccattatccccattggcagaaagatttttctttaaaaaaaaagactagaataacacaagaaaccacatttaggattatgcttcactcagaggaggcaggcagggaggacacaccaggggctttaatacactgggcatgttttctttctccaattgggcaatgggtacatggacgttcactgtaacgtgctttttctttcgtcttttttttttttttttttttttttgctcctggcaagctgtgcgtgacattctttatggctttttgtatgtcaaatacttcatactaaactttctagagaattaaactttaatgatgggctcagcttggtc

SEQ ID NO: 292542 - DNA, 724 bp, Homo sapiens
aggaagcggaaggccgaccaagaagtgttcccagctgggtctcgatttaccttctttgttaagtgttgtaagagactcctgaggaagacacacagtttatttgtaaagtagctctgtgagagccaccatgccctctgcccttgcctcttgggactgaccaggagctgctcatgtgcgtgagagtgggaaccatctccttgcggcagtggcttccgcgtgccccgtgtgctggtgcggttcccatcacgcagacaggaagggtgtttgcgcactctgatcaactggaacctctgtatcatgcggctgaattccctttttcctttactcaataaaagctacatcagactgatgctctttctccagattcttagtctcacctcggccacatggagccattatccccattggcagaaagatttttctttaaaaaaaaagactagaataacacaagaaaccacatttaggattatgcttcactcagaggaggcaggcagggaggacacaccaggggctttaatacactgggcatgttttctttctccaattgggcaatgggtacatggacgttcactgtaacgtgctttttctttcgtcttttttttttttttttttttttttgctcctggcaagctgtgcgtgacattctttatggctttttgtatgtcaaatacttcatactaaactttctagagaattaaactttaatgatgggctcagcttggtc

SEQ ID NO: 292543 - DNA, 737 bp, Homo sapiens
cttgctttgaattgctatatgattcttgtatcaaaaatgctgtactcattttatacttgttattttttgtgtggagaggtagccttgccagggatgttggcatgaaagctgatgtggacttctctgatgtgtcgcctgtttctctgaaggcctcttggtgcttgttgtcctgacaggtgggagatgagggagcaggccacttcgtgaagatggtgcacaacgggatagagtatggggacatgcagctgatctgtgaggcataccacctgatgaaagacgtgctgggcatggcgcaggacgagatggcccagggtgaggccccggcactgcctctgtgtccgttctgcagggagtgctcactttgccacagacaccgaatcttttcttcattcctatccccttggccattcgggtggcctgcatggactcagcctaatttgagggaaactgttagtaataggcctatacactatgctagtcagtcactaagcagaaagtccccacagagtctgggtggttatcatcaccaccatttagcgtagcttacctggtgtcaggcactgtgtcactccacatacctgtcccatttactcccacagttgtcccacatggcagatgcagcagaagctttctttcctgatcaagttgggattggctttttgatagttaatctgaaaagtcagtccaagtagggaagctgaagcatttcccccaacattttattatgacaatattca

SEQ ID NO: 292544 - DNA, 1671 bp, Homo sapiens
  misc_feature (4)..(4): n is a, c, g, or t
  misc_feature (7)..(9): n is a, c, g, or t
ggcncgnnnagcgtgaatcccttagcgcaccgcctccccaagtgctgccagcatgctgcccctccacgctagggacttgcctgcctctgccgcagcgcagatctgatgcggtggtttcctccaaagaaagcgggatactccgggccctgccgcgcgcaccgccgctccgtcacggagccgctttacttccgggtgcgacgtctacccacccaggacttcctgggacgagccgtcccccgccccagccacgcctctgagtcgcgctgcgcaggcgccattgggcagagggattggcaagcttgcgtgccccagcgacacaggcctcgaggctgtctctgacaagtgttcacaggaggtggggacgcctctgcgcgaggaacgaggagctacgggcctgggcccggttattgccatgggcagcggctgccgcatcgaatgcatattcttcagcgagttccaccccacgctgggacccaagatcacctatcaggtccctgaagacttcatctcccgagagctgtttgacacagtccaagtgtacatcatcaccaagccagagctgcagaacaagcttatcactgtcacagctatggaaaagaagctgatcggctgtcctgtgtgcatcgaacacaagaagtacagccgcaatgctctcctcttcaacctgggcttcgtgtgtgatgcccaggccaagacctgcgccctcgagcccattgttaaaaagctggctggctatctgaccacactagagctagagagcagcttcgtgtccatggaggagagcaagcagaagttggtgcccatcatgaccatcttgctggaggagctaaatgcctcaggccggtgcactctgcccattgatgagtccaacaccatccacttgaaggtgattgagcagcggccagaccctccggtggcccaggagtatgatgtacctgtctttaccaaagacaaggaggatttcttcaactcacagtgggacctcactacacaacaaatcctgccctacattgatgggttccgccacatccagaagatttcagcagaggcagatgtggagctcaacctggtgcgcattgctatccagaacctgctgtactacggcgttgtgacactggtgtccatcctccagtactccaatgtatactgcccaacgcccaaggtccaggacctggtagatgacaagtccctgcaagaggcatgtctatcctacgtgaccaagcaagggcacaagagggccagtctccgggatgtgttccagctatactgcagcctgagccctggcactaccgtgcgagacctcattggccgccacccccagcagctgcagcatgttgatgaacggaagctgatccagttcgggcttatgaagaacctcatcaggcgactacagaagtatcctgtgcgggtgactcgggaagagcagagccaccctgcccggctttatacaggctgccacagctatgacgagatctgctgcaagacaggcatgagctaccatgagctggatgagcggcttgaaaatgaccccaacatcatcatctgctggaagtgaggctggtagtgactggatggacacattgctgtgggtagtccctcctactaggaggcttgtcatactgtctagaggttgactcttagttctgtaaataaagacatccatttcaaaca

SEQ ID NO: 292545 - DNA, 2613 bp, Homo sapiens
  misc_feature (4)..(4): n is a, c, g, or t
  misc_feature (7)..(9): n is a, c, g, or t
ggcncgnnnagcgtgaatcccttagcgcaccgcctccccaagtgctgccagcatgctgcccctccacgctagggacttgcctgcctctgccgcagcgcagatctgatgcggtggtttcctccaaagaaagcgggatactccgggccctgccgcgcgcaccgccgctccgtcacggagccgctttacttccgggtgcgacgtctacccacccaggacttcctgggacgagccgtcccccgccccagccacgcctctgagtcgcgctgcgcaggcgccattgggcagagggattggcaagcttgcgtgccccagcgacacaggcctcgaggctgtctctgacaagtgttcacaggaggtggggacgcctctgcgcgaggaacgaggagctacgggcctgggcccggttattgccatgggcagcggctgccgcatcgaatgcatattcttcagcgagttccaccccacgctgggacccaagatcacctatcaggtccctgaagacttcatctcccgagagctgtttgacacagtccaagtgtacatcatcaccaagccagagctgcagaacaagcttatcactgtcacagctatggaaaagaagctgatcggctgtcctgtgtgcatcgaacacaagaagtacagccgcaatgctctcctcttcaacctgggcttcgtgtgtgatgcccaggccaagacctgcgccctcgagcccattgttaaaaagctggctggctatctgaccacactagagctagagagcagcttcgtgtccatggaggagagcaagcagaagttggtgcccatcatgaccatcttgctggaggagctaaatgcctcaggccggtgcactctgcccattgatgagtccaacaccatccacttgaaggtgattgagcagcggccagaccctccggtggcccaggagtatgatgtacctgtctttaccaaagacaaggaggatttcttcaactcacagtgggacctcactacacaacaaatcctgccctacattgatgggttccgccacatccagaagatttcagcagaggcagatgtggagctcaacctggtgcgcattgctatccagaacctgctgtactacggcgttgtgacactggtgtccatcctccagtactccaatgtatactgcccaacgcccaaggtccaggacctggtagatgacaagtccctgcaagaggcatgtctatcctacgtgaccaagcaagggcacaagagggccagtctccgggatgtgttccagctatactgcagcctgagccctggcactaccgtgcgagacctcattggccgccacccccagcagctgcagcatgttgatgaacggaagctgatccagttcgggcttatgaagaacctcatcaggcgactacagaagtatcctgtgcgggtgactcgggaagagcagagccaccctgcccggctttatacaggctgccacagctatgacgagatctgctgcaagacaggcatgagctaccatgagctggatgagcggcttgaaaatgaccccaacatcatcatctgctggaagtgaggctggtagtgactggatggacacattgctgtgggtagtccctcctactaggaggcttgtcatactgtctagaggttgactcttagttctgtaaataaagacatccatttcaaacaaaaaaaaaaaaaactcagactagcagccgcggtgtgactggtgcacaggacacttcccctctagagtcccctccgtggtcagctgttgtgacatttgaattctccaggtgctgctagggacagcataggcccgggcactgctagatgcttggtttaaaccaggccaagagtaaccctcccatccccattacaaaccaccttttcaagttttttaggttttagttttttgtttttagcataaatggtggagtagcagcagcatctcaccaggagctttgtcgcattacattttgtattttgcttttttgagacggggtctcactctgttacccaggctggaatacagtggcacaatcacagctcactgtaggctctatctcctgggctcaggtgatcctcccaaactcagcctcccaggtagctgtggctccaggcgaactactgtatatagagacagggtttccctatgttgcccaggctggtctggtcttatagtcctgggctcaagcctcccagagtgctgggattacaggcatgggtcaccgcaccaagcccgcatttatattttgagttaccaaaatgatcatcatctgtgaagcatcatggtagcttccaagcatttgcggcccactggccagtgcatccaaaacacattcaggaaacccgagagttgtaagttgcacatgtgtggcctacagtgacttccatgtagtaacagggctgagcaaggcaggctctccaccagacttaaagcattcaaccactctgcccccaggccgacactgacatgtgttcactgtcgctgccacagctggccacctgtgttcagtctccatgaaggattcaccttctgctctcactgacatctccttggctacacaaatgtgcaggtgtctcttgtcaaagctaatttttcttttctaaataaacatcctttaatac

SEQ ID NO: 292546 - DNA, 1724 bp, Homo sapiens
  misc_feature (4)..(4): n is a, c, g, or t
  misc_feature (7)..(9): n is a, c, g, or t
ggcncgnnnagcgtgaatcccttagcgcaccgcctccccaagtgctgccagcatgctgcccctccacgctagggacttgcctgcctctgccgcagcgcagatctgatgcggtggtttcctccaaagaaagcgggatactccgggccctgccgcgcgcaccgccgctccgtcacggagccgctttacttccgggtgcgacgtctacccacccaggacttcctgggacgagccgtcccccgccccagccacgcctctgagtcgcgctgcgcaggcgccattgggcagagggattggcaagcttgcgtgccccagcgacacaggcctcgaggctgtctctgacaagtgttcacaggaggtggggacgcctctgcgcgaggaacgaggagctacgggcctgggcccggttattgccatgggcagcggctgccgcatcgaatgcatattcttcagcgagttccaccccacgctgggacccaagatcacctatcaggtccctgaagacttcatctcccgagagctgtttgacacagtccaagtgtacatcatcaccaagccagagctgcagaacaagcttatcactgtctagagagcagcttcgtgtccatggaggagagcaagcagaagttggtgcccatcatgaccatcttgctggaggagctaaatgcctcaggccggtgcactctgcccattgatgagtccaacaccatccacttgaaggtgattgagcagcggccagaccctccggtggcccaggagtatgatgtacctgtctttaccaaagacaaggaggatttcttcaactcacagtgggacctcactacacaacaaatcctgccctacattgatgggttccgccacatccagaagatttcagcagaggcagatgtggagctcaacctggtgcgcattgctatccagaacctgctgtactacggcgttgtgacactggtgtccatcctccagtactccaatgtatactgcccaacgcccaaggtccaggacctggtagatgacaagtccctgcaagaggcatgtctatcctacgtgaccaagcaagggcacaagagggccagtctccgggatgtgttccagctatactgcagcctgagccctggcactaccgtgcgagacctcattggccgccacccccagcagctgcagcatgttgatgaacggtcagaggagaatttgctggggcatttgggagttacctgagggaagctagaccctttatgtctctcaggagccctggatcatggggcactgccaatccaagcaggcttcctggagatgatgggctacagagacaaaattgaagggagactacaggaaagggttggcctgcctgaaagaaggcctggccagggcgtcaccccgtcctctgatcctcaccctaggaagctgatccagttcgggcttatgaagaacctcatcaggcgactacagaagtatcctgtgcgggtgactcgggaagagcagagccaccctgcccggctttatacaggctgccacagctatgacgagatctgctgcaagacaggcatgagctaccatgagctggatgagcggcttgaaaatgaccccaacatcatcatctgctggaagtgaggctggtagtgactggatggacacattgctgtgggtagtccctcctactaggaggcttgtcatactgtctagaggttgactcttagttctgtaaataaagacatccatttcaaaca

SEQ ID NO: 292547 - DNA, 2393 bp, Homo sapiens
  misc_feature (4)..(4): n is a, c, g, or t
  misc_feature (7)..(9): n is a, c, g, or t
ggcncgnnnagcgtgaatcccttagcgcaccgcctccccaagtgctgccagcatgctgcccctccacgctagggacttgcctgcctctgccgcagcgcagatctgatgcggtggtttcctccaaagaaagcgggatactccgggccctgccgcgcgcaccgccgctccgtcacggagccgctttacttccgggtgcgacgtctacccacccaggacttcctgggacgagccgtcccccgccccagccacgcctctgagtcgcgctgcgcaggcgccattgggcagagggattggcaagcttgcgtgccccagcgacacaggcctcgaggctgtctctgacaagtgttcacaggaggtggggacgcctctgcgcgaggaacgaggagctacgggcctgggcccggttattgccatgggcagcggctgccgcatcgaatgcatattcttcagcgagttccaccccacgctgggacccaagatcacctatcaggtgccacccgggctcgcgggactgggcgggaagagggacgttctcgagagctcaactggctgcctgaaggcagtagtttcccgtgctgcacgcaggcatgctgcttcattcgcagacaactgtgaggctagaggatagtcagacccaggcccccggctcccaatgtggcagggaagacatacgtcacattggcagtgtttgtaggatatcgggctgtagggatccggttggggggttccaggtcccacagaaggtgagttgggtgacccatgagtatccctgaactgagtgaagagtaaatgatgcataggaagtttaggtaaggcaggagaaagtgttccaggtagagggaacagcatatgcagaagccaggaaggaggtgagatcatagcgtatgtttggaaacagaaagaagtaataggcctgagtggatgggagagaggggaacgctggagaagaggacttgggcttggggggcatgaggaggtcaccatttgtactacacccagtacagatgtccactgaggggcccattgccactcccctccccaggtccctgaagacttcatctcccgagagctgtttgacacagtccaagtgtacatcatcaccaagccagagctgcagaacaagcttatcactgtcacagctatggaaaagaagctgatcggctgtcctgtgtgcatcgaacacaagaagtacagccgcaatgctctcctcttcaacctgggcttcgtgtgtgatgcccaggccaagacctgcgccctcgagcccattgttaaaaagctggctggctatctgaccacactagagtctgcaatgagatgggcttgggtttaccgacaggcagagttggggaaggtgttcccatgtctccaaagtcccccaaacctgggaccctgcaaaccagctcaggactcagggcagccaaccagccaggggtcctgggatgtgcccaccatgctttccatgctctgtctagcctagagagcagcttcgtgtccatggaggagagcaagcagaagttggtgcccatcatgaccatcttgctggaggagctaaatgcctcaggccggtgcactctgcccattgatgagtccaacaccatccacttgaaggtgattgagcagcggccagaccctccggtggcccaggagtatgatgtacctgtctttaccaaagacaaggaggatttcttcaactcacagtgggacctcactacacaacaaatcctgccctacattgatgggttccgccacatccagaagatttcagcagaggcagatgtggagctcaacctggtgcgcattgctatccagaacctgctgtactacggcgttgtgacactggtgtccatcctccagtactccaatgtatactgcccaacgcccaaggtccaggacctggtagatgacaagtccctgcaagaggcatgtctatcctacgtgaccaagcaagggcacaagagggccagtctccgggatgtgttccagctatactgcagcctgagccctggcactaccgtgcgagacctcattggccgccacccccagcagctgcagcatgttgatgaacggaagctgatccagttcgggcttatgaagaacctcatcaggcgactacagaagtatcctgtgcgggtgactcgggaagagcagagccaccctgcccggctttatacaggctgccacagctatgacgagatctgctgcaagacaggcatgagctaccatgagctggatgagcggcttgaaaatgaccccaacatcatcatctgctggaagtgaggctggtagtgactggatggacacattgctgtgggtagtccctcctactaggaggcttgtcatactgtctagaggttgactcttagttctgtaaataaagacatccatttcaaaca

SEQ ID NO: 292548 - DNA, 2223 bp, Homo sapiens
  misc_feature (4)..(4): n is a, c, g, or t
  misc_feature (7)..(9): n is a, c, g, or t
ggcncgnnnagcgtgaatcccttagcgcaccgcctccccaagtgctgccagcatgctgcccctccacgctagggacttgcctgcctctgccgcagcgcagatctgatgcggtggtttcctccaaagaaagcgggatactccgggccctgccgcgcgcaccgccgctccgtcacggagccgctttacttccgggtgcgacgtctacccacccaggacttcctgggacgagccgtcccccgccccagccacgcctctgagtcgcgctgcgcaggcgccattgggcagagggattggcaagcttgcgtgccccagcgacacaggcctcgaggctgtctctgacaagtgttcacaggaggtggggacgcctctgcgcgaggaacgaggagctacgggcctgggcccggttattgccatgggcagcggctgccgcatcgaatgcatattcttcagcgagttccaccccacgctgggacccaagatcacctatcaggtgccacccgggctcgcgggactgggcgggaagagggacgttctcgagagctcaactggctgcctgaaggcagtagtttcccgtgctgcacgcaggcatgctgcttcattcgcagacaactgtgaggctagaggatagtcagacccaggcccccggctcccaatgtggcagggaagacatacgtcacattggcagtgtttgtaggatatcgggctgtagggatccggttggggggttccaggtcccacagaaggtgagttgggtgacccatgagtatccctgaactgagtgaagagtaaatgatgcataggaagtttaggtaaggcaggagaaagtgttccaggtagagggaacagcatatgcagaagccaggaaggaggtgagatcatagcgtatgtttggaaacagaaagaagtaataggcctgagtggatgggagagaggggaacgctggagaagaggacttgggcttggggggcatgaggaggtcaccatttgtactacacccagtacagatgtccactgaggggcccattgccactcccctccccaggtccctgaagacttcatctcccgagagctgtttgacacagtccaagtgtacatcatcaccaagccagagctgcagaacaagcttatcactgtcacagctatggaaaagaagctgatcggctgtcctgtgtgcatcgaacacaagaagtacagccgcaatgctctcctcttcaacctgggcttcgtgtgtgatgcccaggccaagacctgcgccctcgagcccattgttaaaaagctggctggctatctgaccacactagagctagagagcagcttcgtgtccatggaggagagcaagcagaagttggtgcccatcatgaccatcttgctggaggagctaaatgcctcaggccggtgcactctgcccattgatgagtccaacaccatccacttgaaggtgattgagcagcggccagaccctccggtggcccaggagtatgatgtacctgtctttaccaaagacaaggaggatttcttcaactcacagtgggacctcactacacaacaaatcctgccctacattgatgggttccgccacatccagaagatttcagcagaggcagatgtggagctcaacctggtgcgcattgctatccagaacctgctgtactacggcgttgtgacactggtgtccatcctccagtactccaatgtatactgcccaacgcccaaggtccaggacctggtagatgacaagtccctgcaagaggcatgtctatcctacgtgaccaagcaagggcacaagagggccagtctccgggatgtgttccagctatactgcagcctgagccctggcactaccgtgcgagacctcattggccgccacccccagcagctgcagcatgttgatgaacggaagctgatccagttcgggcttatgaagaacctcatcaggcgactacagaagtatcctgtgcgggtgactcgggaagagcagagccaccctgcccggctttatacaggctgccacagctatgacgagatctgctgcaagacaggcatgagctaccatgagctggatgagcggcttgaaaatgaccccaacatcatcatctgctggaagtgaggctggtagtgactggatggacacattgctgtgggtagtccctcctactaggaggcttgtcatactgtctagaggttgactcttagttctgtaaataaagacatccatttcaaaca

SEQ ID NO: 292549 - DNA, 2598 bp, Homo sapiens
  misc_feature (4)..(4): n is a, c, g, or t
  misc_feature (7)..(9): n is a, c, g, or t
ggcncgnnnagcgtgaatcccttagcgcaccgcctccccaagtgctgccagcatgctgcccctccacgctagggacttgcctgcctctgccgcagcgcagatctgatgcggtggtttcctccaaagaaagcgggatactccgggccctgccgcgcgcaccgccgctccgtcacggagccgctttacttccgggtgcgacgtctacccacccaggacttcctgggacgagccgtcccccgccccagccacgcctctgagtcgcgctgcgcaggcgccattgggcagagggattggcaagcttgcgtgccccagcgacacaggcctcgaggctgtctctgacaagtgttcacaggaggtggggacgcctctgcgcgaggaacgaggagctacgggcctgggcccggttattgccatgggcagcggctgccgcatcgaatgcatattcttcagcgagttccaccccacgctgggacccaagatcacctatcaggtgccacccgggctcgcgggactgggcgggaagagggacgttctcgagagctcaactggctgcctgaaggcagtagtttcccgtgctgcacgcaggcatgctgcttcattcgcagacaactgtgaggctagaggatagtcagacccaggcccccggctcccaatgtggcagggaagacatacgtcacattggcagtgtttgtaggatatcgggctgtagggatccggttggggggttccaggtcccacagaaggtgagttgggtgacccatgagtatccctgaactgagtgaagagtaaatgatgcataggaagtttaggtaaggcaggagaaagtgttccaggtagagggaacagcatatgcagaagccaggaaggaggtgagatcatagcgtatgtttggaaacagaaagaagtaataggcctgagtggatgggagagaggggaacgctggagaagaggacttgggcttggggggcatgaggaggtcaccatttgtactacacccagtacagatgtccactgaggggcccattgccactcccctccccaggtccctgaagacttcatctcccgagagctgtttgacacagtccaagtgtacatcatcaccaagccagagctgcagaacaagcttatcactgtcacagctatggaaaagaagctgatcggctgtcctgtgtgcatcgaacacaagaagtacagccgcaatgctctcctcttcaacctgggcttcgtgtgtgatgcccaggccaagacctgcgccctcgagcccattgttaaaaagctggctggctatctgaccacactagagctagagagcagcttcgtgtccatggaggagagcaagcagaagttggtgcccatcatgaccatcttgctggaggagctaaatgcctcaggccggtgcactctgcccattggtatggccagcctctgcaaggacagcagaggggtagaggagagatgggaaagtgaacccagctagtcagggagaagggcaagactcatgaacacattggtgggcaggaaatagccatgggctgaggtgcccatgtccagggtccaatgcatgatggagctgggactgggggtagggggaaagcagagctctccagctctgccccttgggcaattccttcccctttgtgggcctccgtttctcactccataaaaagagaaagattagccctacccagaggcacctgcttgccccaagggatgctgggaggcctggatggtaattgaggacctcttggaagaagtggcactgaggatatggatggggccccctgcagatgagtccaacaccatccacttgaaggtgattgagcagcggccagaccctccggtggcccaggagtatgatgtacctgtctttaccaaagacaaggaggatttcttcaactcacagtgggacctcactacacaacaaatcctgccctacattgatgggttccgccacatccagaagatttcagcagaggcagatgtggagctcaacctggtgcgcattgctatccagaacctgctgtactacggcgttgtgacactggtgtccatcctccagtactccaatgtatactgcccaacgcccaaggtccaggacctggtagatgacaagtccctgcaagaggcatgtctatcctacgtgaccaagcaagggcacaagagggccagtctccgggatgtgttccagctatactgcagcctgagccctggcactaccgtgcgagacctcattggccgccacccccagcagctgcagcatgttgatgaacggaagctgatccagttcgggcttatgaagaacctcatcaggcgactacagaagtatcctgtgcgggtgactcgggaagagcagagccaccctgcccggctttatacaggctgccacagctatgacgagatctgctgcaagacaggcatgagctaccatgagctggatgagcggcttgaaaatgaccccaacatcatcatctgctggaagtgaggctggtagtgactggatggacacattgctgtgggtagtccctcctactaggaggcttgtcatactgtctagaggttgactcttagttctgtaaataaagacatccatttcaaaca

SEQ ID NO: 292550 - DNA, 1938 bp, Homo sapiens
  misc_feature (4)..(4): n is a, c, g, or t
  misc_feature (7)..(9): n is a, c, g, or t
ggcncgnnnagcgtgaatcccttagcgcaccgcctccccaagtgctgccagcatgctgcccctccacgctagggacttgcctgcctctgccgcagcgcagatctgatgcggtggtttcctccaaagaaagcgggatactccgggccctgccgcgcgcaccgccgctccgtcacggagccgctttacttccgggtgcgacgtctacccacccaggacttcctgggacgagccgtcccccgccccagccacgcctctgagtcgcgctgcgcaggcgccattgggcagagggattggcaagcttgcgtgccccagcgacacaggcctcgaggctgtctctgacaagtgttcacaggaggtggggacgcctctgcgcgaggaacgaggagctacgggcctgggcccggttattgccatgggcagcggctgccgcatcgaatgcatattcttcagcgagttccaccccacgctgggacccaagatcacctatcaggtccctgaagacttcatctcccgagagctgtttgacacagtccaagtgtacatcatcaccaagccagagctgcagaacaagcttatcactgtgtgagaccctagctcggggtgagcggtgggtggcaggggttgtcccaggaggaggaagggacaggcttgggggcctgactgtgttccaattatccagcacagctatggaaaagaagctgatcggctgtcctgtgtgcatcgaacacaagaagtacagccgcaatgctctcctcttcaacctgggcttcgtgtgtgatgcccaggccaagacctgcgccctcgagcccattgttaaaaagctggctggctatctgaccacactagagtctgcaatgagatgggcttgggtttaccgacaggcagagttggggaaggtgttcccatgtctccaaagtcccccaaacctgggaccctgcaaaccagctcaggactcagggcagccaaccagccaggggtcctgggatgtgcccaccatgctttccatgctctgtctagcctagagagcagcttcgtgtccatggaggagagcaagcagaagttggtgcccatcatgaccatcttgctggaggagctaaatgcctcaggccggtgcactctgcccattgatgagtccaacaccatccacttgaaggtgattgagcagcggccagaccctccggtggcccaggagtatgatgtacctgtctttaccaaagacaaggaggatttcttcaactcacagtgggacctcactacacaacaaatcctgccctacattgatgggttccgccacatccagaagatttcagcagaggcagatgtggagctcaacctggtgcgcattgctatccagaacctgctgtactacggcgttgtgacactggtgtccatcctccagtactccaatgtatactgcccaacgcccaaggtccaggacctggtagatgacaagtccctgcaagaggcatgtctatcctacgtgaccaagcaagggcacaagagggccagtctccgggatgtgttccagctatactgcagcctgagccctggcactaccgtgcgagacctcattggccgccacccccagcagctgcagcatgttgatgaacggaagctgatccagttcgggcttatgaagaacctcatcaggcgactacagaagtatcctgtgcgggtgactcgggaagagcagagccaccctgcccggctttatacaggctgccacagctatgacgagatctgctgcaagacaggcatgagctaccatgagctggatgagcggcttgaaaatgaccccaacatcatcatctgctggaagtgaggctggtagtgactggatggacacattgctgtgggtagtccctcctactaggaggcttgtcatactgtctagaggttgactcttagttctgtaaataaagacatccatttcaaaca

SEQ ID NO: 292551 - DNA, 1689 bp, Homo sapiens
  misc_feature (4)..(4): n is a, c, g, or t
  misc_feature (7)..(9): n is a, c, g, or t
ggcncgnnnagcgtgaatcccttagcgcaccgcctccccaagtgctgccagcatgctgcccctccacgctagggacttgcctgcctctgccgcagcgcagatctgatgcggtggtttcctccaaagaaagcgggatactccgggccctgccgcgcgcaccgccgctccgtcacggagccgctttacttccgggtgcgacgtctacccacccaggacttcctgggacgagccgtcccccgccccagccacgcctctgagtcgcgctgcgcaggcgccattgggcagagggattggcaagcttgcgtgccccagcgacacaggcctcgaggctgtctctgacaagtgttcacaggaggtggggacgcctctgcgcgaggaacgaggagctacgggcctgggcccggttattgccatgggcagcggctgccgcatcgaatgcatattcttcagcgagttccaccccacgctgggacccaagatcacctatcaggtccctgaagacttcatctcccgagagctgtttgacacagtccaagtgtacatcatcaccaagccagagctgcagaacaagcttatcactgtgtgagaccctagctcgggcacagctatggaaaagaagctgatcggctgtcctgtgtgcatcgaacacaagaagtacagccgcaatgctctcctcttcaacctgggcttcgtgtgtgatgcccaggccaagacctgcgccctcgagcccattgttaaaaagctggctggctatctgaccacactagagctagagagcagcttcgtgtccatggaggagagcaagcagaagttggtgcccatcatgaccatcttgctggaggagctaaatgcctcaggccggtgcactctgcccattgatgagtccaacaccatccacttgaaggtgattgagcagcggccagaccctccggtggcccaggagtatgatgtacctgtctttaccaaagacaaggaggatttcttcaactcacagtgggacctcactacacaacaaatcctgccctacattgatgggttccgccacatccagaagatttcagcagaggcagatgtggagctcaacctggtgcgcattgctatccagaacctgctgtactacggcgttgtgacactggtgtccatcctccagtactccaatgtatactgcccaacgcccaaggtccaggacctggtagatgacaagtccctgcaagaggcatgtctatcctacgtgaccaagcaagggcacaagagggccagtctccgggatgtgttccagctatactgcagcctgagccctggcactaccgtgcgagacctcattggccgccacccccagcagctgcagcatgttgatgaacggaagctgatccagttcgggcttatgaagaacctcatcaggcgactacagaagtatcctgtgcgggtgactcgggaagagcagagccaccctgcccggctttatacaggctgccacagctatgacgagatctgctgcaagacaggcatgagctaccatgagctggatgagcggcttgaaaatgaccccaacatcatcatctgctggaagtgaggctggtagtgactggatggacacattgctgtgggtagtccctcctactaggaggcttgtcatactgtctagaggttgactcttagttctgtaaataaagacatccatttcaaaca

SEQ ID NO: 292552 - DNA, 2835 bp, Homo sapiens
  misc_feature (4)..(4): n is a, c, g, or t
  misc_feature (7)..(9): n is a, c, g, or t
ggcncgnnnagcgtgaatcccttagcgcaccgcctccccaagtgctgccagcatgctgcccctccacgctagggacttgcctgcctctgccgcagcgcagatctgatgcggtggtttcctccaaagaaagcgggatactccgggccctgccgcgcgcaccgccgctccgtcacggagccgctttacttccgggtgcgacgtctacccacccaggacttcctgggacgagccgtcccccgccccagccacgcctctgagtcgcgctgcgcaggcgccattgggcagagggattggcaagcttgcgtgccccagcgacacaggcctcgaggctgtctctgacaagtgttcacaggaggtggggacgcctctgcgcgaggaacgaggagctacgggcctgggcccggttattgccatgggcagcggctgccgcatcgaatgcatattcttcagcgagttccaccccacgctgggacccaagatcacctatcaggtgccacccgggctcgcgggactgggcgggaagagggacgttctcgagagctcaactggctgcctgaaggcagtagtttcccgtgctgcacgcaggcatgctgcttcattcgcagacaactgtgaggctagaggatagtcagacccaggcccccggctcccaatgtggcagggaagacatacgtcacattggcagtgtttgtaggatatcgggctgtagggatccggttggggggttccaggtcccacagaaggtgagttgggtgacccatgagtatccctgaactgagtgaagagtaaatgatgcataggaagtttaggtaaggcaggagaaagtgttccaggtagagggaacagcatatgcagaagccaggaaggaggtgagatcatagcgtatgtttggaaacagaaagaagtaataggcctgagtggatgggagagaggggaacgctggagaagaggacttgggcttggggggcatgaggaggtcaccatttgtactacacccagtacagatgtccactgaggggcccattgccactcccctccccaggtccctgaagacttcatctcccgagagctgtttgacacagtccaagtgtacatcatcaccaagccagagctgcagaacaagcttatcactgtcacagctatggaaaagaagctgatcggctgtcctgtgtgcatcgaacacaagaagtacagccgcaatgctctcctcttcaacctgggcttcgtgtgtgatgcccaggccaagacctgcgccctcgagcccattgttaaaaagctggctggctatctgaccacactagagctagagagcagcttcgtgtccatggaggagagcaagcagaagttggtgcccatcatgaccatcttgctggaggagctaaatgcctcaggccggtgcactctgcccattggtatggccagcctctgcaaggacagcagaggggtagaggagagatgggaaagtgaacccagctagtcagggagaagggcaagactcatgaacacattggtgggcaggaaatagccatgggctgaggtgcccatgtccagggtccaatgcatgatggagctgggactgggggtagggggaaagcagagctctccagctctgccccttgggcaattccttcccctttgtgggcctccgtttctcactccataaaaagagaaagattagccctacccagaggcacctgcttgccccaagggatgctgggaggcctggatggtaattgaggacctcttggaagaagtggcactgaggatatggatggggccccctgcagatgagtccaacaccatccacttgaaggtgattgagcagcggccagaccctccggtggcccaggagtatgatgtacctgtctttaccaaagacaaggaggatttcttcaactcacagtgggacctcactacacaacaaatcctgccctacattgatgggttccgccacatccagaagatttcagcagaggcagatgtggagctcaacctggtgcgcattgctatccagaacctgctgtgagtgggcctacagtcatacctgggacaaggtcaccagccagggaagacctcaggggccctgggtgtgagggttgggaaggcatggtcctcagaagctgagcacagctctctctctcaggtactacggcgttgtgacactggtgtccatcctccaggtaggtgagttgggtttggttaagtggagagtggatcatgtggctggaccagaccagggctgtgtcagcttcccaagcccctcactcaggcccctatgccttctgctaccctctagtactccaatgtatactgcccaacgcccaaggtccaggacctggtagatgacaagtccctgcaagaggcatgtctatcctacgtgaccaagcaagggcacaagagggccagtctccgggatgtgttccagctatactgcagcctgagccctggcactaccgtgcgagacctcattggccgccacccccagcagctgcagcatgttgatgaacggaagctgatccagttcgggcttatgaagaacctcatcaggcgactacagaagtatcctgtgcgggtgactcgggaagagcagagccaccctgcccggctttatacaggctgccacagctatgacgagatctgctgcaagacaggcatgagctaccatgagctggatgagcggcttgaaaatgaccccaacatcatcatctgctggaagtgaggctggtagtgactggatggacacattgctgtgggtagtccctcctactaggaggcttgtcatactgtctagaggttgactcttagttctgtaaataaagacatccatttcaaaca

SEQ ID NO: 292553 - DNA, 3335 bp, Homo sapiens
  misc_feature (4)..(4): n is a, c, g, or t
  misc_feature (7)..(9): n is a, c, g, or t
ggcncgnnnagcgtgaatcccttagcgcaccgcctccccaagtgctgccagcatgctgcccctccacgctagggacttgcctgcctctgccgcagcgcagatctgatgcggtggtttcctccaaagaaagcgggatactccgggccctgccgcgcgcaccgccgctccgtcacggagccgctttacttccgggtgcgacgtctacccacccaggacttcctgggacgagccgtcccccgccccagccacgcctctgagtcgcgctgcgcaggcgccattgggcagagggattggcaagcttgcgtgccccagcgacacaggcctcgaggctgtctctgacaagtgttcacaggaggtggggacgcctctgcgcgaggaacgaggagctacgggcctgggcccggttattgccatgggcagcggctgccgcatcgaatgcatattcttcagcgagttccaccccacgctgggacccaagatcacctatcaggtgccacccgggctcgcgggactgggcgggaagagggacgttctcgagagctcaactggctgcctgaaggcagtagtttcccgtgctgcacgcaggcatgctgcttcattcgcagacaactgtgaggctagaggatagtcagacccaggcccccggctcccaatgtggcagggaagacatacgtcacattggcagtgtttgtaggatatcgggctgtagggatccggttggggggttccaggtcccacagaaggtgagttgggtgacccatgagtatccctgaactgagtgaagagtaaatgatgcataggaagtttaggtaaggcaggagaaagtgttccaggtagagggaacagcatatgcagaagccaggaaggaggtgagatcatagcgtatgtttggaaacagaaagaagtaataggcctgagtggatgggagagaggggaacgctggagaagaggacttgggcttggggggcatgaggaggtcaccatttgtactacacccagtacagatgtccactgaggggcccattgccactcccctccccaggtccctgaagacttcatctcccgagagctgtttgacacagtccaagtgtacatcatcaccaagccagagctgcagaacaagcttatcactgtcacagctatggaaaagaagctgatcggctgtcctgtgtgcatcgaacacaagaagtacagccgcaatgctctcctcttcaacctgggcttcgtgtgtgatgcccaggccaagacctgcgccctcgagcccattgttaaaaagctggctggctatctgaccacactagagtctgcaatgagatgggcttgggtttaccgacaggcagagttggggaaggtgttcccatgtctccaaagtcccccaaacctgggaccctgcaaaccagctcaggactcagggcagccaaccagccaggggtcctgggatgtgcccaccatgctttccatgctctgtctagcctagagagcagcttcgtgtccatggaggagagcaagcagaagttggtgcccatcatgaccatcttgctggaggagctaaatgcctcaggccggtgcactctgcccattgatgagtccaacaccatccacttgaaggtgattgagcagcggccagaccctccggtggcccaggagtatgatgtacctgtctttaccaaagacaaggaggatttcttcaactcacagtgggacctcactacacaacaaatcctgccctacattgatgggttccgccacatccagaagatttcagcagaggcagatgtggagctcaacctggtgcgcattgctatccagaacctgctgtactacggcgttgtgacactggtgtccatcctccagtactccaatgtatactgcccaacgcccaaggtccaggacctggtagatgacaagtccctgcaagaggcatgtctatcctacgtgaccaagcaagggcacaagagggccagtctccgggatgtgttccagctatactgcagcctgagccctggcactaccgtgcgagacctcattggccgccacccccagcagctgcagcatgttgatgaacggaagctgatccagttcgggcttatgaagaacctcatcaggcgactacagaagtatcctgtgcgggtgactcgggaagagcagagccaccctgcccggctttatacaggctgccacagctatgacgagatctgctgcaagacaggcatgagctaccatgagctggatgagcggcttgaaaatgaccccaacatcatcatctgctggaagtgaggctggtagtgactggatggacacattgctgtgggtagtccctcctactaggaggcttgtcatactgtctagaggttgactcttagttctgtaaataaagacatccatttcaaacaaaaaaaaaaaaaactcagactagcagccgcggtgtgactggtgcacaggacacttcccctctagagtcccctccgtggtcagctgttgtgacatttgaattctccaggtgctgctagggacagcataggcccgggcactgctagatgcttggtttaaaccaggccaagagtaaccctcccatccccattacaaaccaccttttcaagttttttaggttttagttttttgtttttagcataaatggtggagtagcagcagcatctcaccaggagctttgtcgcattacattttgtattttgcttttttgagacggggtctcactctgttacccaggctggaatacagtggcacaatcacagctcactgtaggctctatctcctgggctcaggtgatcctcccaaactcagcctcccaggtagctgtggctccaggcgaactactgtatatagagacagggtttccctatgttgcccaggctggtctggtcttatagtcctgggctcaagcctcccagagtgctgggattacaggcatgggtcaccgcaccaagcccgcatttatattttgagttaccaaaatgatcatcatctgtgaagcatcatggtagcttccaagcatttgcggcccactggccagtgcatccaaaacacattcaggaaacccgagagttgtaagttgcacatgtgtggcctacagtgacttccatgtagtaacagggctgagcaaggcaggctctccaccagacttaaagcattcaaccactctgcccccaggccgacactgacatgtgttcactgtcgctgccacagctggccacctgtgttcagtctccatgaaggattcaccttctgctctcactgacatctccttggctacacaaatgtgcaggtgtctcttgtcaaagctaatttttcttttctaaataaacatcctttaatac

SEQ ID NO: 292554 - DNA, 2615 bp, Homo sapiens
  misc_feature (4)..(4): n is a, c, g, or t
  misc_feature (7)..(9): n is a, c, g, or t
ggcncgnnnagcgtgaatcccttagcgcaccgcctccccaagtgctgccagcatgctgcccctccacgctagggacttgcctgcctctgccgcagcgcagatctgatgcggtggtttcctccaaagaaagcgggatactccgggccctgccgcgcgcaccgccgctccgtcacggagccgctttacttccgggtgcgacgtctacccacccaggacttcctgggacgagccgtcccccgccccagccacgcctctgagtcgcgctgcgcaggcgccattgggcagagggattggcaagcttgcgtgccccagcgacacaggcctcgaggctgtctctgacaagtgttcacaggaggtggggacgcctctgcgcgaggaacgaggagctacgggcctgggcccggttattgccatgggcagcggctgccgcatcgaatgcatattcttcagcgagttccaccccacgctgggacccaagatcacctatcaggtgccacccgggctcgcgggactgggcgggaagagggacgttctcgagagctcaactggctgcctgaaggcagtagtttcccgtgctgcacgcaggcatgctgcttcattcgcagacaactgtgaggctagaggatagtcagacccaggcccccggctcccaatgtggcagggaagacatacgtcacattggcagtgtttgtaggatatcgggctgtagggatccggttggggggttccaggtcccacagaaggtgagttgggtgacccatgagtatccctgaactgagtgaagagtaaatgatgcataggaagtttaggtaaggcaggagaaagtgttccaggtagagggaacagcatatgcagaagccaggaaggaggtgagatcatagcgtatgtttggaaacagaaagaagtaataggcctgagtggatgggagagaggggaacgctggagaagaggacttgggcttggggggcatgaggaggtcaccatttgtactacacccagtacagatgtccactgaggggcccattgccactcccctccccaggtccctgaagacttcatctcccgagagctgtttgacacagtccaagtgtacatcatcaccaagccagagctgcagaacaagcttatcactgtcacagctatggaaaagaagctgatcggctgtcctgtgtgcatcgaacacaagaagtacagccgcaatgctctcctcttcaacctgggcttcgtgtgtgatgcccaggccaagacctgcgccctcgagcccattgttaaaaagctggctggctatctgaccacactagagtctgcaatgagatgggcttgggtttaccgacaggcagagttggggaaggtgttcccatgtctccaaagtcccccaaacctgggaccctgcaaaccagctcaggactcagggcagccaaccagccaggggtcctgggatgtgcccaccatgctttccatgctctgtctagcctagagagcagcttcgtgtccatggaggagagcaagcagaagttggtgcccatcatgaccatcttgctggaggagctaaatgcctcaggccggtgcactctgcccattgatgagtccaacaccatccacttgaaggtgattgagcagcggccagaccctccggtggcccaggagtatgatgtacctgtctttaccaaagacaaggaggatttcttcaactcacagtgggacctcactacacaacaaatcctgccctacattgatgggttccgccacatccagaagatttcagcagaggcagatgtggagctcaacctggtgcgcattgctatccagaacctgctgtactacggcgttgtgacactggtgtccatcctccagtactccaatgtatactgcccaacgcccaaggtccaggacctggtagatgacaagtccctgcaagaggcatgtctatcctacgtgaccaagcaagggcacaagagggccagtctccgggatgtgttccagctatactgcagcctgagccctggcactaccgtgcgagacctcattggccgccacccccagcagctgcagcatgttgatgaacggtcagaggagaatttgctggggcatttgggagttacctgagggaagctagaccctttatgtctctcaggagccctggatcatggggcactgccaatccaagcaggcttcctggagatgatgggctacagagacaaaattgaagggagactacaggaaagggttggcctgcctgaaagaaggcctggccagggcgtcaccccgtcctctgatcctcaccctaggaagctgatccagttcgggcttatgaagaacctcatcaggcgactacagaagtatcctgtgcgggtgactcgggaagagcagagccaccctgcccggctttatacaggctgccacagctatgacgagatctgctgcaagacaggcatgagctaccatgagctggatgagcggcttgaaaatgaccccaacatcatcatctgctggaagtgaggctggtagtgactggatggacacattgctgtgggtagtccctcctactaggaggcttgtcatactgtctagaggttgactcttagttctgtaaataaagacatccatttcaaaca

SEQ ID NO: 292555 - DNA, 3339 bp, Homo sapiens
  misc_feature (4)..(4): n is a, c, g, or t
  misc_feature (7)..(9): n is a, c, g, or t
ggcncgnnnagcgtgaatcccttagcgcaccgcctccccaagtgctgccagcatgctgcccctccacgctagggacttgcctgcctctgccgcagcgcagatctgatgcggtggtttcctccaaagaaagcgggatactccgggccctgccgcgcgcaccgccgctccgtcacggagccgctttacttccgggtgcgacgtctacccacccaggacttcctgggacgagccgtcccccgccccagccacgcctctgagtcgcgctgcgcaggcgccattgggcagagggattggcaagcttgcgtgccccagcgacacaggcctcgaggctgtctctgacaagtgttcacaggaggtggggacgcctctgcgcgaggaacgaggagctacgggcctgggcccggttattgccatgggcagcggctgccgcatcgaatgcatattcttcagcgagttccaccccacgctgggacccaagatcacctatcaggtgccacccgggctcgcgggactgggcgggaagagggacgttctcgagagctcaactggctgcctgaaggcagtagtttcccgtgctgcacgcaggcatgctgcttcattcgcagacaactgtgaggctagaggatagtcagacccaggcccccggctcccaatgtggcagggaagacatacgtcacattggcagtgtttgtaggatatcgggctgtagggatccggttggggggttccaggtcccacagaaggtgagttgggtgacccatgagtatccctgaactgagtgaagagtaaatgatgcataggaagtttaggtaaggcaggagaaagtgttccaggtagagggaacagcatatgcagaagccaggaaggaggtgagatcatagcgtatgtttggaaacagaaagaagtaataggcctgagtggatgggagagaggggaacgctggagaagaggacttgggcttggggggcatgaggaggtcaccatttgtactacacccagtacagatgtccactgaggggcccattgccactcccctccccaggtccctgaagacttcatctcccgagagctgtttgacacagtccaagtgtacatcatcaccaagccagagctgcagaacaagcttatcactgtcacagctatggaaaagaagctgatcggctgtcctgtgtgcatcgaacacaagaagtacagccgcaatgctctcctcttcaacctgggcttcgtgtgtgatgcccaggccaagacctgcgccctcgagcccattgttaaaaagctggctggctatctgaccacactagagtctgcaatgagatgggcttgggtttaccgacaggcagagttggggaaggtgttcccatgtctccaaagtcccccaaacctgggaccctgcaaaccagctcaggactcagggcagccaaccagccaggggtcctgggatgtgcccaccatgctttccatgctctgtctagcctagagagcagcttcgtgtccatggaggagagcaagcagaagttggtgcccatcatgaccatcttgctggaggagctaaatgcctcaggccggtgcactctgcccattgatgagtccaacaccatccacttgaaggtgattgagcagcggccagaccctccggtggcccaggagtatgatgtacctgtctttaccaaagacaaggaggatttcttcaactcacagtgggacctcactacacaacaaatcctgccctacattgatgggttccgccacatccagaagatttcagcagaggcagatgtggagctcaacctggtgcgcattgctatccagaacctgctgtactacggcgttgtgacactggtgtccatcctccagtactccaatgtatactgcccaacgcccaaggtccaggacctggtagatgacaagtccctgcaagaggcatgtctatcctacgtgaccaagcaagggcacaagagggccagtctccgggatgtgttccagctatactgcagcctgagccctggcactaccgtgcgagacctcattggccgccacccccagcagctgcagcatgttgatgaacggaagctgatccagttcgggcttatgaagaacctcatcaggcgactacagaagtatcctgtgcgggtgactcgggaagagcagagccaccctgcccggctttatacaggctgccacagctatgacgagatctgctgcaagacaggcatgagctaccatgagctggatgagcggcttgaaaatgaccccaacatcatcatctgctggaagtgaggctggtagtgactggatggacacattgctgtgggtagtccctcctactaggaggcttgtcatactgtctagaggttgactcttagttctgtaaataaagacatccatttcaaacaaaaaaaaaaaaaaaaaaaaaaaaaaaaaaaaaaaaaaaaaaaaaaaggggggggggcacgaaataaaaatcgccacgagagaggagcggaaaagaggacagcgcccagcacgcatgtagggaaaaggaggggcgccaactaggggggcggcaatacaccagaggaggggaagggcggcaaaacaagggtgacgcggggaacacgacgcgcgggggcaaccggatggcgaagacacgccaccacacaggggggagcggacacacgggggggaccaacatcaccgcaagctaattgcaccagacggagttaacacaatagactaagggggggctagggggggaggcacaccaccagccgagagtgaaagggccgcgtgcacgagaaagcataggcgctgacccgacgcgagcgtcgtgcctgcacaccaaactattcccaaccgcgccggggcgtgatataaaaacaggcgacgctacaaaagaacaagacgagcgccgtgcacgagtgattagaacgagaacggacaacgaggaaccgcagcaagagagcgacagacaagcacgacgcagacgaaccgaccgctgacaggacgcaagactagtgaaatcaacgactaattgtagaatgaagagtgatatatataaataatcactacatgaaagcacgctaacaaatagaaaacatatagtacacactaaatagcagtctagacagaacataataaaaaagaaacaataaaaagaataataaaaacacaataaacaacacagatataccatggaacagatataaaatagagtcatatattagttcatatgaacataagaatacaaagatatactcaataacaacaaaatcaataatacagtgaagaatattaagattctaatcactataaaccttaaaaaatacagtgtaatacttactcatagacaaacatagtcaa

SEQ ID NO: 292556 - DNA, 2520 bp, Homo sapiens
  misc_feature (4)..(4): n is a, c, g, or t
  misc_feature (7)..(9): n is a, c, g, or t
ggcncgnnnagcgtgaatcccttagcgcaccgcctccccaagtgctgccagcatgctgcccctccacgctagggacttgcctgcctctgccgcagcgcagatctgatgcggtggtttcctccaaagaaagcgggatactccgggccctgccgcgcgcaccgccgctccgtcacggagccgctttacttccgggtgcgacgtctacccacccaggacttcctgggacgagccgtcccccgccccagccacgcctctgagtcgcgctgcgcaggcgccattgggcagagggattggcaagcttgcgtgccccagcgacacaggcctcgaggctgtctctgacaagtgttcacaggaggtggggacgcctctgcgcgaggaacgaggagctacgggcctgggcccggttattgccatgggcagcggctgccgcatcgaatgcatattcttcagcgagttccaccccacgctgggacccaagatcacctatcaggtgccacccgggctcgcgggactgggcgggaagagggacgttctcgagagctcaactggctgcctgaaggcagtagtttcccgtgctgcacgcaggcatgctgcttcattcgcagacaactgtgaggctagaggatagtcagacccaggcccccggctcccaatgtggcagggaagacatacgtcacattggcagtgtttgtaggatatcgggctgtagggatccggttggggggttccaggtcccacagaaggtgagttgggtgacccatgagtatccctgaactgagtgaagagtaaatgatgcataggaagtttaggtaaggcaggagaaagtgttccaggtagagggaacagcatatgcagaagccaggaaggaggtgagatcatagcgtatgtttggaaacagaaagaagtaataggcctgagtggatgggagagaggggaacgctggagaagaggacttgggcttggggggcatgaggaggtcaccatttgtactacacccagtacagatgtccactgaggggcccattgccactcccctccccaggtccctgaagacttcatctcccgagagctgtttgacacagtccaagtgtacatcatcaccaagccagagctgcagaacaagcttatcactgtcacagctatggaaaagaagctgatcggctgtcctgtgtgcatcgaacacaagaagtacagccgcaatgctctcctcttcaacctgggcttcgtgtgtgatgcccaggccaagacctgcgccctcgagcccattgttaaaaagctggctggctatctgaccacactagagctagagagcagcttcgtgtccatggaggagagcaagcagaagttggtgcccatcatgaccatcttgctggaggagctaaatgcctcaggccggtgcactctgcccattgatgagtccaacaccatccacttgaaggtgattgagcagcggccagaccctccggtggcccaggagtatgatgtacctgtctttaccaaagacaaggaggatttcttcaactcacagtgggacctcactacacaacaaatcctgccctacattgatgggttccgccacatccagaagatttcagcagaggcagatgtggagctcaacctggtgcgcattgctatccagaacctgctgtactacggcgttgtgacactggtgtccatcctccagtactccaatgtatactgcccaacgcccaaggtccaggacctggtagatgacaagtccctgcaagaggcatgtctatcctacgtgaccaagcaaggtagtggtgggttctgggggaagccatcttggggagggcagggccacatgatgagctgatccctggcacccacagggcacaagagggccagtctccgggatgtgttccagctatactgcagcctgagccctggcactaccgtgcgagacctcattggccgccacccccagcagctgcagcatgttgatgaacggtcagaggagaatttgctggggcatttgggagttacctgagggaagctagaccctttatgtctctcaggagccctggatcatggggcactgccaatccaagcaggcttcctggagatgatgggctacagagacaaaattgaagggagactacaggaaagggttggcctgcctgaaagaaggcctggccagggcgtcaccccgtcctctgatcctcaccctaggaagctgatccagttcgggcttatgaagaacctcatcaggcgactacagaagtatcctgtgcgggtgactcgggaagagcagagccaccctgcccggctttatacaggctgccacagctatgacgagatctgctgcaagacaggcatgagctaccatgagctggatgagcggcttgaaaatgaccccaacatcatcatctgctggaagtgaggctggtagtgactggatggacacattgctgtgggtagtccctcctactaggaggcttgtcatactgtctagaggttgactcttagttctgtaaataaagacatccatttcaaaca

SEQ ID NO: 292557 - DNA, 2659 bp, Homo sapiens
  misc_feature (4)..(4): n is a, c, g, or t
  misc_feature (7)..(9): n is a, c, g, or t
ggcncgnnnagcgtgaatcccttagcgcaccgcctccccaagtgctgccagcatgctgcccctccacgctagggacttgcctgcctctgccgcagcgcagatctgatgcggtggtttcctccaaagaaagcgggatactccgggccctgccgcgcgcaccgccgctccgtcacggagccgctttacttccgggtgcgacgtctacccacccaggacttcctgggacgagccgtcccccgccccagccacgcctctgagtcgcgctgcgcaggcgccattgggcagagggattggcaagcttgcgtgccccagcgacacaggcctcgaggctgtctctgacaagtgttcacaggaggtggggacgcctctgcgcgaggaacgaggagctacgggcctgggcccggttattgccatgggcagcggctgccgcatcgaatgcatattcttcagcgagttccaccccacgctgggacccaagatcacctatcaggtgccacccgggctcgcgggactgggcgggaagagggacgttctcgagagctcaactggctgcctgaaggcagtagtttcccgtgctgcacgcaggcatgctgcttcattcgcagacaactgtgaggctagaggatagtcagacccaggcccccggctcccaatgtggcagggaagacatacgtcacattggcagtgtttgtaggatatcgggctgtagggatccggttggggggttccaggtcccacagaaggtgagttgggtgacccatgagtatccctgaactgagtgaagagtaaatgatgcataggaagtttaggtaaggcaggagaaagtgttccaggtagagggaacagcatatgcagaagccaggaaggaggtgagatcatagcgtatgtttggaaacagaaagaagtaataggcctgagtggatgggagagaggggaacgctggagaagaggacttgggcttggggggcatgaggaggtcaccatttgtactacacccagtacagatgtccactgaggggcccattgccactcccctccccaggtccctgaagacttcatctcccgagagctgtttgacacagtccaagtgtacatcatcaccaagccagagctgcagaacaagcttatcactgtcacagctatggaaaagaagctgatcggctgtcctgtgtgcatcgaacacaagaagtacagccgcaatgctctcctcttcaacctgggcttcgtgtgtgatgcccaggccaagacctgcgccctcgagcccattgttaaaaagctggctggctatctgaccacactagagtctgcaatgagatgggcttgggtttaccgacaggcagagttggggaaggtgttcccatgtctccaaagtcccccaaacctgggaccctgcaaaccagctcaggactcagggcagccaaccagccaggggtcctgggatgtgcccaccatgctttccatgctctgtctagcctagagagcagcttcgtgtccatggaggagagcaagcagaagttggtgcccatcatgaccatcttgctggaggagctaaatgcctcaggccggtgcactctgcccattgatgagtccaacaccatccacttgaaggtgattgagcagcggccagaccctccggtggcccaggagtatgatgtacctgtctttaccaaagacaaggaggatttcttcaactcacagtgggacctcactacacaacaaatcctgccctacattgatgggttccgccacatccagaagatttcagcagaggcagatgtggagctcaacctggtgcgcattgctatccagaacctgctgtactacggcgttgtgacactggtgtccatcctccagtactccaatgtatactgcccaacgcccaaggtccaggacctggtagatgacaagtccctgcaagaggcatgtctatcctacgtgaccaagcaagggcacaagagggccagtctccgggatgtgttccagctatactgcagcctgagccctggcactaccgtgcgagacctcattggccgccacccccagcagctgcagcatgttgatgaacggaagctgatccagttcgggcttatgaagaacctcatcaggcgactacagaagtatcctgtgcgggtgactcgggaagagcagagccaccctgcccggctttatacaggctgccacagctatgacgagatctgctgcaagacaggcatgagctaccatgagctggatgagcggcttgaaaatgaccccaacatcatcatctgctggaagtgaggctggtagtgactggatggacacattgctgtgggtagtccctcctactaggaggcttgtcatactgtctagaggttgactcttagttctgtaaataaagacatccatttcaaacaaaaaaaaaaaaaaaaaacctcgtgccgaattcggcacgaggttttttttttttttttttttgagaatccagctttgacctttattcaagagaccagatgggttgccccaggatccggctgccagccctgaggccaagcacggctggagacccacgacctggcctgccgttgccctgagctgcagcctcggccccaggatcctgctcacagtcaccgcaggtgcaggcaggaagcagccctgggggactggacgctgctattgattc

SEQ ID NO: 292558 - DNA, 2181 bp, Homo sapiens
  misc_feature (4)..(4): n is a, c, g, or t
  misc_feature (7)..(9): n is a, c, g, or t
ggcncgnnnagcgtgaatcccttagcgcaccgcctccccaagtgctgccagcatgctgcccctccacgctagggacttgcctgcctctgccgcagcgcagatctgatgcggtggtttcctccaaagaaagcgggatactccgggccctgccgcgcgcaccgccgctccgtcacggagccgctttacttccgggtgcgacgtctacccacccaggacttcctgggacgagccgtcccccgccccagccacgcctctgagtcgcgctgcgcaggcgccattgggcagagggattggcaagcttgcgtgccccagcgacacaggcctcgaggctgtctctgacaagtgttcacaggaggtggggacgcctctgcgcgaggaacgaggagctacgggcctgggcccggttattgccatgggcagcggctgccgcatcgaatgcatattcttcagcgagttccaccccacgctgggacccaagatcacctatcaggtgccacccgggctcgcgggactgggcgggaagagggacgttctcgagagctcaactggctgcctgaaggcagtagtttcccgtgctgcacgcaggcatgctgcttcattcgcagacaactgtgaggctagaggatagtcagacccaggcccccggctcccaatgtggcagggaagacatacgtcacattggcagtgtttgtaggatatcgggctgtagggatccggttggggggttccaggtcccacagaaggtgagttgggtgacccatgagtatccctgaactgagtgaagagtaaatgatgcataggaagtttaggtaaggcaggagaaagtgttccaggtagagggaacagcatatgcagaagccaggaaggaggtgagatcatagcgtatgtttggaaacagaaagaagtaataggcctgagtggatgggagagaggggaacgctggagaagaggacttgggcttggggggcatgaggaggtcaccatttgtactacacccagtacagatgtccactgaggggcccattgccactcccctccccaggtccctgaagacttcatctcccgagagctgtttgacacagtccaagtgtacatcatcaccaagccagagctgcagaacaagcttatcactgtcacagctatggaaaagaagctgatcggctgtcctgtgtgcatcgaacacaagaagtacagccgcaatgctctcctcttcaacctgggcttcgtgtgtgatgcccaggccaagacctgcgccctcgagcccattgttaaaaagctggctggctatctgaccacactagagtctgcaatgagatgggcttgggtttaccgacaggcagagttggggaaggtgttcccatgtctccaaagtcccccaaacctgggaccctgcaaaccagctcaggactcagggcagccaaccagccaggggtcctgggatgtgcccaccatgctttccatgctctgtctagcctagagagcagcttcgtgtccatggaggagagcaagcagaagttggtgcccatcatgaccatcttgctggaggagctaaatgcctcaggccggtgcactctgcccattgatgagtccaacaccatccacttgaaggtgattgagcagcggccagaccctccggtggcccaggagtatgatgtacctgtctttaccaaagacaaggaggatttcttcaactcacagtgggacctcactacacaacaaatcctgccctacattgatgggttccgccacatccagaagatttcagcagaggcagatgtggagctcaacctggtgcgcattgctatccagaacctgctgtactacggcgttgtgacactggtgtccatcctccaggaagctgatccagttcgggcttatgaagaacctcatcaggcgactacagaagtatcctgtgcgggtgactcgggaagagcagagccaccctgcccggctttatacaggctgccacagctatgacgagatctgctgcaagacaggcatgagctaccatgagctggatgagcggcttgaaaatgaccccaacatcatcatctgctggaagtgaggctggtagtgactggatggacacattgctgtgggtagtccctcctactaggaggcttgtcatactgtctagaggttgactcttagttctgtaaataaagacatccatttcaaaca

SEQ ID NO: 292559 - DNA, 2155 bp, Homo sapiens
  misc_feature (4)..(4): n is a, c, g, or t
  misc_feature (7)..(9): n is a, c, g, or t
ggcncgnnnagcgtgaatcccttagcgcaccgcctccccaagtgctgccagcatgctgcccctccacgctagggacttgcctgcctctgccgcagcgcagatctgatgcggtggtttcctccaaagaaagcgggatactccgggccctgccgcgcgcaccgccgctccgtcacggagccgctttacttccgggtgcgacgtctacccacccaggacttcctgggacgagccgtcccccgccccagccacgcctctgagtcgcgctgcgcaggcgccattgggcagagggattggcaagcttgcgtgccccagcgacacaggcctcgaggctgtctctgacaagtgttcacaggaggtggggacgcctctgcgcgaggaacgaggagctacgggcctgggcccggttattgccatgggcagcggctgccgcatcgaatgcatattcttcagcgagttccaccccacgctgggacccaagatcacctatcaggtgccacccgggctcgcgggactgggcgggaagagggacgttctcgagagctcaactggctgcctgaaggcagtagtttcccgtgctgcacgcaggcatgctgcttcattcgcagacaactgtgaggctagaggatagtcagacccaggcccccggctcccaatgtggcagggaagacatacgtcacattggcagtgtttgtaggatatcgggctgtagggatccggttggggggttccaggtcccacagaaggtgagttgggtgacccatgagtatccctgaactgagtgaagagtaaatgatgcataggaagtttaggtaaggcaggagaaagtgttccaggtagagggaacagcatatgcagaagccaggaaggaggtgagatcatagcgtatgtttggaaacagaaagaagtaataggcctgagtggatgggagagaggggaacgctggagaagaggacttgggcttggggggcatgaggaggtcaccatttgtactacacccagtacagatgtccactgaggggcccattgccactcccctccccaggtccctgaagacttcatctcccgagagctgtttgacacagtccaagtgtacatcatcaccaagccagagctgcagaacaagcttatcactgtcacagctatggaaaagaagctgatcggctgtcctgtgtgcatcgaacacaagaagtacagccgcaatgctctcctcttcaacctgggcttcgtgtgtgatgcccaggccaagacctgcgccctcgagcccattgttaaaaagctggctggctatctgaccacactagagtctgcaatgagatgggcttgggtttaccgacaggcagagttggggaaggtgttcccatgtctccaaagtcccccaaacctgggaccctgcaaaccagctcaggactcagggcagccaaccagccaggggtcctgggatgtgcccaccatgctttccatgctctgtctagcctagagagcagcttcgtgtccatggaggagagcaagcagaagttggtgcccatcatgaccatcttgctggaggagctaaatgcctcaggccggtgcactctgcccattgatgagtccaacaccatccacttgaaggtgattgagcagcggccagaccctccggtggcccaggagtatgatgtacctgtctttaccaaagacaaggaggatttcttcaactcacagtgggacctcactacacaacaaatcctgccctacattgatgggttccgccacatccagaagatttcagcagaggcagatgtggagctcaacctggtactacggcgttgtgacactggtgtccatcctccaggaagctgatccagttcgggcttatgaagaacctcatcaggcgactacagaagtatcctgtgcgggtgactcgggaagagcagagccaccctgcccggctttatacaggctgccacagctatgacgagatctgctgcaagacaggcatgagctaccatgagctggatgagcggcttgaaaatgaccccaacatcatcatctgctggaagtgaggctggtagtgactggatggacacattgctgtgggtagtccctcctactaggaggcttgtcatactgtctagaggttgactcttagttctgtaaataaagacatccatttcaaaca

SEQ ID NO: 292560 - DNA, 3424 bp, Homo sapiens
  misc_feature (4)..(4): n is a, c, g, or t
  misc_feature (7)..(9): n is a, c, g, or t
ggcncgnnnagcgtgaatcccttagcgcaccgcctccccaagtgctgccagcatgctgcccctccacgctagggacttgcctgcctctgccgcagcgcagatctgatgcggtggtttcctccaaagaaagcgggatactccgggccctgccgcgcgcaccgccgctccgtcacggagccgctttacttccgggtgcgacgtctacccacccaggacttcctgggacgagccgtcccccgccccagccacgcctctgagtcgcgctgcgcaggcgccattgggcagagggattggcaagcttgcgtgccccagcgacacaggcctcgaggctgtctctgacaagtgttcacaggaggtggggacgcctctgcgcgaggaacgaggagctacgggcctgggcccggttattgccatgggcagcggctgccgcatcgaatgcatattcttcagcgagttccaccccacgctgggacccaagatcacctatcaggtgccacccgggctcgcgggactgggcgggaagagggacgttctcgagagctcaactggctgcctgaaggcagtagtttcccgtgctgcacgcaggcatgctgcttcattcgcagacaactgtgaggctagaggatagtcagacccaggcccccggctcccaatgtggcagggaagacatacgtcacattggcagtgtttgtaggatatcgggctgtagggatccggttggggggttccaggtcccacagaaggtgagttgggtgacccatgagtatccctgaactgagtgaagagtaaatgatgcataggaagtttaggtaaggcaggagaaagtgttccaggtagagggaacagcatatgcagaagccaggaaggaggtgagatcatagcgtatgtttggaaacagaaagaagtaataggcctgagtggatgggagagaggggaacgctggagaagaggacttgggcttggggggcatgaggaggtcaccatttgtactacacccagtacagatgtccactgaggggcccattgccactcccctccccaggtccctgaagacttcatctcccgagagctgtttgacacagtccaagtgtacatcatcaccaagccagagctgcagaacaagcttatcactgtcacagctatggaaaagaagctgatcggctgtcctgtgtgcatcgaacacaagaagtacagccgcaatgctctcctcttcaacctgggcttcgtgtgtgatgcccaggccaagacctgcgccctcgagcccattgttaaaaagctggctggctatctgaccacactagagtctgcaatgagatgggcttgggtttaccgacaggcagagttggggaaggtgttcccatgtctccaaagtcccccaaacctgggaccctgcaaaccagctcaggactcagggcagccaaccagccaggggtcctgggatgtgcccaccatgctttccatgctctgtctagcctagagagcagcttcgtgtccatggaggagagcaagcagaagttggtgcccatcatgaccatcttgctggaggagctaaatgcctcaggccggtgcactctgcccattgatgagtccaacaccatccacttgaaggtgattgagcagcggccagaccctccggtggcccaggagtatgatgtacctgtctttaccaaagacaaggaggatttcttcaactcacagtgggacctcactacacaacaaatcctgccctacattgatgggttccgccacatccagaagatttcagcagaggcagatgtggagctcaacctggtgcgcattgctatccagaacctgctgtactacggcgttgtgacactggtgtccatcctccagtactccaatgtatactgcccaacgcccaaggtccaggacctggtagatgacaagtccctgcaagaggcatgtctatcctacgtgaccaagcaagggcacaagagggccagtctccgggatgtgttccagctatactgcagcctgagccctggcactaccgtgcgagacctcattggccgccacccccagcagctgcagcatgttgatgaacggaagctgatccagttcgggcttatgaagaacctcatcaggcgactacagaagtatcctgtgcgggtgactcgggaagagcagagccaccctgcccggctttatacaggctgccacagctatgacgagatctgctgcaagacaggtggaggcaggcgggcagtcagggtgggttcagggcagggtggccaggccaaggccactgacctctcctccaccaccccacccaggcatgagctaccatgagctggatgagcggcttgaaaatgaccccaacatcatcatctgctggaagtgaggctggtagtgactggatggacacattgctgtgggtagtccctcctactaggaggcttgtcatactgtctagaggttgactcttagttctgtaaataaagacatccatttcaaacaaaaaaaaaaaaaaaaaaaaaaaaaaaaaaaaaaaaaaaaaaaaaaaggggggggggcacgaaataaaaatcgccacgagagaggagcggaaaagaggacagcgcccagcacgcatgtagggaaaaggaggggcgccaactaggggggcggcaatacaccagaggaggggaagggcggcaaaacaagggtgacgcggggaacacgacgcgcgggggcaaccggatggcgaagacacgccaccacacaggggggagcggacacacgggggggaccaacatcaccgcaagctaattgcaccagacggagttaacacaatagactaagggggggctagggggggaggcacaccaccagccgagagtgaaagggccgcgtgcacgagaaagcataggcgctgacccgacgcgagcgtcgtgcctgcacaccaaactattcccaaccgcgccggggcgtgatataaaaacaggcgacgctacaaaagaacaagacgagcgccgtgcacgagtgattagaacgagaacggacaacgaggaaccgcagcaagagagcgacagacaagcacgacgcagacgaaccgaccgctgacaggacgcaagactagtgaaatcaacgactaattgtagaatgaagagtgatatatataaataatcactacatgaaagcacgctaacaaatagaaaacatatagtacacactaaatagcagtctagacagaacataataaaaaagaaacaataaaaagaataataaaaacacaataaacaacacagatataccatggaacagatataaaatagagtcatatattagttcatatgaacataagaatacaaagatatactcaataacaacaaaatcaataatacagtgaagaatattaagattctaatcactataaaccttaaaaaatacagtgtaatacttactcatagacaaacatagtcaa

SEQ ID NO: 292561 - DNA, 2605 bp, Homo sapiens
  misc_feature (4)..(4): n is a, c, g, or t
  misc_feature (7)..(9): n is a, c, g, or t
ggcncgnnnagcgtgaatcccttagcgcaccgcctccccaagtgctgccagcatgctgcccctccacgctagggacttgcctgcctctgccgcagcgcagatctgatgcggtggtttcctccaaagaaagcgggatactccgggccctgccgcgcgcaccgccgctccgtcacggagccgctttacttccgggtgcgacgtctacccacccaggacttcctgggacgagccgtcccccgccccagccacgcctctgagtcgcgctgcgcaggcgccattgggcagagggattggcaagcttgcgtgccccagcgacacaggcctcgaggctgtctctgacaagtgttcacaggaggtggggacgcctctgcgcgaggaacgaggagctacgggcctgggcccggttattgccatgggcagcggctgccgcatcgaatgcatattcttcagcgagttccaccccacgctgggacccaagatcacctatcaggtgccacccgggctcgcgggactgggcgggaagagggacgttctcgagagctcaactggctgcctgaaggcagtagtttcccgtgctgcacgcaggcatgctgcttcattcgcagacaactgtgaggctagaggatagtcagacccaggcccccggctcccaatgtggcagggaagacatacgtcacattggcagtgtttgtaggatatcgggctgtagggatccggttggggggttccaggtcccacagaaggtgagttgggtgacccatgagtatccctgaactgagtgaagagtaaatgatgcataggaagtttaggtaaggcaggagaaagtgttccaggtagagggaacagcatatgcagaagccaggaaggaggtgagatcatagcgtatgtttggaaacagaaagaagtaataggcctgagtggatgggagagaggggaacgctggagaagaggacttgggcttggggggcatgaggaggtcaccatttgtactacacccagtacagatgtccactgaggggcccattgccactcccctccccaggtccctgaagacttcatctcccgagagctgtttgacacagtccaagtgtacatcatcaccaagccagagctgcagaacaagcttatcactgtcacagctatggaaaagaagctgatcggctgtcctgtgtgcatcgaacacaagaagtacagccgcaatgctctcctcttcaacctgggcttcgtgtgtgatgcccaggccaagacctgcgccctcgagcccattgttaaaaagctggctggctatctgaccacactagagctagagagcagcttcgtgtccatggaggagagcaagcagaagttggtgcccatcatgaccatcttgctggaggagctaaatgcctcaggccggtgcactctgcccattgatgagtccaacaccatccacttgaaggtgattgagcagcggccagaccctccggtggcccaggagtatgatgtacctgtctttaccaaagacaaggaggatttcttcaactcacagtgggacctcactacacaacaaatcctgccctacattgatgggttccgccacatccagaagatttcagcagaggcagatgtggagctcaacctggtgcgcattgctatccagaacctgctgtactacggcgttgtgacactggtgtccatcctccagtactccaatgtatactgcccaacgcccaaggtccaggacctggtagatgacaagtccctgcaagaggcatgtctatcctacgtgaccaagcaaggtagtggtgggttctgggggaagccatcttggggagggcagggccacatgatgagctgatccctggcacccacagggcacaagagggccagtctccgggatgtgttccagctatactgcagcctgagccctggcactaccgtgcgagacctcattggccgccacccccagcagctgcagcatgttgatgaacggtcagaggagaatttgctggggcatttgggagttacctgagggaagctagaccctttatgtctctcaggagccctggatcatggggcactgccaatccaagcaggcttcctggagatgatgggctacagagacaaaattgaagggagactacaggaaagggttggcctgcctgaaagaaggcctggccagggcgtcaccccgtcctctgatcctcaccctaggaagctgatccagttcgggcttatgaagaacctcatcaggcgactacagaagtatcctgtgcgggtgactcgggaagagcagagccaccctgcccggctttatacaggctgccacagctatgacgagatctgctgcaagacaggtggaggcaggcgggcagtcagggtgggttcagggcagggtggccaggccaaggccactgacctctcctccaccaccccacccaggcatgagctaccatgagctggatgagcggcttgaaaatgaccccaacatcatcatctgctggaagtgaggctggtagtgactggatggacacattgctgtgggtagtccctcctactaggaggcttgtcatactgtctagaggttgactcttagttctgtaaataaagacatccatttcaaaca

SEQ ID NO: 292562 - DNA, 2022 bp, Homo sapiens
  misc_feature (4)..(4): n is a, c, g, or t
  misc_feature (7)..(9): n is a, c, g, or t
ggcncgnnnagcgtgaatcccttagcgcaccgcctccccaagtgctgccagcatgctgcccctccacgctagggacttgcctgcctctgccgcagcgcagatctgatgcggtggtttcctccaaagaaagcgggatactccgggccctgccgcgcgcaccgccgctccgtcacggagccgctttacttccgggtgcgacgtctacccacccaggacttcctgggacgagccgtcccccgccccagccacgcctctgagtcgcgctgcgcaggcgccattgggcagagggattggcaagcttgcgtgccccagcgacacaggcctcgaggctgtctctgacaagtgttcacaggaggtggggacgcctctgcgcgaggaacgaggagctacgggcctgggcccggttattgccatgggcagcggctgccgcatcgaatgcatattcttcagcgagttccaccccacgctgggacccaagatcacctatcaggtgccacccgggctcgcgggactgggcgggaagagggacgttctcgagagctcaactggctgcctgaaggcagtagtttcccgtgctgcacgcaggcatgctgcttcattcgcagacaactgtgaggctagaggatagtcagacccaggcccccggctcccaatgtggcagggaagacatacgtcacattggcagtgtttgtaggatatcgggctgtagggatccggttggggggttccaggtcccacagaaggtgagttgggtgacccatgagtatccctgaactgagtgaagagtaaatgatgcataggaagtttaggtaaggcaggagaaagtgttccaggtagagggaacagcatatgcagaagccaggaaggaggtgagatcatagcgtatgtttggaaacagaaagaagtaataggcctgagtggatgggagagaggggaacgctggagaagaggacttgggcttggggggcatgaggaggtcaccatttgtactacacccagtacagatgtccactgaggggcccattgccactcccctccccaggtccctgaagacttcatctcccgagagctgtttgacacagtccaagtgtacatcatcaccaagccagagctgcagaacaagcttatcactgtcacagctatggaaaagaagctgatcggctgtcctgtgtgcatcgaacacaagaagtacagccgcaatgctctcctcttcaacctgggcttcgtgtgtgatgcccaggccaagacctgcgccctcgagcccattgttaaaaagctggctggctatctgaccacactagagctagagagcagcttcgtgtccatggaggagagcaagcagaagttggtgcccatcatgaccatcttgctggaggagctaaatgcctcaggccggtgcactctgcccattgatgagtccaacaccatccacttgaaggtgattgagcagcggccagaccctccggtggcccaggagtatgatgtacctgtctttaccaaagacaaggaggatttcttcaactcacagtgggacctcactacacaacaaatcctgccctacattgatgggttccgccacatccagaagatttcagcagaggcagatgtggagctcaacctggtgcgcattgctatccagaacctgctgtactacggcgttgtgacactggtgtccatcctccagtactccaatgtatactgcccaacgcccaaggtccaggacctggtagatgacaagtccctgcaagaggcatgtctatcctacgtgaccaagcaagggcacaagagggccagtctccgggatgtgttccactatgacgagatctgctgcaagacaggcatgagctaccatgagctggatgagcggcttgaaaatgaccccaacatcatcatctgctggaagtgaggctggtagtgactggatggacacattgctgtgggtagtccctcctactaggaggcttgtcatactgtctagaggttgactcttagttctgtaaataaagacatccatttcaaaca

SEQ ID NO: 292563 - DNA, 2225 bp, Homo sapiens
  misc_feature (4)..(4): n is a, c, g, or t
  misc_feature (7)..(9): n is a, c, g, or t
ggcncgnnnagcgtgaatcccttagcgcaccgcctccccaagtgctgccagcatgctgcccctccacgctagggacttgcctgcctctgccgcagcgcagatctgatgcggtggtttcctccaaagaaagcgggatactccgggccctgccgcgcgcaccgccgctccgtcacggagccgctttacttccgggtgcgacgtctacccacccaggacttcctgggacgagccgtcccccgccccagccacgcctctgagtcgcgctgcgcaggcgccattgggcagagggattggcaagcttgcgtgccccagcgacacaggcctcgaggctgtctctgacaagtgttcacaggaggtggggacgcctctgcgcgaggaacgaggagctacgggcctgggcccggttattgccatgggcagcggctgccgcatcgaatgcatattcttcagcgagttccaccccacgctgggacccaagatcacctatcaggtgccacccgggctcgcgggactgggcgggaagagggacgttctcgagagctcaactggctgcctgaaggcagtagtttcccgtgctgcacgcaggcatgctgcttcattcgcagacaactgtgaggctagaggatagtcagacccaggcccccggctcccaatgtggcagggaagacatacgtcacattggcagtgtttgtaggatatcgggctgtagggatccggttggggggttccaggtcccacagaaggtgagttgggtgacccatgagtatccctgaactgagtgaagagtaaatgatgcataggaagtttaggtaaggcaggagaaagtgttccaggtagagggaacagcatatgcagaagccaggaaggaggtgagatcatagcgtatgtttggaaacagaaagaagtaataggcctgagtggatgggagagaggggaacgctggagaagaggacttgggcttggggggcatgaggaggtcaccatttgtactacacccagtacagatgtccactgaggggcccattgccactcccctccccaggtccctgaagacttcatctcccgagagctgtttgacacagtccaagtgtacatcatcaccaagccagagctgcagaacaagcttatcactgtcacagctatggaaaagaagctgatcggctgtcctgtgtgcatcgaacacaagaagtacagccgcaatgctctcctcttcaacctgggcttcgtgtgtgatgcccaggccaagacctgcgccctcgagcccattgttaaaaagctggctggctatctgaccacactagagtctgcaatgagatgggcttgggtttaccgacaggcagagttggggaaggtgttcccatgtctccaaagtcccccaaacctgggaccctgcaaaccagctcaggactcagggcagccaaccagccaggggtcctgggatgtgcccaccatgctttccatgctctgtctagcctagagagcagcttcgtgtccatggaggagagcaagcagaagttggtgcccatcatgaccatcttgctggaggagctaaatgcctcaggccggtgcactctgcccattgatgagtccaacaccatccacttgaaggtgattgagcagcggccagaccctccggtggcccaggagtatgatgtacctgtctttaccaaagacaaggaggatttcttcaactcacagtgggacctcactacacaacaaatcctgccctacattgatgggttccgccacatccagaagatttcagcagaggcagatgtggagctcaacctggtgcgcattgctatccagaacctgctgtgagtgggcctacagtcatacctgggacaaggtcaccagccagggaagacctcaggggccctgggtgtgagggttgggaaggcatggtcctcagaagctgagcacagctctctctctcaggtactacggcgttgtgacactggtgtccatcctccagagcagagccaccctgcccggctttatacaggctgccacagctatgacgagatctgctgcaagacaggcatgagctaccatgagctggatgagcggcttgaaaatgaccccaacatcatcatctgctggaagtgaggctggtagtgactggatggacacattgctgtgggtagtccctcctactaggaggcttgtcatactgtctagaggttgactcttagttctgtaaataaagacatccatttcaaaca

SEQ ID NO: 292564 - DNA, 3171 bp, Homo sapiens
  misc_feature (4)..(4): n is a, c, g, or t
  misc_feature (7)..(9): n is a, c, g, or t
ggcncgnnnagcgtgaatcccttagcgcaccgcctccccaagtgctgccagcatgctgcccctccacgctagggacttgcctgcctctgccgcagcgcagatctgatgcggtggtttcctccaaagaaagcgggatactccgggccctgccgcgcgcaccgccgctccgtcacggagccgctttacttccgggtgcgacgtctacccacccaggacttcctgggacgagccgtcccccgccccagccacgcctctgagtcgcgctgcgcaggcgccattgggcagagggattggcaagcttgcgtgccccagcgacacaggcctcgaggctgtctctgacaagtgttcacaggaggtggggacgcctctgcgcgaggaacgaggagctacgggcctgggcccggttattgccatgggcagcggctgccgcatcgaatgcatattcttcagcgagttccaccccacgctgggacccaagatcacctatcaggtgccacccgggctcgcgggactgggcgggaagagggacgttctcgagagctcaactggctgcctgaaggcagtagtttcccgtgctgcacgcaggcatgctgcttcattcgcagacaactgtgaggctagaggatagtcagacccaggcccccggctcccaatgtggcagggaagacatacgtcacattggcagtgtttgtaggatatcgggctgtagggatccggttggggggttccaggtcccacagaaggtgagttgggtgacccatgagtatccctgaactgagtgaagagtaaatgatgcataggaagtttaggtaaggcaggagaaagtgttccaggtagagggaacagcatatgcagaagccaggaaggaggtgagatcatagcgtatgtttggaaacagaaagaagtaataggcctgagtggatgggagagaggggaacgctggagaagaggacttgggcttggggggcatgaggaggtcaccatttgtactacacccagtacagatgtccactgaggggcccattgccactcccctccccaggtccctgaagacttcatctcccgagagctgtttgacacagtccaagtgtacatcatcaccaagccagagctgcagaacaagcttatcactgtcacagctatggaaaagaagctgatcggctgtcctgtgtgcatcgaacacaagaagtacagccgcaatgctctcctcttcaacctgggcttcgtgtgtgatgcccaggccaagacctgcgccctcgagcccattgttaaaaagctggctggctatctgaccacactagagtctgcaatgagatgggcttgggtttaccgacaggcagagttggggaaggtgttcccatgtctccaaagtcccccaaacctgggaccctgcaaaccagctcaggactcagggcagccaaccagccaggggtcctgggatgtgcccaccatgctttccatgctctgtctagcctagagagcagcttcgtgtccatggaggagagcaagcagaagttggtgcccatcatgaccatcttgctggaggagctaaatgcctcaggccggtgcactctgcccattgatgagtccaacaccatccacttgaaggtgattgagcagcggccagaccctccggtggcccaggagtatgatgtacctgtctttaccaaagacaaggaggatttcttcaactcacagtgggacctcactacacaacaaatcctgccctacattgatgggttccgccacatccagaagatttcagcagaggcagatgtggagctcaacctggtgcgcattgctatccagaacctgctgtgagtgggcctacagtcatacctgggacaaggtcaccagccagggaagacctcaggggccctgggtgtgagggttgggaaggcatggtcctcagaagctgagcacagctctctctctcaggtactacggcgttgtgacactggtgtccatcctccagagcagagccaccctgcccggctttatacaggctgccacagctatgacgagatctgctgcaagacaggcatgagctaccatgagctggatgagcggcttgaaaatgaccccaacatcatcatctgctggaagtgaggctggtagtgactggatggacacattgctgtgggtagtccctcctactaggaggcttgtcatactgtctagaggttgactcttagttctgtaaataaagacatccatttcaaacaaaaaaaaaaaaaaaaaaaaaaaaaaaaaaaaaaaaaaaaaaaaaaaggggggggggcacgaaataaaaatcgccacgagagaggagcggaaaagaggacagcgcccagcacgcatgtagggaaaaggaggggcgccaactaggggggcggcaatacaccagaggaggggaagggcggcaaaacaagggtgacgcggggaacacgacgcgcgggggcaaccggatggcgaagacacgccaccacacaggggggagcggacacacgggggggaccaacatcaccgcaagctaattgcaccagacggagttaacacaatagactaagggggggctagggggggaggcacaccaccagccgagagtgaaagggccgcgtgcacgagaaagcataggcgctgacccgacgcgagcgtcgtgcctgcacaccaaactattcccaaccgcgccggggcgtgatataaaaacaggcgacgctacaaaagaacaagacgagcgccgtgcacgagtgattagaacgagaacggacaacgaggaaccgcagcaagagagcgacagacaagcacgacgcagacgaaccgaccgctgacaggacgcaagactagtgaaatcaacgactaattgtagaatgaagagtgatatatataaataatcactacatgaaagcacgctaacaaatagaaaacatatagtacacactaaatagcagtctagacagaacataataaaaaagaaacaataaaaagaataataaaaacacaataaacaacacagatataccatggaacagatataaaatagagtcatatattagttcatatgaacataagaatacaaagatatactcaataacaacaaaatcaataatacagtgaagaatattaagattctaatcactataaaccttaaaaaatacagtgtaatacttactcatagacaaacatagtcaa

SEQ ID NO: 292565 - DNA, 2351 bp, Homo sapiens
cggggcgcggagccccagccgagcctagccctgcccggccccggaggacttgcaacactccgaggccaggaacgctccgtctggaacggcgcaggtcccagcagctggggttccccctcagcccgtgagcagccatgtccaaccccagcgccccaccaccatatgaagaccgcaaccccctgtacccaggccctctgccccctgggggctatgggcagccatctgtcctgccaggagggtatcctgcctaccctggctacccgcagcctggctacggtcaccctgctggctacccacagcccatgccccccacccacccgatgcccatgaactacggcccaggccatggctatgatggggaggagagagcggtgagtgatagcttcgggcctggagagtgggatgaccggaaagtgcgacacacttttatccgaaaggtttactccatcatctccgtgcagctgctcatcactgtggccatcattgctatcttcacctttgtggaacctgtcagcgcctttgtgaggagaaatgtggctgtctactacgtgtcctatgctgtcttcgttgtcacctacctgatccttgcctgctgccagggacccagacgccgtttcccatggaacatcattctgctgaccctttttacttttgccatgggcttcatgacgggcaccatttccagtatgtaccaaaccaaagccgtcatcattgcaatgatcatcactgcggtggtatccatttcagtcaccatcttctgctttcagaccaaggtggacttcacctcgtgcacaggcctcttctgtgtcctgggaattgtgctcctggtgactgggattgtcactagcattgtgctctacttccaatacgtttactggctccacatgctctatgctgctctgggggccatttgtttcaccctgttcctggcttacgacacacagctggtcctggggaaccggaagcacaccatcagccccgaggactacatcactggcgccctgcagatttacacagacatcatctacatcttcacctttgtgctgcagctgatgggggatcgcaattaaggagcaagcccccattttcacccgatcctgggctctcccttccaagctagagggctgggccctatgactgtggtctgggctttaggcccctttccttccccttgagtaacatgcccagtttcctttctgtcctggagacaggtggcctctctggctatggatgtgtgggtacttggtggggacggaggagctagggactaactgttgctcttggtgggcttggcagggactaggctgaagatgtgtcttctccccgccacctactgtatgacaccacattcttcctaacagctggggttgtgaggaatatgaaaagagcctattcgatagctagaagggaatatgaaaggtagaagtgacttcaaggtcacgaggttcccctcccacctctgtcacaggcttcttgactacgtagttggagctatttcttcccccagcaaagccagagagctttgtccccggcctcctggacacataggccattatcctgtattcctttggcttggcatcttttagctcaggaaggtagaagagatctgtgcccatgggtctccttgcttcaatcccttcttgtttcagtgacatatgtattgtttatctgggttagggatgggggacagataatagaacgagcaaagtaacctatacaggccagcatggaacagcatctcccctgggcttgctcctggcttgtgacgctataagacagagcaggccacatgtggccatctgctccccattcttgaaagctgctggggcctccttgcaggcttctggatctctggtcagagtgaactcttgcttcctgtattcaggcagctcagagcagaaagtaaggggcagagtcatacgtgtggccaggaagtagccagggtgaagagagactcggtgcgggcagggagaatgcctgggggtccctcacctggctagggagataccgaagcctactgtggtactgaagacttctgggttctttccttctgctaacccagggagggtcctaagaggaaggtgacttctctctgtttgtcttaagttgcactgggggatttctgacttgaggcccatctctccagccagccactgccttctttgtaatattaagtgccttgagctggaatggggaagggggacaagggtcagtctgtcgggtgggggcagaaatcaaatcagcccaaggatatagttaggattaattacttaatagagaaatcctaactatatcacacaaagggatacaactataaatgtaataaaatttatgtctagaagttaaaaccc

SEQ ID NO: 292566 - DNA, 651 bp, Homo sapiens
gaaacgaaaaggaacaaataaggctagtagaggccggggtgaatcggcgaggctcctggcttgtgacgctataagacagagcaggccacatgtggccatctgctccccattcttgaaagctgctggggcctccttgcaggcttctggatctctggtcagagtgaactcttgcttcctgtattcaggcagctcagagcagaaagtaaggggcagagtcatacgtgtggccaggaagtagccagggtgaagagagactcggtgcgggcagggagaatgcctgggggtccctcacctggctagggagataccgaagcctactgtggtactgaagacttctgggttctttccttctgctaacccagggagggtcctaagaggaaggtgacttctctctgtttgtcttaagttgcactgggggatttctgacttgaggcccatctctccagccagccactgccttctttgtaatattaagtgccttgagctggaatggggaagggggacaagggtcagtctgtcgggtgggggcagaaatcaaatcagcccaaggatatagttaggattaattacttaatagagaaatcctaactatatcacacaaagggatacaactataaatgtaataaaatttatgtctagaagttaaaaccc

SEQ ID NO: 292567 - DNA, 1033 bp, Homo sapiens
attaggctaggtacgaggcctgcgtttaattcggccgaggcagccctctgccccctgggggctatgggcagccatctgtcctgccaggagggtatcctgcctaccctggctacccgcagcctggctacggtcaccctgctggctacccacagcccatgccccccacccacccgatgcccatgaactacggcccaggccatggctatgatggggaggagagagcggtgagtgatagcttcgggcctggagagtgggatgaccggaaagtgcgacacacttttatccgaaaggtttactccatcatctccgtgcagctgctcatcactgtggccatcattgctatcttcacctttgtggaacctgtcagcgcctttgtgaggagaaatgtggctgtctactacgtgtcctatgctgtcttcgttgtcacctacctgatccttgcctgctgccagggacccagacgccgtttcccatggaacatcattctgctgaccctttttacttttgccatgggcttcatgacgggcaccatttccagtatgtaccaaaccaaagccgtcatcattgcaatgatcatcactgcggtggtatccatttcagtcaccatcttctgctttcagaccaaggtggacttcacctcgtgcacaggcctcttctgtgtcctgggaattgtgctcctggtgactgggattgtcactagcattgtgctctacttccaatacgtttactggctccacatgctctatgctgctctgggggccatttgtttcaccctgttcctgcttacgacacaccagctggtctgggcaccggaggccacataagccggggttacttactgggcctgcggtttcccggcgtctctcatttcccttggcggcgtggtggggtcccctaggggcgccctttcccggctgggtcctccacgaagggggcccggaggtggggtagccctcccctggaagcgggctgtgggaggctctccgggggtgtgggggcgcgccccctgggggggggagtccccggcaccccg

SEQ ID NO: 292568 - DNA, 1181 bp, Homo sapiens
  misc_feature (735)..(736): n is a, c, g, or t
  misc_feature (762)..(762): n is a, c, g, or t
gtaaacactgaccctttccccctttgctgctacctaggcagatgccagccccaaacctcatccctagtggaggccttgctgatgtggaagtggccagggccctcatggaggctgggcagaagcccaagagcaggctctaaagctgccaaacccggcagccctggtccccggaggctcttgccagtctgacagtgttcttggcactgctcagaggtcccagcagctggggttccccctcagcccgtgagcagccatgtccaaccccagcgccccaccaccatatgaagaccgcaaccccctgtacccaggccctctgccccctgggggctatgggcagccatctgtcctgccaggagggtatcctgcctaccctggctacccgcagcctggctacggtcaccctgctggctacccacagcccatgccccccacccacccgatgcccatgaactacggcccaggccatggctatgatggggaggagagagcggtgagtgatagcttcgggcctggagagtgggatgaccggaaagtgcgacacacttttatccgaaaggtttactccatcatctccgtgcagctgctcatcactgtggccatcattgctatcttcacctttgtggaacctgtcagcgcctttgtgaggagaaatgtggctgtctactacgtgtcctatgctgtcttcgttgtcacctacctgatccttgcctgctgccagggacccagacgccgatnnccatggaacatcatactgctgacccnttaaacctatatgccaatgggcattcatgacgggcaaccatttccagtatgtacacaccaaagccgatcatcattgcaatgatcatacaactgccggtggtaatccatatcagtcaaccatcattactggcttcaagaccaaaggtggcattcacctcgtgacgaggccactctgtgtcttgtggacttggtgcccctcgataacctggcataggtcacacagcactcgtgccctacgtcccaagagaccggcacgtgggacacccacaagggacaaaacgcagaccggagcagcccacagagccacccccggccccgggcgccacaagacacaccgcgcgccctggcgagccgcggagcgaacgatgacgccccgaggaataatacaaaggggcccccagcaaggacagccacggcaa

SEQ ID NO: 292569 - DNA, 536 bp, Homo sapiens
ctgtgggtgagggctggggcacccggctgccgcatccagcagtgcccgggcaccgagacagctgagtaccagtcattgtgaggagaaatgtggctgtctactacgtgtcctatgctgtcttcgttgtcacctacctgatccttgcctgctgccagggacccagacgccgtttcccatggaacatcattctgctgaccctttttacttttgccatgggcttcatgacgggcaccatttccagtatgtaccaaaccaaagccgtcatcattgcaatgatcatcactgcggtggtatccatttcagtcaccatcttctgctttcagaccaaggtggacttcacctcgtgcacaggcctcttctgtgtcctgggaattgtgctcctggtgactgggattgtcactagcattgtgctctacttccaatacgtttactggctccacatgctctatgctgctctgggggccatttgtttcaccctgttcctggctcactacaactgcgctgcagtgagctacgatagtgccacggcactccaa

SEQ ID NO: 292570 - DNA, 550 bp, Homo sapiens
tgggtgtgcgtgcccagatgagtagcagacccctagaactcgagagcaagagtgggacctgctggtggtggcgtgcacgctgcgctgcagcccccatgtcctctcagcccgtcagctgcagcctccccagacctccttcctggccggagcctggtgcttcagagcatctcagtgaccctggctgggggtaatctcgttcttgcttcctgttgagttgcttcccctcagacttccaaacggctatttgggccccaaatcactggcctggtgtgtgctgccaagcggggcagatttgggcctgaactgcttccccatctctttgtccctagtgctgtcttcgttgtcacctacctgatccttgcctgctgccagggacccaggtgagtcccagagacttaacacagtgagaggggtgacagggattgggatgggggccgagtattttggaaagaaggattcctttatagcagctgaatggaaacttacaagaaatgaggaggaggatgacgatgacagctactgttcaggtgtatacaaaggaccatgtgtg

SEQ ID NO: 292571 - DNA, 537 bp, Homo sapiens
atggcagggagcatgggagcggggctgaggaagaagtgcacattgcctctgagccaggcatctcactggggtcgcctctgggccaggctgcagctagggagggttcttgagtgggaggaaagtactgggggctggcagcttcctggggcaggccaggggtgccggatggtgacccatgcccggccgtctgtgtccaggtttactccatcatctccgtgcagctgctcatcactgtggccatcattgctatcttcacctttgtggaacctgtcagcgcctttgtgaggagaaatgtggctgtctactacgtgtcctatgctgtcttcgttgtcacctacctgatccttgcctgctgccagggacccaggtgagtcccagagacttaacacagtgagaggggtgacagggattgggatgggggccgagtattttggaaagaaggattcctttatagcagctgaatggaaacttacaagaaatgaggaggaggatgacgatgacagctactgttcaggtgtatacaaaggaccatgtgtg

SEQ ID NO: 292572 - DNA, 333 bp, Homo sapiens
gtaaacactgaccctttccccctttgctgctacctaggcagatgccagccccaaacctcatccctagtggaggccttgctgatgtggaagtggccagggccctcatggaggctgggcagaagcccaagagcaggctctaaagctgccaaacccggcagccctggtccccggaggctcttgccagtctgacagtgttcttggcactgctcagaggtgagtgtggctgagtttagcaactcccctggctagcgttaatgctggggtttcctctcacggggaccaggccgccgggtttgcagctttagagcctgtcttggcttctgccagctccac

SEQ ID NO: 292573 - DNA, 2322 bp, Homo sapiens
aaatgccaggctggtacggcccgaggagtttatggatcaggaacgctccgtctggaacggcgcaggtcccagcagctggggttccccctcagcccgtgagcagccatgtccaaccccagcgccccaccaccatatgaagaccgcaaccccctgtacccaggccctctgccccctgggggctatgggcagccatctgtcctgccaggagggtatcctgcctaccctggctacccgcagcctggctacggtcaccctgctggctacccacagcccatgccccccacccacccgatgcccatgaactacggcccaggccatggctatgatggggaggagagagcggtgagtgatagcttcgggcctggagagtgggatgaccggaaagtgcgacacacttttatccgaaaggtttactccatcatctccgtgcagctgctcatcactgtggccatcattgctatcttcacctttgtggaacctgtcagcgcctttgtgaggagaaatgtggctgtctactacgtgtcctatgctgtcttcgttgtcacctacctgatccttgcctgctgccagggacccagacgccgtttcccatggaacatcattctgctgaccctttttacttttgccatgggcttcatgacgggcaccatttccagtatgtaccaaaccaaagccgtcatcattgcaatgatcatcactgcggtggtatccatttcagtcaccatcttctgctttcagaccaaggtggacttcacctcgtgcacaggcctcttctgtgtcctgggaattgtgctcctggtgactgggattgtcactagcattgtgctctacttccaatacgtttactggctccacatgctctatgctgctctgggggccatttgtttcaccctgttcctggcttacgacacacagctggtcctggggaaccggaagcacaccatcagccccgaggactacatcactggcgccctgcagatttacacagacatcatctacatcttcacctttgtgctgcagctgatgggggatcgcaattaaggagcaagcccccattttcacccgatcctgggctctcccttccaagctagagggctgggccctatgactgtggtctgggctttaggcccctttccttccccttgagtaacatgcccagtttcctttctgtcctggagacaggtggcctctctggctatggatgtgtgggtacttggtggggacggaggagctagggactaactgttgctcttggtgggcttggcagggactaggctgaagatgtgtcttctccccgccacctactgtatgacaccacattcttcctaacagctggggttgtgaggaatatgaaaagagcctattcgatagctagaagggaatatgaaaggtagaagtgacttcaaggtcacgaggttcccctcccacctctgtcacaggcttcttgactacgtagttggagctatttcttcccccagcaaagccagagagctttgtccccggcctcctggacacataggccattatcctgtattcctttggcttggcatcttttagctcaggaaggtagaagagatctgtgcccatgggtctccttgcttcaatcccttcttgtttcagtgacatatgtattgtttatctgggttagggatgggggacagataatagaacgagcaaagtaacctatacaggccagcatggaacagcatctcccctgggcttgctcctggcttgtgacgctataagacagagcaggccacatgtggccatctgctccccattcttgaaagctgctggggcctccttgcaggcttctggatctctggtcagagtgaactcttgcttcctgtattcaggcagctcagagcagaaagtaaggggcagagtcatacgtgtggccaggaagtagccagggtgaagagagactcggtgcgggcagggagaatgcctgggggtccctcacctggctagggagataccgaagcctactgtggtactgaagacttctgggttctttccttctgctaacccagggagggtcctaagaggaaggtgacttctctctgtttgtcttaagttgcactgggggatttctgacttgaggcccatctctccagccagccactgccttctttgtaatattaagtgccttgagctggaatggggaagggggacaagggtcagtctgtcgggtgggggcagaaatcaaatcagcccaaggatatagttaggattaattacttaatagagaaatcctaactatatcacacaaagggatacaactataaatgtaataaaatttatgtctagaagttaaaaccc

SEQ ID NO: 292574 - DNA, 2470 bp, Homo sapiens
gtaaacactgaccctttccccctttgctgctacctaggcagatgccagccccaaacctcatccctagtggaggccttgctgatgtggaagtggccagggccctcatggaggctgggcagaagcccaagagcaggctctaaagctgccaaacccggcagccctggtccccggaggctcttgccagtctgacagtgttcttggcactgctcagaggtcccagcagctggggttccccctcagcccgtgagcagccatgtccaaccccagcgccccaccaccatatgaagaccgcaaccccctgtacccaggccctctgccccctgggggctatgggcagccatctgtcctgccaggagggtatcctgcctaccctggctacccgcagcctggctacggtcaccctgctggctacccacagcccatgccccccacccacccgatgcccatgaactacggcccaggccatggctatgatggggaggagagagcggtgagtgatagcttcgggcctggagagtgggatgaccggaaagtgcgacacacttttatccgaaaggtttactccatcatctccgtgcagctgctcatcactgtggccatcattgctatcttcacctttgtggaacctgtcagcgcctttgtgaggagaaatgtggctgtctactacgtgtcctatgctgtcttcgttgtcacctacctgatccttgcctgctgccagggacccagacgccgtttcccatggaacatcattctgctgaccctttttacttttgccatgggcttcatgacgggcaccatttccagtatgtaccaaaccaaagccgtcatcattgcaatgatcatcactgcggtggtatccatttcagtcaccatcttctgctttcagaccaaggtggacttcacctcgtgcacaggcctcttctgtgtcctgggaattgtgctcctggtgactgggattgtcactagcattgtgctctacttccaatacgtttactggctccacatgctctatgctgctctgggggccatttgtttcaccctgttcctggcttacgacacacagctggtcctggggaaccggaagcacaccatcagccccgaggactacatcactggcgccctgcagatttacacagacatcatctacatcttcacctttgtgctgcagctgatgggggatcgcaattaaggagcaagcccccattttcacccgatcctgggctctcccttccaagctagagggctgggccctatgactgtggtctgggctttaggcccctttccttccccttgagtaacatgcccagtttcctttctgtcctggagacaggtggcctctctggctatggatgtgtgggtacttggtggggacggaggagctagggactaactgttgctcttggtgggcttggcagggactaggctgaagatgtgtcttctccccgccacctactgtatgacaccacattcttcctaacagctggggttgtgaggaatatgaaaagagcctattcgatagctagaagggaatatgaaaggtagaagtgacttcaaggtcacgaggttcccctcccacctctgtcacaggcttcttgactacgtagttggagctatttcttcccccagcaaagccagagagctttgtccccggcctcctggacacataggccattatcctgtattcctttggcttggcatcttttagctcaggaaggtagaagagatctgtgcccatgggtctccttgcttcaatcccttcttgtttcagtgacatatgtattgtttatctgggttagggatgggggacagataatagaacgagcaaagtaacctatacaggccagcatggaacagcatctcccctgggcttgctcctggcttgtgacgctataagacagagcaggccacatgtggccatctgctccccattcttgaaagctgctggggcctccttgcaggcttctggatctctggtcagagtgaactcttgcttcctgtattcaggcagctcagagcagaaagtaaggggcagagtcatacgtgtggccaggaagtagccagggtgaagagagactcggtgcgggcagggagaatgcctgggggtccctcacctggctagggagataccgaagcctactgtggtactgaagacttctgggttctttccttctgctaacccagggagggtcctaagaggaaggtgacttctctctgtttgtcttaagttgcactgggggatttctgacttgaggcccatctctccagccagccactgccttctttgtaatattaagtgccttgagctggaatggggaagggggacaagggtcagtctgtcgggtgggggcagaaatcaaatcagcccaaggatatagttaggattaattacttaatagagaaatcctaactatatcacacaaagggatacaactataaatgtaataaaatttatgtctagaagttaaaaccc

SEQ ID NO: 292575 - DNA, 2109 bp, Homo sapiens
cggggcgcggagccccagccgagcctagccctgcccggccccggaggacttgcaacactccgaggccaggaacgctccgtctggaacggcgcaggcccaggccatggctatgatggggaggagagagcggtgagtgatagcttcgggcctggagagtgggatgaccggaaagtgcgacacacttttatccgaaaggtttactccatcatctccgtgcagctgctcatcactgtggccatcattgctatcttcacctttgtggaacctgtcagcgcctttgtgaggagaaatgtggctgtctactacgtgtcctatgctgtcttcgttgtcacctacctgatccttgcctgctgccagggacccagacgccgtttcccatggaacatcattctgctgaccctttttacttttgccatgggcttcatgacgggcaccatttccagtatgtaccaaaccaaagccgtcatcattgcaatgatcatcactgcggtggtatccatttcagtcaccatcttctgctttcagaccaaggtggacttcacctcgtgcacaggcctcttctgtgtcctgggaattgtgctcctggtgactgggattgtcactagcattgtgctctacttccaatacgtttactggctccacatgctctatgctgctctgggggccatttgtttcaccctgttcctggcttacgacacacagctggtcctggggaaccggaagcacaccatcagccccgaggactacatcactggcgccctgcagatttacacagacatcatctacatcttcacctttgtgctgcagctgatgggggatcgcaattaaggagcaagcccccattttcacccgatcctgggctctcccttccaagctagagggctgggccctatgactgtggtctgggctttaggcccctttccttccccttgagtaacatgcccagtttcctttctgtcctggagacaggtggcctctctggctatggatgtgtgggtacttggtggggacggaggagctagggactaactgttgctcttggtgggcttggcagggactaggctgaagatgtgtcttctccccgccacctactgtatgacaccacattcttcctaacagctggggttgtgaggaatatgaaaagagcctattcgatagctagaagggaatatgaaaggtagaagtgacttcaaggtcacgaggttcccctcccacctctgtcacaggcttcttgactacgtagttggagctatttcttcccccagcaaagccagagagctttgtccccggcctcctggacacataggccattatcctgtattcctttggcttggcatcttttagctcaggaaggtagaagagatctgtgcccatgggtctccttgcttcaatcccttcttgtttcagtgacatatgtattgtttatctgggttagggatgggggacagataatagaacgagcaaagtaacctatacaggccagcatggaacagcatctcccctgggcttgctcctggcttgtgacgctataagacagagcaggccacatgtggccatctgctccccattcttgaaagctgctggggcctccttgcaggcttctggatctctggtcagagtgaactcttgcttcctgtattcaggcagctcagagcagaaagtaaggggcagagtcatacgtgtggccaggaagtagccagggtgaagagagactcggtgcgggcagggagaatgcctgggggtccctcacctggctagggagataccgaagcctactgtggtactgaagacttctgggttctttccttctgctaacccagggagggtcctaagaggaaggtgacttctctctgtttgtcttaagttgcactgggggatttctgacttgaggcccatctctccagccagccactgccttctttgtaatattaagtgccttgagctggaatggggaagggggacaagggtcagtctgtcgggtgggggcagaaatcaaatcagcccaaggatatagttaggattaattacttaatagagaaatcctaactatatcacacaaagggatacaactataaatgtaataaaatttatgtctagaagttaaaaccc

SEQ ID NO: 292576 - DNA, 2124 bp, Homo sapiens
tgggtgtgcgtgcccagatgagtagcagacccctagaactcgagagcaagagtgggacctgctggtggtggcgtgcacgctgcgctgcagcccccatgtcctctcagcccgtcagctgcagcctccccagacctccttcctggccggagcctggtgcttcagagcatctcagtgaccctggctgggggtaatctcgttcttgcttcctgttgagttgcttcccctcagacttccaaacggctatttgggccccaaatcactggcctggtgtgtgctgccaagcggggcagatttgggcctgaactgcttccccatctctttgtccctagtgctgtcttcgttgtcacctacctgatccttgcctgctgccagggacccagacgccgtttcccatggaacatcattctgctgaccctttttacttttgccatgggcttcatgacgggcaccatttccagtatgtaccaaaccaaagccgtcatcattgcaatgatcatcactgcggtggtatccatttcagtcaccatcttctgctttcagaccaaggtggacttcacctcgtgcacaggcctcttctgtgtcctgggaattgtgctcctggtgactgggattgtcactagcattgtgctctacttccaatacgtttactggctccacatgctctatgctgctctgggggccatttgtttcaccctgttcctggcttacgacacacagctggtcctggggaaccggaagcacaccatcagccccgaggactacatcactggcgccctgcagatttacacagacatcatctacatcttcacctttgtgctgcagctgatgggggatcgcaattaaggagcaagcccccattttcacccgatcctgggctctcccttccaagctagagggctgggccctatgactgtggtctgggctttaggcccctttccttccccttgagtaacatgcccagtttcctttctgtcctggagacaggtggcctctctggctatggatgtgtgggtacttggtggggacggaggagctagggactaactgttgctcttggtgggcttggcagggactaggctgaagatgtgtcttctccccgccacctactgtatgacaccacattcttcctaacagctggggttgtgaggaatatgaaaagagcctattcgatagctagaagggaatatgaaaggtagaagtgacttcaaggtcacgaggttcccctcccacctctgtcacaggcttcttgactacgtagttggagctatttcttcccccagcaaagccagagagctttgtccccggcctcctggacacataggccattatcctgtattcctttggcttggcatcttttagctcaggaaggtagaagagatctgtgcccatgggtctccttgcttcaatcccttcttgtttcagtgacatatgtattgtttatctgggttagggatgggggacagataatagaacgagcaaagtaacctatacaggccagcatggaacagcatctcccctgggcttgctcctggcttgtgacgctataagacagagcaggccacatgtggccatctgctccccattcttgaaagctgctggggcctccttgcaggcttctggatctctggtcagagtgaactcttgcttcctgtattcaggcagctcagagcagaaagtaaggggcagagtcatacgtgtggccaggaagtagccagggtgaagagagactcggtgcgggcagggagaatgcctgggggtccctcacctggctagggagataccgaagcctactgtggtactgaagacttctgggttctttccttctgctaacccagggagggtcctaagaggaaggtgacttctctctgtttgtcttaagttgcactgggggatttctgacttgaggcccatctctccagccagccactgccttctttgtaatattaagtgccttgagctggaatggggaagggggacaagggtcagtctgtcgggtgggggcagaaatcaaatcagcccaaggatatagttaggattaattacttaatagagaaatcctaactatatcacacaaagggatacaactataaatgtaataaaatttatgtctagaagttaaaaccc

SEQ ID NO: 292577 - DNA, 1907 bp, Homo sapiens
ctgtgggtgagggctggggcacccggctgccgcatccagcagtgcccgggcaccgagacagctgagtaccagtcattgtgaggagaaatgtggctgtctactacgtgtcctatgctgtcttcgttgtcacctacctgatccttgcctgctgccagggacccagacgccgtttcccatggaacatcattctgctgaccctttttacttttgccatgggcttcatgacgggcaccatttccagtatgtaccaaaccaaagccgtcatcattgcaatgatcatcactgcggtggtatccatttcagtcaccatcttctgctttcagaccaaggtggacttcacctcgtgcacaggcctcttctgtgtcctgggaattgtgctcctggtgactgggattgtcactagcattgtgctctacttccaatacgtttactggctccacatgctctatgctgctctgggggccatttgtttcaccctgttcctggcttacgacacacagctggtcctggggaaccggaagcacaccatcagccccgaggactacatcactggcgccctgcagatttacacagacatcatctacatcttcacctttgtgctgcagctgatgggggatcgcaattaaggagcaagcccccattttcacccgatcctgggctctcccttccaagctagagggctgggccctatgactgtggtctgggctttaggcccctttccttccccttgagtaacatgcccagtttcctttctgtcctggagacaggtggcctctctggctatggatgtgtgggtacttggtggggacggaggagctagggactaactgttgctcttggtgggcttggcagggactaggctgaagatgtgtcttctccccgccacctactgtatgacaccacattcttcctaacagctggggttgtgaggaatatgaaaagagcctattcgatagctagaagggaatatgaaaggtagaagtgacttcaaggtcacgaggttcccctcccacctctgtcacaggcttcttgactacgtagttggagctatttcttcccccagcaaagccagagagctttgtccccggcctcctggacacataggccattatcctgtattcctttggcttggcatcttttagctcaggaaggtagaagagatctgtgcccatgggtctccttgcttcaatcccttcttgtttcagtgacatatgtattgtttatctgggttagggatgggggacagataatagaacgagcaaagtaacctatacaggccagcatggaacagcatctcccctgggcttgctcctggcttgtgacgctataagacagagcaggccacatgtggccatctgctccccattcttgaaagctgctggggcctccttgcaggcttctggatctctggtcagagtgaactcttgcttcctgtattcaggcagctcagagcagaaagtaaggggcagagtcatacgtgtggccaggaagtagccagggtgaagagagactcggtgcgggcagggagaatgcctgggggtccctcacctggctagggagataccgaagcctactgtggtactgaagacttctgggttctttccttctgctaacccagggagggtcctaagaggaaggtgacttctctctgtttgtcttaagttgcactgggggatttctgacttgaggcccatctctccagccagccactgccttctttgtaatattaagtgccttgagctggaatggggaagggggacaagggtcagtctgtcgggtgggggcagaaatcaaatcagcccaaggatatagttaggattaattacttaatagagaaatcctaactatatcacacaaagggatacaactataaatgtaataaaatttatgtctagaagttaaaaccc

SEQ ID NO: 292578 - DNA, 1529 bp, Homo sapiens
ttgctgaggtttcgtatacgaaattattctgtccccttcttctccaggtttactggctccacatgctctatgctgctctgggggccatttgtttcaccctgttcctggcttacgacacacagctggtcctggggaaccggaagcacaccatcagccccgaggactacatcactggcgccctgcagatttacacagacatcatctacatcttcacctttgtgctgcagctgatgggggatcgcaattaaggagcaagcccccattttcacccgatcctgggctctcccttccaagctagagggctgggccctatgactgtggtctgggctttaggcccctttccttccccttgagtaacatgcccagtttcctttctgtcctggagacaggtggcctctctggctatggatgtgtgggtacttggtggggacggaggagctagggactaactgttgctcttggtgggcttggcagggactaggctgaagatgtgtcttctccccgccacctactgtatgacaccacattcttcctaacagctggggttgtgaggaatatgaaaagagcctattcgatagctagaagggaatatgaaaggtagaagtgacttcaaggtcacgaggttcccctcccacctctgtcacaggcttcttgactacgtagttggagctatttcttcccccagcaaagccagagagctttgtccccggcctcctggacacataggccattatcctgtattcctttggcttggcatcttttagctcaggaaggtagaagagatctgtgcccatgggtctccttgcttcaatcccttcttgtttcagtgacatatgtattgtttatctgggttagggatgggggacagataatagaacgagcaaagtaacctatacaggccagcatggaacagcatctcccctgggcttgctcctggcttgtgacgctataagacagagcaggccacatgtggccatctgctccccattcttgaaagctgctggggcctccttgcaggcttctggatctctggtcagagtgaactcttgcttcctgtattcaggcagctcagagcagaaagtaaggggcagagtcatacgtgtggccaggaagtagccagggtgaagagagactcggtgcgggcagggagaatgcctgggggtccctcacctggctagggagataccgaagcctactgtggtactgaagacttctgggttctttccttctgctaacccagggagggtcctaagaggaaggtgacttctctctgtttgtcttaagttgcactgggggatttctgacttgaggcccatctctccagccagccactgccttctttgtaatattaagtgccttgagctggaatggggaagggggacaagggtcagtctgtcgggtgggggcagaaatcaaatcagcccaaggatatagttaggattaattacttaatagagaaatcctaactatatcacacaaagggatacaactataaatgtaataaaatttatgtctagaagttaaaaccc

SEQ ID NO: 292579 - DNA, 1546 bp, Homo sapiens
cgtcaagcgatcccccatcaagcagtagcagggattgtcactagcattgtgctctacttcatacgtttactggctccacatgctctatgctgctctgggggccatttgtttcaccctgttcctggcttacgacacacagctggtcctggggaaccggaagcacaccatcagccccgaggactacatcactggcgccctgcagatttacacagacatcatctacatcttcacctttgtgctgcagctgatgggggatcgcaattaaggagcaagcccccattttcacccgatcctgggctctcccttccaagctagagggctgggccctatgactgtggtctgggctttaggcccctttccttccccttgagtaacatgcccagtttcctttctgtcctggagacaggtggcctctctggctatggatgtgtgggtacttggtggggacggaggagctagggactaactgttgctcttggtgggcttggcagggactaggctgaagatgtgtcttctccccgccacctactgtatgacaccacattcttcctaacagctggggttgtgaggaatatgaaaagagcctattcgatagctagaagggaatatgaaaggtagaagtgacttcaaggtcacgaggttcccctcccacctctgtcacaggcttcttgactacgtagttggagctatttcttcccccagcaaagccagagagctttgtccccggcctcctggacacataggccattatcctgtattcctttggcttggcatcttttagctcaggaaggtagaagagatctgtgcccatgggtctccttgcttcaatcccttcttgtttcagtgacatatgtattgtttatctgggttagggatgggggacagataatagaacgagcaaagtaacctatacaggccagcatggaacagcatctcccctgggcttgctcctggcttgtgacgctataagacagagcaggccacatgtggccatctgctccccattcttgaaagctgctggggcctccttgcaggcttctggatctctggtcagagtgaactcttgcttcctgtattcaggcagctcagagcagaaagtaaggggcagagtcatacgtgtggccaggaagtagccagggtgaagagagactcggtgcgggcagggagaatgcctgggggtccctcacctggctagggagataccgaagcctactgtggtactgaagacttctgggttctttccttctgctaacccagggagggtcctaagaggaaggtgacttctctctgtttgtcttaagttgcactgggggatttctgacttgaggcccatctctccagccagccactgccttctttgtaatattaagtgccttgagctggaatggggaagggggacaagggtcagtctgtcgggtgggggcagaaatcaaatcagcccaaggatatagttaggattaattacttaatagagaaatcctaactatatcacacaaagggatacaactataaatgtaataaaatttatgtctagaagttaaaaccc

SEQ ID NO: 292580 - DNA, 1480 bp, Homo sapiens
ataccggtgtaatagatgcaccgggagtatccgcatgaacttcactagcatctagagtgggcaggtacactggctggtcctggggaaccggaagcacaccatcagccccgaggactacatcactggcgccctgcagatttacacagacatcatctacatcttcacctttgtgctgcagctgatgggggatcgcaattaaggagcaagcccccattttcacccgatcctgggctctcccttccaagctagagggctgggccctatgactgtggtctgggctttaggcccctttccttccccttgagtaacatgcccagtttcctttctgtcctggagacaggtggcctctctggctatggatgtgtgggtacttggtggggacggaggagctagggactaactgttgctcttggtgggcttggcagggactaggctgaagatgtgtcttctccccgccacctactgtatgacaccacattcttcctaacagctggggttgtgaggaatatgaaaagagcctattcgatagctagaagggaatatgaaaggtagaagtgacttcaaggtcacgaggttcccctcccacctctgtcacaggcttcttgactacgtagttggagctatttcttcccccagcaaagccagagagctttgtccccggcctcctggacacataggccattatcctgtattcctttggcttggcatcttttagctcaggaaggtagaagagatctgtgcccatgggtctccttgcttcaatcccttcttgtttcagtgacatatgtattgtttatctgggttagggatgggggacagataatagaacgagcaaagtaacctatacaggccagcatggaacagcatctcccctgggcttgctcctggcttgtgacgctataagacagagcaggccacatgtggccatctgctccccattcttgaaagctgctggggcctccttgcaggcttctggatctctggtcagagtgaactcttgcttcctgtattcaggcagctcagagcagaaagtaaggggcagagtcatacgtgtggccaggaagtagccagggtgaagagagactcggtgcgggcagggagaatgcctgggggtccctcacctggctagggagataccgaagcctactgtggtactgaagacttctgggttctttccttctgctaacccagggagggtcctaagaggaaggtgacttctctctgtttgtcttaagttgcactgggggatttctgacttgaggcccatctctccagccagccactgccttctttgtaatattaagtgccttgagctggaatggggaagggggacaagggtcagtctgtcgggtgggggcagaaatcaaatcagcccaaggatatagttaggattaattacttaatagagaaatcctaactatatcacacaaagggatacaactataaatgtaataaaatttatgtctagaagttaaaaccc

SEQ ID NO: 292581 - DNA, 1330 bp, Homo sapiens
gcggctggtacggtcgggggttttggatctgatgggggatcgcaattaaggagcaagcccccattttcacccgatcctgggctctcccttccaagctagagggctgggccctatgactgtggtctgggctttaggcccctttccttccccttgagtaacatgcccagtttcctttctgtcctggagacaggtggcctctctggctatggatgtgtgggtacttggtggggacggaggagctagggactaactgttgctcttggtgggcttggcagggactaggctgaagatgtgtcttctccccgccacctactgtatgacaccacattcttcctaacagctggggttgtgaggaatatgaaaagagcctattcgatagctagaagggaatatgaaaggtagaagtgacttcaaggtcacgaggttcccctcccacctctgtcacaggcttcttgactacgtagttggagctatttcttcccccagcaaagccagagagctttgtccccggcctcctggacacataggccattatcctgtattcctttggcttggcatcttttagctcaggaaggtagaagagatctgtgcccatgggtctccttgcttcaatcccttcttgtttcagtgacatatgtattgtttatctgggttagggatgggggacagataatagaacgagcaaagtaacctatacaggccagcatggaacagcatctcccctgggcttgctcctggcttgtgacgctataagacagagcaggccacatgtggccatctgctccccattcttgaaagctgctggggcctccttgcaggcttctggatctctggtcagagtgaactcttgcttcctgtattcaggcagctcagagcagaaagtaaggggcagagtcatacgtgtggccaggaagtagccagggtgaagagagactcggtgcgggcagggagaatgcctgggggtccctcacctggctagggagataccgaagcctactgtggtactgaagacttctgggttctttccttctgctaacccagggagggtcctaagaggaaggtgacttctctctgtttgtcttaagttgcactgggggatttctgacttgaggcccatctctccagccagccactgccttctttgtaatattaagtgccttgagctggaatggggaagggggacaagggtcagtctgtcgggtgggggcagaaatcaaatcagcccaaggatatagttaggattaattacttaatagagaaatcctaactatatcacacaaagggatacaactataaatgtaataaaatttatgtctagaagttaaaaccc

SEQ ID NO: 292582 - DNA, 2871 bp, Homo sapiens
cggggcgcggagccccagccgagcctagccctgcccggccccggaggacttgcaacactccgaggccaggaacgctccgtctggaacggcgcaggtcccagcagctggggttccccctcagcccgtgagcagccatgtccaaccccagcgccccaccaccatatgaagaccgcaaccccctgtacccaggccctctgccccctgggggctatgggcagccatctgtcctgccaggagggtatcctgcctaccctggctacccgcagcctggctacggtcaccctgctggctacccacagcccatgccccccacccacccgatgcccatgaactacggcccaggccatggctatgatggggaggagagagcggtgagtgatagcttcgggcctggagagtgggatgaccggaaagtgcgacacacttttatccgaaaggtttactccatcatctccgtgcagctgctcatcactgtggccatcattgctatcttcacctttgtggaacctgtcagcgcctttgtgaggagaaatgtggctgtctactacgtgtcctatgctgtcttcgttgtcacctacctgatccttgcctgctgccagggacccagacgccgtttcccatggaacatcattctgctgaccctttttacttttgccatgggcttcatgacgggcaccatttccagtatgtaccaaaccaaagccgtcatcattgcaatgatcatcactgcggtggtatccatttcagtcaccatcttctgctttcagaccaaggtggacttcacctcgtgcacaggcctcttctgtgtcctgggaattgtgctcctggtgactgggattgtcactagcattgtgctctacttccaatacgtttactggctccacatgctctatgctgctctgggggccatttgtttcaccctgttcctggcttacgacacacagctggtcctggggaaccggaagcacaccatcagccccgaggactacatcactggcgccctgcagatttacacagacatcatctacatcttcacctttgtgctgcagctgatgggggatcgcaattaaggagcaagcccccattttcacccgatcctgggctctcccttccaagctagagggctgggccctatgactgtggtctgggctttaggcccctttccttccccttgagtaacatgcccagtttcctttctgtcctggagacaggtggcctctctggctatggatgtgtgggtacttggtggggacggaggagctagggactaactgttgctcttggtgggcttggcagggactaggctgaagatgtgtcttctccccgccacctactgtatgacaccacattcttcctaacagctggggttgtgaggaatatgaaaagagcctattcgatagctagaagggaatatgaaaggtagaagtgacttcaaggtcacgaggttcccctcccacctctgtcacaggcttcttgactacgtagttggagctatttcttcccccagcaaagccagagagctttgtccccggcctcctggacacataggccattatcctgtattcctttggcttggcatcttttagctcaggaaggtagaagagatctgtgcccatgggtctccttgcttcaatcccttcttgtttcagtgacatatgtattgtttatctgggttagggatgggggacagataatagaacgagcaaagtaacctatacaggccagcatggaacagcatctcccctgggcttgctcctggcttgtgacgctataagacagagcaggccacatgtggccatctgctccccattcttgaaagctgctggggcctccttgcaggcttctggatctctggtcagagtgaactcttgcttcctgtattcaggcagctcagagcagaaagtaaggggcagagtcatacgtgtggccaggaagtagccagggtgaagagagactcggtgcgggcagggagaatgcctgggggtccctcacctggctagggagataccgaagcctactgtggtactgaagacttctgggttctttccttctgctaacccagggagggtcctaagaggaaggtgacttctctctgtttgtcttaagttgcactgggggatttctgacttgaggcccatctctccagccagccactgccttctttgtaatattaagtgccttgagctggaatggggaagggggacaagggtcagtctgtcgggtgggggcagaaatcaaatcagcccaaggatatagttaggattaattacttaatagagaaatcctaactatatcacacaaagggatacaactataaatgtaataaaatttatgtctagaagttaaaacccaaaaaaaaaacctcgtgccgaattcggcacgaggagagatcaagggctctattcaggaacgttggtgggaggacagagcaagtgggaagggggtatggtgagtgcggcaatccctcatcctcttagaagcacctgtgaatgggaattgagccaactgttatagaaaattggttcagaaagtgcaatcttgccagatttctagcaaataggttcagtgttaccataagcctttgctgtacttcttgaaatgtttctaggggagagcattggaaaatccccttcccccatctagatcgaaggaagatgagggagcagcttggattcttctcagttgtcccctgcatggggagatacactaacccccagaaatgactgctaagcctcttgccttgtctttagtagctaatgatcagagagatttttttttttaaactaccatggtcccaggattccatcctgaaatttatttttctttgtatgaatatgtgtaaatgatttaaaaataaaactgtaaaatatt

SEQ ID NO: 292583 - DNA, 2301 bp, Homo sapiens
cggggcgcggagccccagccgagcctagccctgcccggccccggaggacttgcaacactccgaggccaggaacgctccgtctggaacggcgcaggtcccagcagctggggttccccctcagcccgtgagcagccatgtccaaccccagcgccccaccaccatatgaagaccgcaaccccctgtacccaggccctctgccccctgggggctatgggcagccatctgtcctgccaggagggtatcctgcctaccctggctacccgcagcctggctacggtcaccctgctggctacccacagcccatgccccccacccacccgatgcccatgaactacggcccaggccatggctatgatggggaggagagagcggtgagtgatagcttcgggcctggagagtgggatgaccggaaagtgcgacacacttttatccgaaaggtttactccatcatctccgtgcagctgctcatcactgtggccatcattgctatcttcacctttgtggaacctgtcagcgcctttgtgaggagaaatgtggctgtctactacgtgtcctatgctgtcttcgttgtcacctacctgatccttgcctgctgccagggacccagacgccgtttcccatggaacatcattctgctgaccctttttacttttgccatgggcttcatgacgggcaccatttccagtatgtaccaaaccaaagccgtcatcattgcaatgatcatcactgcggtggtatccatttcagtcaccatcttctgctttcagaccaaggtggacttcacctcgtgcacaggcctcttctgtgtcctgggaattgtgctcctggtgactgggattgtcactagcattgtgctctacttccaatacgtttactggctccacatgctctatgctgctctgggggccatttgtttcaccctgttcctggcttacgacacacagctggtcctggggaaccggaagcacaccatcagccccgaggactacatcactggcgccctgcagatttacacagacatcatctacatcttcacctttgtgctgcagctgatgggggatcgcaattaaggagcaagcccccattttcacccgatcctgggctctcccttccaagctagagggctgggccctatgactgtggtctgggctttaggcccctttccttccccttgagtaacatgcccagtttcctttctgtcctggagacaggtggcctctctggctatggatgtgtgggtacttggtggggacggaggagctagggactaactgttgctcttggtgggcttggcagggactaggctgaagatgtgtcttctccccgccacctactgtatgacaccacattcttcctaacagctggggttgtgaggaatatgaaaaggtcacgaggttcccctcccacctctgtcacaggcttcttgactacgtagttggagctatttcttcccccagcaaagccagagagctttgtccccggcctcctggacacataggccattatcctgtattcctttggcttggcatcttttagctcaggaaggtagaagagatctgtgcccatgggtctccttgcttcaatcccttcttgtttcagtgacatatgtattgtttatctgggttagggatgggggacagataatagaacgagcaaagtaacctatacaggccagcatggaacagcatctcccctgggcttgctcctggcttgtgacgctataagacagagcaggccacatgtggccatctgctccccattcttgaaagctgctggggcctccttgcaggcttctggatctctggtcagagtgaactcttgcttcctgtattcaggcagctcagagcagaaagtaaggggcagagtcatacgtgtggccaggaagtagccagggtgaagagagactcggtgcgggcagggagaatgcctgggggtccctcacctggctagggagataccgaagcctactgtggtactgaagacttctgggttctttccttctgctaacccagggagggtcctaagaggaaggtgacttctctctgtttgtcttaagttgcactgggggatttctgacttgaggcccatctctccagccagccactgccttctttgtaatattaagtgccttgagctggaatggggaagggggacaagggtcagtctgtcgggtgggggcagaaatcaaatcagcccaaggatatagttaggattaattacttaatagagaaatcctaactatatcacacaaagggatacaactataaatgtaataaaatttatgtctagaagttaaaaccc

SEQ ID NO: 292584 - DNA, 1132 bp, Homo sapiens
  misc_feature (12)..(12): n is a, c, g, or t
  misc_feature (18)..(18): n is a, c, g, or t
aggagagttaanccctgnggggtgggtttaacggggaggagctagggactaactgttgctcttggtgggcttggcagggactaggctgaagatgtgtcttctccccgccacctactgtatgacaccacattcttcctaacagctggggttgtgaggaatatgaaaagagcctattcgatagctagaagggaatatgaaaggtagaagtgacttcaaggtcacgaggttcccctcccacctctgtcacaggcttcttgactacgtagttggagctatttcttcccccagcaaagccagagagctttgtccccggcctcctggacacataggccattatcctgtattcctttggcttggcatcttttagctcaggaaggtagaagagatctgtgcccatgggtctccttgcttcaatcccttcttgtttcagtgacatatgtattgtttatctgggttagggatgggggacagataatagaacgagcaaagtaacctatacaggccagcatggaacagcatctcccctgggcttgctcctggcttgtgacgctataagacagagcaggccacatgtggccatctgctccccattcttgaaagctgctggggcctccttgcaggcttctggatctctggtcagagtgaactcttgcttcctgtattcaggcagctcagagcagaaagtaaggggcagagtcatacgtgtggccaggaagtagccagggtgaagagagactcggtgcgggcagggagaatgcctgggggtccctcacctggctagggagataccgaagcctactgtggtactgaagacttctgggttctttccttctgctaacccagggagggtcctaagaggaaggtgacttctctctgtttgtcttaagttgcactgggggatttctgacttgaggcccatctctccagccagccactgccttctttgtaatattaagtgccttgagctggaatggggaagggggacaagggtcagtctgtcgggtgggggcagaaatcaaatcagcccaaggatatagttaggattaattacttaatagagaaatcctaactatatcacacaaagggatacaactataaatgtaataaaatttatgtctagaagttaaaaccc

SEQ ID NO: 292585 - DNA, 1420 bp, Homo sapiens
ataattcgcacttcgcccgacctaattcaccgcgctgactgatcatacttattatcgcccacggattctgccttatccttactattcgagttagcaaaatcaataatactaacgccctctacacacgaactcttaatcctctctcaaggtatttcagacatctactaccccaataattatactttccgattggacttctagcaagcctcgctatcctccccttaccccccactataaaccctactgggataactctctgttgcttagccaccaagttctccttgattcaaatatcactctcctagcttagcaggactcatccatagctagtcagcagtcctatactccctctagcagtatttccaggagacaaatgaggctcactcacccaacacattaacaagcataaaaccctcattcttcctaacagctggggttgtgaggaatatgaaaagagcctattcgatagctagaagggaatatgaaaggtagaagtgacttcaaggtcacgaggttcccctcccacctctgtcacaggcttcttgactacgtagttggagctatttcttcccccagcaaagccagagagctttgtccccggcctcctggacacataggccattatcctgtattcctttggcttggcatcttttagctcaggaaggtagaagagatctgtgcccatgggtctccttgcttcaatcccttcttgtttcagtgacatatgtattgtttatctgggttagggatgggggacagataatagaacgagcaaagtaacctatacaggccagcatggaacagcatctcccctgggcttgctcctggcttgtgacgctataagacagagcaggccacatgtggccatctgctccccattcttgaaagctgctggggcctccttgcaggcttctggatctctggtcagagtgaactcttgcttcctgtattcaggcagctcagagcagaaagtaaggggcagagtcatacgtgtggccaggaagtagccagggtgaagagagactcggtgcgggcagggagaatgcctgggggtccctcacctggctagggagataccgaagcctactgtggtactgaagacttctgggttctttccttctgctaacccagggagggtcctaagaggaaggtgacttctctctgtttgtcttaagttgcactgggggatttctgacttgaggcccatctctccagccagccactgccttctttgtaatattaagtgccttgagctggaatggggaagggggacaagggtcagtctgtcgggtgggggcagaaatcaaatcagcccaaggatatagttaggattaattacttaatagagaaatcctaactatatcacacaaagggatacaactataaatgtaataaaatttatgtctagaagttaaaaccc

SEQ ID NO: 292586 - DNA, 1057 bp, Homo sapiens
aagcagtggtatcaacgcagagtggcattatggccggggggggcggggacctcgtgaccttgaagtcacttctacctttcatattcccttctagcctattcgatagctagaagggaatatgaaaggtagaagtgacttcaaggtcacgaggttcccctcccacctctgtcacaggcttcttgactacgtagttggagctatttcttcccccagcaaagccagagagctttgtccccggcctcctggacacataggccattatcctgtattcctttggcttggcatcttttagctcaggaaggtagaagagatctgtgcccatgggtctccttgcttcaatcccttcttgtttcagtgacatatgtattgtttatctgggttagggatgggggacagataatagaacgagcaaagtaacctatacaggccagcatggaacagcatctcccctgggcttgctcctggcttgtgacgctataagacagagcaggccacatgtggccatctgctccccattcttgaaagctgctggggcctccttgcaggcttctggatctctggtcagagtgaactcttgcttcctgtattcaggcagctcagagcagaaagtaaggggcagagtcatacgtgtggccaggaagtagccagggtgaagagagactcggtgcgggcagggagaatgcctgggggtccctcacctggctagggagataccgaagcctactgtggtactgaagacttctgggttctttccttctgctaacccagggagggtcctaagaggaaggtgacttctctctgtttgtcttaagttgcactgggggatttctgacttgaggcccatctctccagccagccactgccttctttgtaatattaagtgccttgagctggaatggggaagggggacaagggtcagtctgtcgggtgggggcagaaatcaaatcagcccaaggatatagttaggattaattacttaatagagaaatcctaactatatcacacaaagggatacaactataaatgtaataaaatttatgtctagaagttaaaaccc

SEQ ID NO: 292587 - DNA, 997 bp, Homo sapiens
  misc_feature (17)..(17): n is a, c, g, or t
  misc_feature (25)..(25): n is a, c, g, or t
ctactactactaaattngcggccgntcgacagagcctattcgatagctagaagggaatatgaaaggtagaagtgacttcaaggtcacgaggttcccctcccacctctgtcacaggcttcttgactacgtagttggagctatttcttcccccagcaaagccagagagctttgtccccggcctcctggacacataggccattatcctgtattcctttggcttggcatcttttagctcaggaaggtagaagagatctgtgcccatgggtctccttgcttcaatcccttcttgtttcagtgacatatgtattgtttatctgggttagggatgggggacagataatagaacgagcaaagtaacctatacaggccagcatggaacagcatctcccctgggcttgctcctggcttgtgacgctataagacagagcaggccacatgtggccatctgctccccattcttgaaagctgctggggcctccttgcaggcttctggatctctggtcagagtgaactcttgcttcctgtattcaggcagctcagagcagaaagtaaggggcagagtcatacgtgtggccaggaagtagccagggtgaagagagactcggtgcgggcagggagaatgcctgggggtccctcacctggctagggagataccgaagcctactgtggtactgaagacttctgggttctttccttctgctaacccagggagggtcctaagaggaaggtgacttctctctgtttgtcttaagttgcactgggggatttctgacttgaggcccatctctccagccagccactgccttctttgtaatattaagtgccttgagctggaatggggaagggggacaagggtcagtctgtcgggtgggggcagaaatcaaatcagcccaaggatatagttaggattaattacttaatagagaaatcctaactatatcacacaaagggatacaactataaatgtaataaaatttatgtctagaagttaaaaccc

SEQ ID NO: 292588 - DNA, 948 bp, Homo sapiens
ggatgagtacgccttgacatcaaagagcccacaatcatgtcgaatgcttgtctgacagccactagaggggagaaaaatgtagttggagctatttcttcccccagcaaagccagagagctttgtccccggcctcctggacacataggccattatcctgtattcctttggcttggcatcttttagctcaggaaggtagaagagatctgtgcccatgggtctccttgcttcaatcccttcttgtttcagtgacatatgtattgtttatctgggttagggatgggggacagataatagaacgagcaaagtaacctatacaggccagcatggaacagcatctcccctgggcttgctcctggcttgtgacgctataagacagagcaggccacatgtggccatctgctccccattcttgaaagctgctggggcctccttgcaggcttctggatctctggtcagagtgaactcttgcttcctgtattcaggcagctcagagcagaaagtaaggggcagagtcatacgtgtggccaggaagtagccagggtgaagagagactcggtgcgggcagggagaatgcctgggggtccctcacctggctagggagataccgaagcctactgtggtactgaagacttctgggttctttccttctgctaacccagggagggtcctaagaggaaggtgacttctctctgtttgtcttaagttgcactgggggatttctgacttgaggcccatctctccagccagccactgccttctttgtaatattaagtgccttgagctggaatggggaagggggacaagggtcagtctgtcgggtgggggcagaaatcaaatcagcccaaggatatagttaggattaattacttaatagagaaatcctaactatatcacacaaagggatacaactataaatgtaataaaatttatgtctagaagttaaaaccc

SEQ ID NO: 292589 - DNA, 892 bp, Homo sapiens
  misc_feature (45)..(45): n is a, c, g, or t
  misc_feature (88)..(88): n is a, c, g, or t
  misc_feature (122)..(122): n is a, c, g, or t
  misc_feature (130)..(131): n is a, c, g, or t
ccaccgcgggcacaggcggctgggacgacggagggggagcgaggntggcccctcagcaaagccagagagcgggggccccgtccgccgngacacagagtccagatctgggaggccgggggcgnggcagctnngagcgcaggaagggagaagagagcggggcccatggggcgccgggcggcaatcccggcgggggtcagggacagagggaggggggagcggggggagggacagataatagaacgagcaaagtaacctatacaggccagcatggaacagcatctcccctgggcttgctcctggcttgtgacgctataagacagagcaggccacatgtggccatctgctccccattcttgaaagctgctggggcctccttgcaggcttctggatctctggtcagagtgaactcttgcttcctgtattcaggcagctcagagcagaaagtaaggggcagagtcatacgtgtggccaggaagtagccagggtgaagagagactcggtgcgggcagggagaatgcctgggggtccctcacctggctagggagataccgaagcctactgtggtactgaagacttctgggttctttccttctgctaacccagggagggtcctaagaggaaggtgacttctctctgtttgtcttaagttgcactgggggatttctgacttgaggcccatctctccagccagccactgccttctttgtaatattaagtgccttgagctggaatggggaagggggacaagggtcagtctgtcgggtgggggcagaaatcaaatcagcccaaggatatagttaggattaattacttaatagagaaatcctaactatatcacacaaagggatacaactataaatgtaataaaatttatgtctagaagttaaaaccc

SEQ ID NO: 292590 - DNA, 545 bp, Homo sapiens
tctagaggatcccaacgtcagcactccttgcaggcttctggatctctggtcagagtgaactcttgcttcctgtattcaggcagctcagagcagaaagtaaggggcagagtcatacgtgtggccaggaagtagccagggtgaagagagactcggtgcgggcagggagaatgcctgggggtccctcacctggctagggagataccgaagcctactgtggtactgaagacttctgggttctttccttctgctaacccagggagggtcctaagaggaaggtgacttctctctgtttgtcttaagttgcactgggggatttctgacttgaggcccatctctccagccagccactgccttctttgtaatattaagtgccttgagctggaatggggaagggggacaagggtcagtctgtcgggtgggggcagaaatcaaatcagcccaaggatatagttaggattaattacttaatagagaaatcctaactatatcacacaaagggatacaactataaatgtaataaaatttatgtctagaagttaaaaccc

SEQ ID NO: 292591 - DNA, 1785 bp, Homo sapiens
  misc_feature (1766)..(1766): n is a, c, g, or t
cggggcgcggagccccagccgagcctagccctgcccggccccggaggacttgcaacactccgaggccaggaacgctccgtctggaacggcgcaggtcccagcagctggggttccccctcagcccgtgagcagccatgtccaaccccagcgccccaccaccatatgaagaccgcaaccccctgtacccaggccctctgccccctgggggctatgggcagccatctgtcctgccaggagggtatcctgcctaccctggctacccgcagcctggctacggtcaccctgctggctacccacagcccatgccccccacccacccgatgcccatgaactacggcccaggccatggctatgatggggaggagagagcggtgagtgatagcttcgggcctggagagtgggatgaccggaaagtgcgacacacttttatccgaaaggtttactccatcatctccgtgcagctgctcatcactgtggccatcattgctatcttcacctttgtggaacctgtcagcgcctttgtgaggagaaatgtggctgtctactacgtgtcctatgctgtcttcgttgtcacctacctgatccttgcctgctgccagggacccagacgccgtttcccatggaacatcattctgctgaccctttttacttttgccatgggcttcatgacgggcaccatttccagtatgtaccaaaccaaagccgtcatcattgcaatgatcatcactgcggtggtatccatttcagtcaccatcttctgctttcagaccaaggtggacttcacctcgtgcacaggcctcttctgtgtcctgggaattgtgctcctggtgactgggattgtcactagcattgtgctctacttccaatacgtttactggctccacatgctctatgctgctctgggggccatttgtttcaccctgttcctggcttacgacacacagctggtcctggggaaccggaagcacaccatcagccccgaggactacatcactggcgccctgcagatttacacagacatcatctacatcttcacctttgtgctgcagctgatgggggatcgcaattaaggagcaagcccccattttcacccgatcctgggctctcccttccaagctagagggctgggccctatgactgtggtctgggctttaggcccctttccttccccttgagtaacatgcccagtttcctttctgtcctggagacaggtggcctctctggctatggatgtgtgggtacttggtggggacggaggagctagggactaactgttgctcttggtgggcttggcagggactaggctgaagatgtgtcttctccccgccacctactgtatgacaccacattcttcctaacagctggggttgtgaggaatatgaaaagagcctattcgatagctagaagggaatatgaaaggtagaagtgacttcaaggtcacgaggttcccctcccacctctgtcacaggcttcttgactacgtagttggagctatttcttcccccagcaaagccagagagctttgtccccggcctcctggacacataggccattatcctgtattcctttggcttggcatcttttagctcaggaaggtagaagagatctgtgcccatgggtctccttgcttcaatcccttcttgtttcagtgacatatgtattgtttatctgggttagggatgggggacagataatagaacgagcaaagtaacctatacaggccaggggagatgctgttccatgctggtcgacgccggcccgaaaantttagtagttagtaagacg

SEQ ID NO: 292592 - DNA, 715 bp, Homo sapiens
cggggcgcggagccccagccgagcctagccctgcccggccccggaggacttgcaacactccgaggccaggaacgctccgtctggaacggcgcaggtcccagcagctggggttccccctcagcccgtgagcagccatgtccaaccccagcgccccaccaccatatgaagaccgcaaccccctgtacccaggccctctgccccctgggggctatgggcagccatctgtcctgccaggagggtatcctgcctaccctggctacccgcagcctggctacggtcaccctgctggctacccacagcccatgccccccacccacccgatgcccatgaactacgaatgcctgggggtccctcacctggctagggagataccgaagcctactgtggtactgaagacttctgggttctttccttctgctaacccagggagggtcctaagaggaaggtgacttctctctgtttgtcttaagttgcactgggggatttctgacttgaggcccatctctccagccagccactgccttctttgtaatattaagtgccttgagctggaatggggaagggggacaagggtcagtctgtcgggtgggggcagaaatcaaatcagcccaaggatatagttaggattaattacttaatagagaaatcctaactatatcacacaaagggatacaactataaatgtaataaaatttatgtctagaagttaaaaccc

SEQ ID NO: 292593 - DNA, 1371 bp, Homo sapiens
cggggcgcggagccccagccgagcctagccctgcccggccccggaggacttgcaacactccgaggccaggaacgctccgtctggaacggcgcaggtcccagcagctggggttccccctcagcccgtgagcagccatgtccaaccccagcgccccaccaccatatgaagaccgcaaccccctgtacccaggccctctgccccctgggggctatgggcagccatctgtcctgccaggagggtatcctgcctaccctggctacccgcagcctggctacggtcaccctgctggctacccacagcccatgccccccacccacccgatgcccatgaactacggcccaggccatggctatgatggggaggagagagcggtgagtgatagcttcgggcctggagagtgggatgaccggaaagtgcgacacacttttatccgaaaggtttactccatcatctccgtgcagctgctcatcactgtggccatcattgctatcttcacctttgtggaacctgtcagcgcctttgtgaggagaaatgtggctgtctactacgtgtcctatgctgtcttcgttgtcacctacctgatccttgcctgctgccagggacccagacgccgtttcccatggaacatcattctgctgaccctttttacttttgccatgggcttcatgacgggcaccatttccagtatgtaccaaaccaaagccgtcatcattgcaatgatcatcactgcggtggtatccatttcagtcaccatcttctgctttcagaccaaggtggacttcacctcgtgcacaggcctcttctgtgtcctgggaattgtgctcctggtgactgggattgtcactagcattgtgctctacttccaatacgtttactggctccacatgctctatgctgctctgggggccatttgtttcaccctgttcctggcttacgacacacagctggtcctggggaaccggaagcacaccatcagccccgaggactacatcactggcgccctgcagatttacacagacatcatctacatcttcacctttgtgctgcagctgatgggggatcgcaattaaggagcaagcccccattttcacccgatcctgggctctcccttccaagctagagggctgggccctatgactgtggtctgggctttaggcccctttccttccccttgagtaacatgcccagtttcctttctgtcctggagacaggtggcctctctggctatggatgtgtgggtacttggtggggacggaggagctagggactaactgttgctcttggtggaggtatagggtggtatagggtggtatagggtggtatagaggtgtatggtggtatagagtgtatcagtgtgtaagcggccgaccc

SEQ ID NO: 292594 - DNA, 1180 bp, Homo sapiens
cggggcgcggagccccagccgagcctagccctgcccggccccggaggacttgcaacactccgaggccaggaacgctccgtctggaacggcgcaggtcccagcagctggggttccccctcagcccgtgagcagccatgtccaaccccagcgccccaccaccatatgaagaccgcaaccccctgtacccaggccctctgccccctgggggctatgggcagccatctgtcctgccaggagggtatcctgcctaccctggctacccgcagcctggctacggtcaccctgctggctacccacagcccatgccccccacccacccgatgcccatgaactacggcccaggccatggctatgatggggaggagagagcggtgagtgatagcttcgggcctggagagtgggatgaccggaaagtgcgacacacttttatccgaaaggtttactccatcatctccgtgcagctgctcatcactgtggccatcattgctatcttcacctttgtggaacctgtcagcgcctttgtgaggagaaatgtggctgtctactacgtgtcctatgctgtcttcgttgtcacctacctgatccttgcctgctgccagggacccagacgccgtttcccatggaacatcattctgctgaccctttttacttttgccatgggcttcatgacgggcaccatttccagtatgtaccaaaccaaagccgtcatcattgcaatgatcatcactgcggtggtatccatttcagtcaccatcttctgctttcagaccaaggtggacttcacctcgtgcacaggcctcttctgtgtcctgggaattgtgctcctggtgactgggattgtcactagcattgtgctctacttccaatacgtttactggctccacatgctctatgctgctctgggggccatttgtttcaccctgttcctgcttacgacacaccagctggtctgggcaccggaggccacataagccggggttacttactgggcctgcggtttcccggcgtctctcatttcccttggcggcgtggtggggtcccctaggggcgccctttcccggctgggtcctccacgaagggggcccggaggtggggtagccctcccctggaagcgggctgtgggaggctctccgggggtgtgggggcgcgccccctgggggggggagtccccggcaccccg

SEQ ID NO: 292595 - DNA, 980 bp, Homo sapiens
cggggcgcggagccccagccgagcctagccctgcccggccccggaggacttgcaacactccgaggccaggaacgctccgtctggaacggcgcaggtcccagcagctggggttccccctcagcccgtgagcagccatgtccaaccccagcgccccaccaccatatgaagaccgcaaccccctgtacccaggccctctgccccctgggggctatgggcagccatctgtcctgccaggagggtatcctgcctaccctggctacccgcagcctggctacggtcaccctgctggctacccacagcccatgccccccacccacccgatgcccatgaactacggcccaggccatggctatgatggggaggagagagcggtgagtgatagcttcgggcctggagagtgggatgaccggaaagtgcgacacacttttatccgaaaggtttactccatcatctccgtgcagctgctcatcactgtggccatcattgctatcttcacctttgtggaacctgtcagcgcctttgtgaggagaaatgtggctgtctactacgtgtcctatgctgtcttcgttgtcacctacctgatccttgcctgctgccagggacccagacgccgtttcccatggaacatcattctgctgaccctttttacttttgccatgggcttcatgacgggcaccatttccagtatgtaccaaaccaaagccgtcatcattgcaatgatcatcactgcggtggtatccatttcagtcaccatcttctgctttcagaccaaggtggacttcacctcgtgcacaggcctcttctgtgtcctgggaattgtgctcctggtgactgggattgtcactagcattgtgctctacttccaatacgtttactggctccacatgctctatgctgctctgggggccatttgtttcaccctgttcctggctcactacaactgcgctgcagtgagctacgatagtgccacggcactccaa

SEQ ID NO: 292596 - DNA, 1062 bp, Homo sapiens
  misc_feature (616)..(617): n is a, c, g, or t
  misc_feature (643)..(643): n is a, c, g, or t
cggggcgcggagccccagccgagcctagccctgcccggccccggaggacttgcaacactccgaggccaggaacgctccgtctggaacggcgcaggtcccagcagctggggttccccctcagcccgtgagcagccatgtccaaccccagcgccccaccaccatatgaagaccgcaaccccctgtacccaggccctctgccccctgggggctatgggcagccatctgtcctgccaggagggtatcctgcctaccctggctacccgcagcctggctacggtcaccctgctggctacccacagcccatgccccccacccacccgatgcccatgaactacggcccaggccatggctatgatggggaggagagagcggtgagtgatagcttcgggcctggagagtgggatgaccggaaagtgcgacacacttttatccgaaaggtttactccatcatctccgtgcagctgctcatcactgtggccatcattgctatcttcacctttgtggaacctgtcagcgcctttgtgaggagaaatgtggctgtctactacgtgtcctatgctgtcttcgttgtcacctacctgatccttgcctgctgccagggacccagacgccgatnnccatggaacatcatactgctgacccnttaaacctatatgccaatgggcattcatgacgggcaaccatttccagtatgtacacaccaaagccgatcatcattgcaatgatcatacaactgccggtggtaatccatatcagtcaaccatcattactggcttcaagaccaaaggtggcattcacctcgtgacgaggccactctgtgtcttgtggacttggtgcccctcgataacctggcataggtcacacagcactcgtgccctacgtcccaagagaccggcacgtgggacacccacaagggacaaaacgcagaccggagcagcccacagagccacccccggccccgggcgccacaagacacaccgcgcgccctggcgagccgcggagcgaacgatgacgccccgaggaataatacaaaggggcccccagcaaggacagccacggcaa

SEQ ID NO: 292597 - DNA, 282 bp, Homo sapiens
agctcggcacccgcttatctttctgctctgagctactaggggctgatttatttctgacttgaggcccatctctccagccagccactgccttctttgtaatattaagtgccttgagctggaatggggaagggggacaagggtcagtctgtcgggtgggggcagaaatcaaatcagcccaaggatatagttaggattaattacttaatagagaaatcctaactatatcacacaaagggatacaactataaatgtaataaaatttatgtctagaagttaaaaccc

SEQ ID NO: 292598 - DNA, 1303 bp, Homo sapiens
gagatagagccttgctctgtctcccaggctggagtgcagtggtgcaatctcagctcactgcaacctctgcctcccaagttcaagcgattcttctgactcagcttcctgagtagctgggattacaggcacccgccaccacgtccagctaatttttacatttttagtacagggtttcaccaccttggccaggctggtctcaaactcctgacctcaggtgaaccgcccaccttggactcccaaagtgctgggattacaggcgtgagccactgcacgcagcctacggatgccttttaaaggaaattcttatagaccccctaagaaaatgtctctgattccaacgaatcctgggactggacaattagataaacactgtcttaagaattagtactacgccttaaaaaaaaaaaaaggcttttcaattgtgaaacatcacagcaaaataagtttcatttttacaactagtaaaatattagactatcataattatcaaagttttatgattcatagaaaattgtgtatagactcagaatgagaaatctagtattaaaaaaaactgtgttgcttctactaagaaacactaatattttcccaataatcagacagtagacatctgttcttaacattagtatctttcagtgctaacacttaactattgtaagattgcaaatggctctgggcagggccaatagtcacactgctggcaaaagcaaagaaaaactaataatggacatggataaacaaaacaataatgctcaatgtcattcattcttcattcaactgcaaagataagttgaatgacaccactatcacttaaaacacaaaaaagggaaataccaatttaacaaataccttattttcacccagatatcaacaatgcgaaggaaaaatcagtatctcacatgactttgtagaaaacagactgaacaagtaactgcgttcccagtgaactatgagctactatgtgtggcacacgtcattttgtttacttaatgacatatgaaaaccgtaacatcttcatcctcgatgataataaaggcaatgtgctattgaatttcttaatcttccttaaccatatgctatggtttggatgtgtgtcccctgcaaatttcatgttgaaatgtgatccccaatgtcagaggtggggcctagtgggagatactgaatcatggggtagggggtggtcctctcatgagtccccatggtgattgataagtgtgttctcactcagttcacgtgagatctggttgtttataaaagtctgggacctcccattctctctcttgctccctttcgtcatgtgaca

SEQ ID NO: 292599 - DNA, 528 bp, Homo sapiens
ccctcccatcttctcccatgtgaggacacaccaagaaggcctcaccagacgtcaataccttgatcttggacttcccagcctcaagaagtatatcaacaatgcgaaggaaaaatcagtatctcacatgactttgtagaaaacagactgaacaagtaactgcgttcccagtgaactatgagctactatgtgtggcacacgtcattttgtttacttaatgacatatgaaaaccgtaacatcttcatcctcgatgataataaaggcaatgtgctattgaatttcttaatcttccttaaccatatgctatggtttggatgtgtgtcccctgcaaatttcatgttgaaatgtgatccccaatgtcagaggtggggcctagtgggagatactgaatcatggggtagggggtggtcctctcatgagtccccatggtgattgataagtgtgttctcactcagttcacgtgagatctggttgtttataaaagtctgggacctcccattctctctcttgctccctttcgtcatgtgaca

SEQ ID NO: 292600 - DNA, 2298 bp, Homo sapiens
ctccagagctttcgaaagggcacggaagtccccgtctaaacgcccgctgcaggcggctggtggtccagggaagcggcgtcgactgcgtgcaaaacaaccgccgccaacgcaactccacacctcccagacccacacgtcaaagaacgcgaaccccgcggccccaacttctggcctctccgctccggcgcctgcagccccgcggggaaggggcgacgcgagggggcgcagggacagccccgcacctgggaggcccgagggggcgcccgggagggaggggctgcaaacggcggcgagcgcgcgcggcaaccgccaaacgcccgcctttgtagccccggccccgcgtccttaccctgccgacggctgctcggctccggcccgcggcggcggccccagagccgaggaccggggtgggctcgcgctcttcgtcactggagaagtccgggggccccttgctgttggtgccggcggggagcggcggccggttgcgagccgtgaggtgctgcaggtagagctggacgtacacgtctttgcgctgctccccggccggcagcgtcacattgttggcgaccaactcactcttcaacttgtcttttgtcaggaccgaggggtcttccaggaactccggcatctcggggatctgcgaagccccctccccacagcctttgccgccgccgctcacgccggcgcgcttgctcctggccggggaccgcgctgccgcctccgagcctcacggctcctgcccgggaagagcgctgcggagcggaacaaaaactcgcggacacaaagccaagccagacccggacacaaaagaccccagagccgaactacgaaccaactgcggccaagctggaagctcgcaccaaccccagcccacacactacaggcaggaggcgagcagcctgcttcgcccacgccccaagaacgcgcgccgccattggcgggcgacgggaggaagcgcggcggtgattggcgagacggctcgcgcgggttccattagccgccgcgctgagcgagaggaggtagaaacgcagtttaaaaggcgctggggcgggagccgaggctcccggcccgcttctgttttcgttttctccacccttccccttagacgccgataagggacaggtcgtactgcttttgtgcgccgtttcctctccctcccccagcttgagaagcagctttcgtctctggggtcgatcgcctacgaacgcgccgaattccacgccagtgtgaggacccttggctgggcctttcttcctcccgggacactgaagctccaagagtagccgcagccttgccttccccaaacgctagccctgaaggggaagaaaagaagcgaggcttgtctgcaggcactcatattccttgatttgatttactttgggagggggagggcggggagttacccctctcctcgcgaacgcttcttttgttccagaaacccaggggaagccagacctctaccatcgggcacttaaattacccttgaatttgtgacaaaagtgtactataccattcacttcttagtgtcatagttggggcatgtctaaattgtttaatttgaacagtgcgttcagacgcaagacaaattcgcgcttgcatttttgttgaaaccgtctctggctttggatcccaccacccgcaagaatcctaaacctaacgtttgataacaaaacgaaggagaacccttgggaaccccctcaatggtcaatttaaaataacagatggtgcataatcctaaaggaagactagtgacctataattaggcctagaaccctaatcaaacccgtattaccgatccaaattaaaacctggtagaatctaatacattgactgcaattaaaatgtttgcctggaaattagtatcactgatgacaaatatttgtatttctgatgaatatgtatgtttaaagatgctttctttctagaaaggaaaggagaccttggatgtagggtgtgttaatcatttccccagaatctgagctccaaactatgttttagaaactggttaaattttttttaaatgtttgcctgctttctacattgctaggttagaatacatttaaaacaaacgccttcactaaaaatgtttcctatgatttaagcgacttacttttattcaaattgcgatattatttcttttagtgataattattttcctagaggtaactaattcctttataaaaatctcagtattcacatacatttaagcaatggtattaagctcaataatgcaaattaaaaatcaggttttaattagcaagttgttaggtaggtttttatgatcccttgtaaaagttg

SEQ ID NO: 292601 - DNA, 1860 bp, Homo sapiens
ctccagagctttcgaaagggcacggaagtccccgtctaaacgcccgctgcaggcggctggtggtccagggaagcggcgtcgactgcgtgcaaaacaaccgccgccaacgcaactccacacctcccagacccacacgtcaaagaacgcgaaccccgcggccccaacttctggcctctccgctccggcgcctgcagccccgcggggaaggggcgacgcgagggggcgcagggacagccccgcacctgggaggcccgagggggcgcccgggagggaggggctgcaaacggcggcgagcgcgcgcggcaaccgccaaacgcccgcctttgtagccccggccccgcgtccttaccctgccgacggctgctcggctccggcccgcggcggcggccccagagccgaggaccggggtgggctcgcgctcttcgtcactggagaagtccgggggccccttgctgttggtgccggcggggagcggcggccggttgcgagccgtgaggtgctgcaggtagagctggacgtacacgtctttgcgctgctccccggccggcagcgtcacattgttggcgaccaactcactcttcaacttgtcttttgtcaggaccgaggggtcttccaggaactccggcatctcggggatctgcgaagccccctccccacagcctttgccgccgccgctcacgccggcgcgcttgctcctggccggggaccgcgctgccgcctccgagcctcacggctcctgcccgggaagagcgctgcggagcggaacaaaaactcgcggacacaaagccaagccagacccggacacaaaagaccccagagccgaactacgaaccaactgcggccaagctggaagctcgcaccaaccccagcccacacactacaggcaggaggcgagcagcctgcttcgcccacgccccaagaacgcgcgccgccattggcgggcgacgggaggaagcgcggcggtgattggcgagacggctcgcgcgggttccattagccgccgcgctgagcgagaggaggtagaaacgcagtttaaaaggcgctggggcgggagccgaggctcccggcccgcttctgttttcgttttctccacccttccccttagacgccgataagggacaggtcgtactgcttttgtgcgccgtttcctctccctcccccagcttgagaagcagctttcgtctctggggtcgatcgcctacgaacgcgccgaattccacgccagtgtgaggacccttggctgggcctttcttcctcccgggacactgaagctccaagagtagccgcagccttgccttccccaaacgctagccctgaaggggaagaaaagaagcgaggcttgtctgcaggcactcatattccttgatttgatttactttgggagggggagggcggggagttacccctctcctcgcgaacgcttcttttgttccagaaacccaggggaagccagacctctaccatcgggcacttaaattacccttgaatttgtgacaaaagtgtactataccattcacttcttagtgtcatagttggggcatgtctaaattgtttaatttgaacagtgcgttcagacgcaagacaaattcgcgcttgcatttttgttgaaaccgtctctggctttggatcccaccacccgcaagaatcctaaacctaacgtttgataacaaaacgaaggagaacccttgggaaccccctcaatggtcaatttaaaataacagatggtgcataatcctaaaggaagactagtgacctataattaggcctagaaccctaatcaaacccgtattaccgatccaaattaaaacctggtagaatctaatacattgactgcaattaaaatgtttgcctggaaattag

SEQ ID NO: 292602 - DNA, 2205 bp, Homo sapiens
ctccagagctttcgaaagggcacggaagtccccgtctaaacgcccgctgcaggcggctggtggtccagggaagcggcgtcgactgcgtgcaaaacaaccgccgccaacgcaactccacacctcccagacccacacgtcaaagaacgcgaaccccgcggccccaacttctggcctctccgctccggcgcctgcagccccgcggggaaggggcgacgcgagggggcgcagggacagccccgcacctgggaggcccgagggggcgcccgggagggaggggctgcaaacggcggcgagcgcgcgcggcaaccgccaaacgcccgcctttgtagccccggccccgcgtccttaccctgccgacggctgctcggctccggcccgcggcggcggccccagagccgaggaccggggtgggctcgcgctcttcgtcactggagaagtccgggggccccttgctgttggtgccggcggggagcggcggccggttgcgagccgtgaggtgctgcaggaccgaggggtcttccaggaactccggcatctcggggatctgcgaagccccctccccacagcctttgccgccgccgctcacgccggcgcgcttgctcctggccggggaccgcgctgccgcctccgagcctcacggctcctgcccgggaagagcgctgcggagcggaacaaaaactcgcggacacaaagccaagccagacccggacacaaaagaccccagagccgaactacgaaccaactgcggccaagctggaagctcgcaccaaccccagcccacacactacaggcaggaggcgagcagcctgcttcgcccacgccccaagaacgcgcgccgccattggcgggcgacgggaggaagcgcggcggtgattggcgagacggctcgcgcgggttccattagccgccgcgctgagcgagaggaggtagaaacgcagtttaaaaggcgctggggcgggagccgaggctcccggcccgcttctgttttcgttttctccacccttccccttagacgccgataagggacaggtcgtactgcttttgtgcgccgtttcctctccctcccccagcttgagaagcagctttcgtctctggggtcgatcgcctacgaacgcgccgaattccacgccagtgtgaggacccttggctgggcctttcttcctcccgggacactgaagctccaagagtagccgcagccttgccttccccaaacgctagccctgaaggggaagaaaagaagcgaggcttgtctgcaggcactcatattccttgatttgatttactttgggagggggagggcggggagttacccctctcctcgcgaacgcttcttttgttccagaaacccaggggaagccagacctctaccatcgggcacttaaattacccttgaatttgtgacaaaagtgtactataccattcacttcttagtgtcatagttggggcatgtctaaattgtttaatttgaacagtgcgttcagacgcaagacaaattcgcgcttgcatttttgttgaaaccgtctctggctttggatcccaccacccgcaagaatcctaaacctaacgtttgataacaaaacgaaggagaacccttgggaaccccctcaatggtcaatttaaaataacagatggtgcataatcctaaaggaagactagtgacctataattaggcctagaaccctaatcaaacccgtattaccgatccaaattaaaacctggtagaatctaatacattgactgcaattaaaatgtttgcctggaaattagtatcactgatgacaaatatttgtatttctgatgaatatgtatgtttaaagatgctttctttctagaaaggaaaggagaccttggatgtagggtgtgttaatcatttccccagaatctgagctccaaactatgttttagaaactggttaaattttttttaaatgtttgcctgctttctacattgctaggttagaatacatttaaaacaaacgccttcactaaaaatgtttcctatgatttaagcgacttacttttattcaaattgcgatattatttcttttagtgataattattttcctagaggtaactaattcctttataaaaatctcagtattcacatacatttaagcaatggtattaagctcaataatgcaaattaaaaatcaggttttaattagcaagttgttaggtaggtttttatgatcccttgtaaaagttg

SEQ ID NO: 292603 - DNA, 1986 bp, Homo sapiens
ctccagagctttcgaaagggcacggaagtccccgtctaaacgcccgctgcaggcggctggtggtccagggaagcggcgtcgactgcgtgcaaaacaaccgccgccaacgcaactccacacctcccagacccacacgtcaaagaacgcgaaccccgcggccccaacttctggcctctccgctccggcgcctgcagccccgcggggaaggggcgacgcgagggggcgcagggacagccccgcacctgggaggcccgagggggcgcccgggagggaggggctgcaaacggcggcgagcgcgcgcggcaaccgccaaacgcccgcctttgtagccccggccccgcgtccttaccctgccgacggcgctcacgccggcgcgcttgctcctggccggggaccgcgctgccgcctccgagcctcacggctcctgcccgggaagagcgctgcggagcggaacaaaaactcgcggacacaaagccaagccagacccggacacaaaagaccccagagccgaactacgaaccaactgcggccaagctggaagctcgcaccaaccccagcccacacactacaggcaggaggcgagcagcctgcttcgcccacgccccaagaacgcgcgccgccattggcgggcgacgggaggaagcgcggcggtgattggcgagacggctcgcgcgggttccattagccgccgcgctgagcgagaggaggtagaaacgcagtttaaaaggcgctggggcgggagccgaggctcccggcccgcttctgttttcgttttctccacccttccccttagacgccgataagggacaggtcgtactgcttttgtgcgccgtttcctctccctcccccagcttgagaagcagctttcgtctctggggtcgatcgcctacgaacgcgccgaattccacgccagtgtgaggacccttggctgggcctttcttcctcccgggacactgaagctccaagagtagccgcagccttgccttccccaaacgctagccctgaaggggaagaaaagaagcgaggcttgtctgcaggcactcatattccttgatttgatttactttgggagggggagggcggggagttacccctctcctcgcgaacgcttcttttgttccagaaacccaggggaagccagacctctaccatcgggcacttaaattacccttgaatttgtgacaaaagtgtactataccattcacttcttagtgtcatagttggggcatgtctaaattgtttaatttgaacagtgcgttcagacgcaagacaaattcgcgcttgcatttttgttgaaaccgtctctggctttggatcccaccacccgcaagaatcctaaacctaacgtttgataacaaaacgaaggagaacccttgggaaccccctcaatggtcaatttaaaataacagatggtgcataatcctaaaggaagactagtgacctataattaggcctagaaccctaatcaaacccgtattaccgatccaaattaaaacctggtagaatctaatacattgactgcaattaaaatgtttgcctggaaattagtatcactgatgacaaatatttgtatttctgatgaatatgtatgtttaaagatgctttctttctagaaaggaaaggagaccttggatgtagggtgtgttaatcatttccccagaatctgagctccaaactatgttttagaaactggttaaattttttttaaatgtttgcctgctttctacattgctaggttagaatacatttaaaacaaacgccttcactaaaaatgtttcctatgatttaagcgacttacttttattcaaattgcgatattatttcttttagtgataattattttcctagaggtaactaattcctttataaaaatctcagtattcacatacatttaagcaatggtattaagctcaataatgcaaattaaaaatcaggttttaattagcaagttgttaggtaggtttttatgatcccttgtaaaagttg

SEQ ID NO: 292604 - DNA, 2334 bp, Homo sapiens
ctccagagctttcgaaagggcacggaagtccccgtctaaacgcccgctgcaggcggctggtggtccagggaagcggcgtcgactgcgtgcaaaacaaccgccgccaacgcaactccacacctcccagacccacacgtcaaagaacgcgaaccccgcggccccaacttctggcctctccgctccggcgcctgcagccccgcggggaaggggcgacgcgagggggcgcagggacagccccgcacctgggaggcccgagggggcgcccgggagggaggggctgcaaacggcggcgagcgcgcgcggcaaccgccaaacgcccgcctttgtagccccggccccgcgtccttaccctgccgacggctgctcggctccggcccgcggcggcggccccagagccgaggaccggggtgggctcgcgctcttcgtcactggagaagtccgggggccccttgctgttggtgccggcggggagcggcggccggttgcgagccgtgaggtgctgcaggtagagctggacgtacacgtctttgcgctgctccccggccggcagcgtcacattgttggcgaccaactcactcttcaacttgtcttttgtcaggaccgaggggtcttccaggaactccggcatctcggggatctgcgaagccccctccccacagcctttgccgccgccgctcacgccggcgcgcttgctcctggccggggaccgcgctgccgcctccgagcctcacggctcctgcccgggaagagcgctgcggagcggaacaaaaactcgcggacacaaagccaagccagacccggacacaaaagaccccagagccgaactacgaaccaactgcggccaagctggaagctcgcaccaaccccagcccacacactacaggcaggaggcgagcagcctgcttcgcccacgccccaagaacgcgcgccgccattggcgggcgacgggaggaagcgcggcggtgattggcgagacggctcgcgcgggttccattagccgccgcgctgagcgagaggaggtagaaacgcagtttaaaaggcgctggggcgggagccgaggctcccggcccgcttctgttttcgttttctccacccttccccttagacgccgataagggacaggtcgtactgcttttgtgcgccgtttcctctccctcccccagccgaactacgaaccaactgcggccaagctggaagctcgcaccaaccccagcccacacactacaggcaggaggcgagcagcctgcttcgcccacgccagtgtgaggacccttggctgggcctttcttcctcccgggacactgaagctccaagagtagccgcagccttgccttccccaaacgctagccctgaaggggaagaaaagaagcgaggcttgtctgcaggcactcatattccttgatttgatttactttgggagggggagggcggggagttacccctctcctcgcgaacgcttcttttgttccagaaacccaggggaagccagacctctaccatcgggcacttaaattacccttgaatttgtgacaaaagtgtactataccattcacttcttagtgtcatagttggggcatgtctaaattgtttaatttgaacagtgcgttcagacgcaagacaaattcgcgcttgcatttttgttgaaaccgtctctggctttggatcccaccacccgcaagaatcctaaacctaacgtttgataacaaaacgaaggagaacccttgggaaccccctcaatggtcaatttaaaataacagatggtgcataatcctaaaggaagactagtgacctataattaggcctagaaccctaatcaaacccgtattaccgatccaaattaaaacctggtagaatctaatacattgactgcaattaaaatgtttgcctggaaattagtatcactgatgacaaatatttgtatttctgatgaatatgtatgtttaaagatgctttctttctagaaaggaaaggagaccttggatgtagggtgtgttaatcatttccccagaatctgagctccaaactatgttttagaaactggttaaattttttttaaatgtttgcctgctttctacattgctaggttagaatacatttaaaacaaacgccttcactaaaaatgtttcctatgatttaagcgacttacttttattcaaattgcgatattatttcttttagtgataattattttcctagaggtaactaattcctttataaaaatctcagtattcacatacatttaagcaatggtattaagctcaataatgcaaattaaaaatcaggttttaattagcaagttgttaggtaggtttttatgatcccttgtaaaagttg

SEQ ID NO: 292605 - DNA, 2544 bp, Homo sapiens
cacaaaaaaagacaaaaaaaaaaaaagaaaatattttggcaggttatgtttaccaactggggcgggggtggggggggcccagggagcagggcttaggggctagcagcccacggggccacacagagaaacaaccacgcagacagtcacaccacggggacacacggacagacgcagacggacacagcgacatgccccagacacgttaagggactggttggccaaactcagacacgtggacagggatagacagaaagagacagaagctggggctacgtccatgtggacacagaccacagatgtgggcacacgaatccatccacctgtccacgtgcacacgtgaatgtagcgatagatatttggacatcaaatttggacaccaggtcacggagaaacacaaacaccacccaggaacacgcagacatatgcccatagcatcccacaggcccaggcaggaggtcccaccccagaccctgccccagacgctccctcaccctctcggccccctcgccctggcccccaggttctctgcagagatctctcctggacccccagcggtctccttggcgcccacgaacacaggcgtgcacacgcagcgcacatgcattgagacacacgatacctcgttccaccttggcgtcacggtgggctggaggcagcccccccccccacaacacttgaggccaaaggacacccctgtccccggggctcagcctccccctgggccgaggccttggcccacacagctgagggagaggcccagccctgagcctcccccaccaggactgggcctccccggcagcaagaccccggcactccccgccaggcccagggtggggtggatgggcccaaaggcccagccccacactcctttcccgtccacttgtcacctacctatcccctttcggtttgttgggtttttcgtctttccagattgcagtggacacagcccccgatctcgagccccggcccccggcttctgtctggacattgcatcgccctagttttctttctttaaaaaaaaaaaattccaacagaagccacaggccggagcccctgggagccctcgcaccgctccccaccccactcagcggccccatcggaactgagaattgcaaaacccccgactttagctatagttaagttgccttcccccggtgtccccacgtttggtgtctggctatggcgcccccatctgactgtccagctctctctcccccacccctcccggtgttgttattaaacgtctgtggagcttctgctgcaaggaacaaaaaagaaaaaaatcaaaaaagcgacaaaaaaacacaaacagaagaggaaaaaaaagcaacaaaaaaagaaaacacacagaagagatttaaaaaaaaaaaaaggaaaaaaaaaaaagacataaactggcaccagttaactttcttgtacttttttgctgaatttagcttcttgtagttttaacttattgctatgttaactatttattctcctcgttgccctgtaaggacatccgtgtatatttctgttacttcatccggtttgcaagttaaaggaacgacaatgttctctttgtttctttaagttttgccgagacatggttatgcctaatttatttataaaaggggaagtggaatcattaaagtaataataattattaataacagtaatggtagccgagtggcacgcgggggcgtgtgctctgcgggacagtccccacggccagcgacgtccaggtcaccaatgggattctttttgctcttgtcttgagaattttttcagtcctatttagctggtgaaatccctagcttgttcttgatacacgaacctatttattctcgtggttttaagtcctccctgccctctctcctctcccctgcagcagggcagggacccctctcccctgctgtctcttggggctctctcccctccgccctctgcattcgggaacacgcacgtccgcgtgggaagcttgcagcagggcgtccgagcaataagggctgggtttgtcccccaccctggggggggccaggctccagagagggggcacctccccacacaccccccccccaccgaggcctaggcccctgccacccccaagactgggaggggacttctttttctaaaacacaaaactcagcccagccaggccccctccctggaggccagcccctccccgcagggggccaggccggggctcccaggcgagggggacttggggcttccacgtccctggggggcaggggccaggccaggggggagggggctcagcccctccacccctcccttcatcctgttatttattcggaaggtttcaaatcacgacagagtccatgttggaggtgataaaaaactgtaaaaaaaaaaaaaaaaaaaaaagacaaaacaaaagacaaaaaaaaaaaaaaaaacccaacaagaacacttcgcgttgcgtttagactatttattaccgggatcacaggcctggccgcggtaacagacttttacatggaattgtttaattatttgtacttttcatgccagaaaataaaagttcagaatcttaaggccttg

SEQ ID NO: 292606 - DNA, 696 bp, Homo sapiens
  misc_feature (696)..(696): n is a, c, g, or t
cttgctgccggggtcttgctgccggggaggccagtcctggtgggggaggctcagtgactgggcctccccggcagcaagaccccggcactccccgccaggcccagggtggggtggatgggcccaaaggcccagccccacactcctttcccgtccacttgtcacctacctatcccctttcggtttgttgggtttttcgtctttccagattgcagtggacacagcccccgatctcgagccccggcccccggcttctgtctggacattgcatcgccctagttttctttctttaaaaaaaaacaaaaaacaaacccgagaacatagcttctcttcctcttaagaaacccaacctcccgaaccagcaacattgcataacaacttacacacacttccaaacgccgaaacctaccctattacctcaagtgtgaccgcaaataacttgggaccacagcggcaaccaagttatacccatagggcaataagacagcgcaactcctatatacttaaagtcaccatatattcgacaccacacaaggggcgtaaacaagacccacacagaatgcacggcgactcagagagaactcccgaatttggctccacgccagcaatataaaggcgtaacgcacggaacacccgaattaacaagcctacgatgaactagagataaaaccgagaaaaaacaaggccgggaaccaaccn

SEQ ID NO: 292607 - DNA, 336 bp, Homo sapiens
gggccccgcggggccgcgcagggggcgtcctcaaccccgcgcccgctccctctttccatcccctcccttcatcctgttatttattcggaaggtttcaaatcacgacagagtccatgttggaggtgataaaaaactgtaaaaaaaaaaaaaaaaaaaaaagacaaaacaaaagacaaaaaaaaaaaaaaaaacccaacaagaacacttcgcgttgcgtttagactatttattaccgggatcacaggcctggccgcggtaacagacttttacatggaattgtttaattatttgtacttttcatgccagaaaataaaagttcagaatcttaaggccttg

SEQ ID NO: 292608 - DNA, 2195 bp, Homo sapiens
cacaaaaaaagacaaaaaaaaaaaaagaaaatattttggcaggttatgtttaccaactggggcgggggtggggggggcccagggagcagggcttaggggctagcagcccacggggccacacagagaaacaaccacgcagacagtcacaccacggggacacacggacagacgcagacggacacagcgacatgccccagacacgttaagggactggttggccaaactcagacacgtggacagggatagacagaaagagacagaagctggggctacgtccatgtggacacagaccacagatgtgggcacacgaatccatccacctgtccacgtgcacacgtgaatgtagcgatagatatttggacatcaaatttggacaccaggtcacggagaaacacaaacaccacccaggaacacgcagacatatgcccatagcatcccacaggcccaggcaggaggtcccaccccagaccctgccccagacgctccctcaccctctcggccccctcgccctggcccccaggttctctgcagagatctctcctggacccccagcggtctccttggcgcccacgaacacaggcgtgcacacgcagcgcacatgcattgagacacacgatacctcgttccaccttggcgtcacggtgggctggaggcagcccccccccccacaacacttgaggccaaaggacacccctgtccccggggctcagcctccccctgggccgaggccttggcccacacagctgagggagaggcccagccctgagcctcccccaccaggactgggcctccccggcagcaagaccccggcactccccgccaggcccagggtggggtggatgggcccaaaggcccagccccacactcctttcccgtccacttgtcacctacctatcccctttcggtttgttgggtttttcgtctttccagattgcagtggacacagcccccgatctcgagccccggcccccggcttctgtctggacattgcatcgccctagttttctttctttaaaaaaaaaaaattccaacagaagccacaggccggagcccctgggagccctcgcaccgctccccaccccactcagcggccccatcggaactgagaattgcaaaacccccgactttagctatagttaagttgccttcccccggtgtccccacgtttggtgtctggctatggcgcccccatctgactgtccagctctctctcccccacccctcccggtgttgttattaaacgtctgtggagcttctgctgcaaggaacaaaaaagaaaaaaatcaaaaaagcgacaaaaaaacacaaacagaagaggaaaaaaaagcaacaaaaaaagaaaacacacagaagagatttaaaaaaaaaaaaaggaaaaaaaaaaaagacataaactggcaccagttaactttcttgtacttttttgctgaatttagcttcttgtagttttaacttattgctatgttaactatttattctcctcgttgccctgtaaggacatccgtgtatatttctgttacttcatccggtttgcaagttaaaggaacgacaatgttctctttgtttctttaagttttgccgagacatggttatgcctaatttatttataaaaggggaagtggaatcattaaagtaataataattattaataacagtaatggtagccgagtggcacgcgggggcgtgtgctctgcgggacagtccccacggccagcgacgtccaggtcaccaatgggattctttttgctcttgtcttgagaattttttcagtcctatttagctggtgaaatccctagcttgttcttgatacacgaacctatttattctcgtggttttaagtcctccctgccctctctcctctcccctgcagcagggcagggacccctctcccctgctgtctcttggggctctctcccctccgccctctgcattcgggaacacgcacgtccgcgtgggaagcttgcagcagggcgtccgagcaataagggctgggtttgtcccccaccctggggggggccaggctccagagagggggcacctccccacacacctctattaatgaggatgataagactgttgtcccaatgaactagaaggggcatatggagctctgaaatctactgaagatttgcttgtagcaaggttcctgggttctgttacttgatgcttggataggaatgaaatgccttttcgat

SEQ ID NO: 292609 - DNA, 1292 bp, Homo sapiens
  misc_feature (8)..(8): n is a, c, g, or t
  misc_feature (16)..(17): n is a, c, g, or t
  misc_feature (37)..(37): n is a, c, g, or t
cttctgtntgtctttnnctgtcgcttttttgattttnttcttttttgttccttgcagcagaagaggaaaaaaaagcaacaaaaaaagaaaacacacagaagagatttaaaaaaaaaaaaaggaaaaaaaaaaaagacataaactggcaccagttaactttcttgtacttttttgctgaatttagcttcttgtagttttaacttattgctatgttaactatttattctcctcgttgccctgtaaggacatccgtgtatatttctgttacttcatccggtttgcaagttaaaggaacgacaatgttctctttgtttctttaagttttgccgagacatggttatgcctaatttatttataaaaggggaagtggaatcattaaagtaataataattattaataacagtaatggtagccgagtggcacgcgggggcgtgtgctctgcgggacagtccccacggccagcgacgtccaggtcaccaatgggattctttttgctcttgtcttgagaattttttcagtcctatttagctggtgaaatccctagcttgttcttgatacacgaacctatttattctcgtggttttaagtcctccctgccctctctcctctcccctgcagcagggcagggacccctctcccctgctgtctcttggggctctctcccctccgccctctgcattcgggaacacgcacgtccgcgtgggaagcttgcagcagggcgtccgagcaataagggctgggtttgtcccccaccctggggggggccaggctccagagagggggcacctccccacacaccccccccccaccgaggcctaggcccctgccacccccaagactgggaggggacttctttttctaaaacacaaaactcagcccagccaggccccctccctggaggccagcccctccccgcagggggccaggccggggctcccaggcgagggggacttggggcttccacgtccctggggggcaggggccaggccaggggggagggggctcagcccctccacccctcccttcatcctgttatttattcggaaggtttcaaatcacgacagagtccatgttggaggtgataaaaaactgtaaaaaaaaaaaaaaaaaaaaaagacaaaacaaaagacaaaaaaaaaaaaaaaaacccaacaagaacacttcgcgttgcgtttagactatttattaccgggatcacaggcctggccgcggtaacagacttttacatggaattgtttaattatttgtacttttcatgccagaaaataaaagttcagaatcttaaggccttg

SEQ ID NO: 292610 - DNA, 814 bp, Homo sapiens
agcgcgcgctgtcccccggaggcgtctgggtgtgcggagcgcgcgcgcgcgcggctcggaggcgcacctgtgaggtgtccctgaggagagggaggtgggtgcgcggcgcccgcggcctggggcgctgactcccctcacttggaggcgccctgcgtccggcagaggaggcgagcatcccgctcaggtgatgaggaacccctcgcgcacccagcgcagaaggctgctgccgccggacgcctccattgtttgaccacaacaagggccggattctcacccaggtaaaccggctgccggcgctgtccacttccctctgactcccgcctccgcaggcgttctcaccccttccaggactcgactgcagttttctcactgtccccggcttctcatgaactccgtataccccctcccagacattttcccgtccggatccatctctccgccacatcacctctcatttcccccagaactcagctcctttgtgaaacctttcttgccgaactctaacaactaaatctccccgggagcctgctccgaactgaactgttctggttgctagattgcttacgggctgtcttattgcaacaaaggagaccagataccgaaaaaagatttctgagctattgccttcttcaaggaacgttttctgatatttacagtttattgttttcacaggctggaacggtttttaggcattttggcttcttatttagagagggctcctatttccttcatagacgcatagttttttagagcaggaaattgaccttgttcaacccgcaggttaattaaaaatttaaaaattaattctaaatta

SEQ ID NO: 292611 - DNA, 4299 bp, Homo sapiens
  misc_feature (3934)..(3935): n is a, c, g, or t
  misc_feature (3984)..(3984): n is a, c, g, or t
  misc_feature (4019)..(4019): n is a, c, g, or t
  misc_feature (4030)..(4030): n is a, c, g, or t
  misc_feature (4036)..(4036): n is a, c, g, or t
  misc_feature (4038)..(4039): n is a, c, g, or t
agcgcgcgctgtcccccggaggcgtctgggtgtgcggagcgcgcgcgcgcgcggctcggaggcgcacctgtgaggtgtccctgaggagagggagggcgccctgcgtccggcagaggaggcgagcatcccgctcaggtgatgaggaacccctcgcgcacccagcgcagaaggctgctgccgccggacgcctccattgtttgaccacaacaagggccggattctcacccaggatcctaaggcctttgtagtccttcagccactgtgggccctgcctctgcctgttcttctggaatgtcttgggggttttgatcctgtcactgtgacctgcaaatccaagagacacatctttggaagataagagagcttcttcaagaccaaaaaaggagacggcatgatacccatgtagggaattccccaaagcagggcttgccatacctggaccccgaggagcctgcttgctggaaaggctttcctgtctgatgtgcaggaggcagaatgccaaactgactcttcaaggggcaactgcaggggctcgagaccagccagcagtatctcatccttcgatacaggggatatactgtacagtcctttttctagaagtgagacatacaagattactctacaagaggaagattccaggggctcaaaaacgcaaaggtttgcactttgagagccccttggaatgttgacaactcaggatctaaaacaaagttctgtgttaatgagttacagaattcacgtggaagtcaatgtcactttataatcgataataatactgagtgaggaacactatgcaggaagaaaccttccgtagaaagacaggcagggaaaagcttaggctgaccttaaacttacctaatagagcaagcctgagatagactgccaaaatggccaaataagagactctatgaaataacagtcttgtaactgtagtaatcataaggaaattttctccttgaaatcacgataccaaataggaaaaatgatctacaagtgccccatgtgtagggaatttttctctgagagagcagatctttttatgcatcagaaaattcacacagctgagaagccccataaatgtgacaagtgtgataagggtttctttcatatatcagaacttcatattcattggagagaccatacaggagagaaggtctataaatgtgatgattgtggtaaggattttagcactacaacaaaacttaatagacataagaaaatccacacagtggagaagccctataaatgttacgagtgtggcaaagccttcaattggagctcccatcttcaaattcatatgagagttcatacaggtgagaaaccgtatgtctgtagtgagtgtggaaggggctttagtaatagttcaaacctttgcatgcatcagagagtccacaccggagagaagccctttaaatgtgaagagtgtgggaaggccttcaggcacacctccagcctctgcatgcatcaaagagtccacacaggagagaaaccctataaatgttatgagtgtgggaaggcgttcagtcagagttcgagcctctgcatccaccagagagtccacactggagagaaaccctatagatgttgtggatgtgggaaggccttcagtcagagttcgagcctgtgcatccaccagagagtccacacaggagagaaacctttcaaatgtgatgagtgcggaaaggccttcagtcagagtacgagcctctgcatccaccagagagtccacacaaaggagagaaaccatctcaaaatatcagttatataaaacgttttgctaagagtttaaaatcttaaaacccataagtgccactaggaaggaaaccctgtatatacctacattgacccaagaaatatttacgcaatccctagcagaacattgtttctgaggaggcatatgtgagattgatttgttggttcatgccaagtgtgttccacaggttgactttgaatgtggacctctgagcatccacgcaggatggctctcaggtcccagtcacagacgtcgcttcctgggattccagcacgatgcctccatagttgaaagactacacaaaaagccacaatcattgcccggcctcctgagtcaccttctatctatactttgcttaaaagctatcccagatactcccccttgaggagctcatgcccttccttcctctttattcgagcatactggcaatgcattggaaaacagacagctcccactaagatcacgttctggtatttctgaggttaacacttgatttagcccctacatatctttccatatatcctattatttctgaatatatgtcctcaaaatccccataaatatccatcccttcctagatggcattaactttcattttagattttaggtgactcataattcccattcacttagcctatcagaaaagtcattggcagacatatatgtccttgaaccttttttatttgtgtggattctgctcatcactgtctctgttagacttattttgtagtggctgcatcacatatttttcacttgaatttttttggaaatagctgaatgtaaatagcagggaggaagaagcaagcaaagtgagagcttttcttcatccagaattgccctctgggctcctttggtaacagatggagctccttcctagctagggagaccttatgagaagtggatggtaggaggagtcactaatgtttcaatctctatttctgtaatcttgggcaataatgcataggagttcttgataccccttcattgattactgtgtatcagttctttgttaggcatgaacgtctttattaatccatcattcttttcttcattcaacaaatatgtattgaacacctcctatatgccaggcactgtgctaggtgctgggaataccactgatgagacagacaaggtccctactcttgtggagtttacttctggtggaggagacagatgataagtaaacaaataaataatgtagtttgagatagtgattaagtgctatgaagaaaataaactagggtgatgattttagtggtggggtggggtgggggtggggtgacattagctagtggtcagggaggcctttccgcggtgggatgttgagctgaggccggaggagaagtagcagtcgctggcagagcacacaggctgctctgggggatgagctggtgcgtttaaggaacaggccagcactggcattcgcaagcagtggggaaggggagagatgccgaggtggtcagtatcctgactttcagaggcctttttttgtttgttttaatttttgctagattgatattaaaaactcatgtggaggaactcaaggaatgtttagaagaccaaaagtccccaatgacaggaacaaaagcaaccaatttttaactttctcttctcattcctgttttcattgatttcccacatgtagtccttttgctcaggaagtctttggggaaattaaggatctttgaagctctgaaataggtgatcaggttagtggtgtctgtcagctgtctaagaggttggaaaatgaactactcaagatagtcacgaaaatactgaaagtttgatttttctttccatatttgaattaattttttctgtttgactggaaggggtttttgtataactaaaacctcagcgcataaaggagatttaaaaggagcacatgatttagtgggtgggccatgaaactagagatgggatttgggggtgaatttgtcaatatctggattttaatccagacatctctgctaacaagcctttggtaagtcacttcagatacttttcctcctttttacaaagagagggctggcttagttatttgccaaagccccttccaggcctgaattccacaagtacgatttactgtagtgtcttatcactctttcatgtcacaatagcgtggagcattagagaaaagcctagacttttagttgatagccagttgaaatatcattgatnngaattttagttttaggaaaaatgggttgatttctagctttattactatnaggtatgtgagcttgggcaaatcgcttaatcttgnggtctagtttnctctcnannatgagaacattaggctaaatgatttcccgagttccagctagtcctaggagttctataatttctacattagttgaacttatttcatcatgctgtttgctggggaatatgactaaccccttttgaagctactaatttaatgtcgagcttaaaggccataattgtatttcagaacatattattgacttacggttgtccaatcaatttataaatcgtttttaccggaaaaaaacacaaaaaaaaaatttggggcccccaaaatt

SEQ ID NO: 292612 - DNA, 4255 bp, Homo sapiens
  misc_feature (3890)..(3891): n is a, c, g, or t
  misc_feature (3940)..(3940): n is a, c, g, or t
  misc_feature (3975)..(3975): n is a, c, g, or t
  misc_feature (3986)..(3986): n is a, c, g, or t
  misc_feature (3992)..(3992): n is a, c, g, or t
  misc_feature (3994)..(3995): n is a, c, g, or t
agcgcgcgctgtcccccggaggcgtctgggtgtgcggagcgcgcgcgcgcgcggctcggaggcgcacctgtgaggtgtccctgaggagagggaggtgggtgcgcggcgcccgcggcctggggcgctgactcccctcacttggaggcgccctgcgtccggcagaggaggcgagcatcccgctcaggtgatgaggaacccctcgcgcacccagcgcagaaggctgctgccgccggacgcctccattgtttgaccacaacaagggccggattctcacccagacctgcaaatccaagagacacatctttggaagataagagagcttcttcaagaccaaaaaaggagacggcatgatacccatgtagggaattccccaaagcagggcttgccatacctggaccccgaggagcctgcttgctggaaaggctttcctgtctgatgtgcaggaggcagaatgccaaactgactcttcaaggggcaactgcaggggctcgagaccagccagcagtatctcatccttcgatacaggggatatactgtacagtcctttttctagaagtgagacatacaagattactctacaagaggaagattccaggggctcaaaaacgcaaaggtttgcactttgagagccccttggaatgttgacaactcaggatctaaaacaaagttctgtgttaatgagttacagaattcacgtggaagtcaatgtcactttataatcgataataatactgagtgaggaacactatgcaggaagaaaccttccgtagaaagacaggcagggaaaagcttaggctgaccttaaacttacctaatagagcaagcctgagatagactgccaaaatggccaaataagagactctatgaaataacagtcttgtaactgtagtaatcataaggaaattttctccttgaaatcacgataccaaataggaaaaatgatctacaagtgccccatgtgtagggaatttttctctgagagagcagatctttttatgcatcagaaaattcacacagctgagaagccccataaatgtgacaagtgtgataagggtttctttcatatatcagaacttcatattcattggagagaccatacaggagagaaggtctataaatgtgatgattgtggtaaggattttagcactacaacaaaacttaatagacataagaaaatccacacagtggagaagccctataaatgttacgagtgtggcaaagccttcaattggagctcccatcttcaaattcatatgagagttcatacaggtgagaaaccgtatgtctgtagtgagtgtggaaggggctttagtaatagttcaaacctttgcatgcatcagagagtccacaccggagagaagccctttaaatgtgaagagtgtgggaaggccttcaggcacacctccagcctctgcatgcatcaaagagtccacacaggagagaaaccctataaatgttatgagtgtgggaaggcgttcagtcagagttcgagcctctgcatccaccagagagtccacactggagagaaaccctatagatgttgtggatgtgggaaggccttcagtcagagttcgagcctgtgcatccaccagagagtccacacaggagagaaacctttcaaatgtgatgagtgcggaaaggccttcagtcagagtacgagcctctgcatccaccagagagtccacacaaaggagagaaaccatctcaaaatatcagttatataaaacgttttgctaagagtttaaaatcttaaaacccataagtgccactaggaaggaaaccctgtatatacctacattgacccaagaaatatttacgcaatccctagcagaacattgtttctgaggaggcatatgtgagattgatttgttggttcatgccaagtgtgttccacaggttgactttgaatgtggacctctgagcatccacgcaggatggctctcaggtcccagtcacagacgtcgcttcctgggattccagcacgatgcctccatagttgaaagactacacaaaaagccacaatcattgcccggcctcctgagtcaccttctatctatactttgcttaaaagctatcccagatactcccccttgaggagctcatgcccttccttcctctttattcgagcatactggcaatgcattggaaaacagacagctcccactaagatcacgttctggtatttctgaggttaacacttgatttagcccctacatatctttccatatatcctattatttctgaatatatgtcctcaaaatccccataaatatccatcccttcctagatggcattaactttcattttagattttaggtgactcataattcccattcacttagcctatcagaaaagtcattggcagacatatatgtccttgaaccttttttatttgtgtggattctgctcatcactgtctctgttagacttattttgtagtggctgcatcacatatttttcacttgaatttttttggaaatagctgaatgtaaatagcagggaggaagaagcaagcaaagtgagagcttttcttcatccagaattgccctctgggctcctttggtaacagatggagctccttcctagctagggagaccttatgagaagtggatggtaggaggagtcactaatgtttcaatctctatttctgtaatcttgggcaataatgcataggagttcttgataccccttcattgattactgtgtatcagttctttgttaggcatgaacgtctttattaatccatcattcttttcttcattcaacaaatatgtattgaacacctcctatatgccaggcactgtgctaggtgctgggaataccactgatgagacagacaaggtccctactcttgtggagtttacttctggtggaggagacagatgataagtaaacaaataaataatgtagtttgagatagtgattaagtgctatgaagaaaataaactagggtgatgattttagtggtggggtggggtgggggtggggtgacattagctagtggtcagggaggcctttccgcggtgggatgttgagctgaggccggaggagaagtagcagtcgctggcagagcacacaggctgctctgggggatgagctggtgcgtttaaggaacaggccagcactggcattcgcaagcagtggggaaggggagagatgccgaggtggtcagtatcctgactttcagaggcctttttttgtttgttttaatttttgctagattgatattaaaaactcatgtggaggaactcaaggaatgtttagaagaccaaaagtccccaatgacaggaacaaaagcaaccaatttttaactttctcttctcattcctgttttcattgatttcccacatgtagtccttttgctcaggaagtctttggggaaattaaggatctttgaagctctgaaataggtgatcaggttagtggtgtctgtcagctgtctaagaggttggaaaatgaactactcaagatagtcacgaaaatactgaaagtttgatttttctttccatatttgaattaattttttctgtttgactggaaggggtttttgtataactaaaacctcagcgcataaaggagatttaaaaggagcacatgatttagtgggtgggccatgaaactagagatgggatttgggggtgaatttgtcaatatctggattttaatccagacatctctgctaacaagcctttggtaagtcacttcagatacttttcctcctttttacaaagagagggctggcttagttatttgccaaagccccttccaggcctgaattccacaagtacgatttactgtagtgtcttatcactctttcatgtcacaatagcgtggagcattagagaaaagcctagacttttagttgatagccagttgaaatatcattgatnngaattttagttttaggaaaaatgggttgatttctagctttattactatnaggtatgtgagcttgggcaaatcgcttaatcttgnggtctagtttnctctcnannatgagaacattaggctaaatgatttcccgagttccagctagtcctaggagttctataatttctacattagttgaacttatttcatcatgctgtttgctggggaatatgactaaccccttttgaagctactaatttaatgtcgagcttaaaggccataattgtatttcagaacatattattgacttacggttgtccaatcaatttataaatcgtttttaccggaaaaaaacacaaaaaaaaaatttggggcccccaaaatt

SEQ ID NO: 292613 - DNA, 4243 bp, Homo sapiens
  misc_feature (3878)..(3879): n is a, c, g, or t
  misc_feature (3928)..(3928): n is a, c, g, or t
  misc_feature (3963)..(3963): n is a, c, g, or t
  misc_feature (3974)..(3974): n is a, c, g, or t
  misc_feature (3980)..(3980): n is a, c, g, or t
  misc_feature (3982)..(3983): n is a, c, g, or t
agcgcgcgctgtcccccggaggcgtctgggtgtgcggagcgcgcgcgcgcgcggctcggaggcgcacctgtgaggtgtccctgaggagagggagggcgccctgcgtccggcagaggaggcgagcatcccgctcaggtgatgaggaacccctcgcgcacccagcgcagaaggctgctgccgccggacgcctccattgtttgaccacaacaagggccggattctcacccaggatcctaaggcctttgtagtccttcagccactgtgggccctgcctctgcctgttcttctggaatgtcttgggggttttgatcctgtcactgtgacctgcaaatccaagagacacatctttggaagataagagagcttcttcaagaccaaaaaaggagacggcatgatacccatgtagggaattccccaaagcagggcttgccatacctggaccccgaggagcctgcttgctggaaaggctttcctgtctgatgtgcaggaggcagaatgccaaactgactcttcaaggggcaactgcaggggctcgagaccagccagcagtatctcatccttcgatacaggggatatactgtacagtcctttttctagaagtgagacatacaagattactctacaagaggaagattccaggggctcaaaaacgcaaaggtttgcactttgagagccccttggaatgttgacaactcaggatctaaaacaaagttctgtgttaatgagttacagaattcacgtggaagtcaatgtcactttataatcgataataatactgagtgaggaacactatgcaggaagaaaccttccgtagaaagacaggcagggaaaagcttaggctgaccttaaacttacctaatagagcaagcctgagatagactgccaaaatggccaaataagagactctatgaaataacagtcttgtaactgtagtaatcataaggaaattttctccttgaaatcacgataccaaataggaaaaatgatctacaagtgccccatgtgtagggaatttttctctgagagagcagatctttttatgcatcagaaaattcacacagctgagaagccccataaatgtgacaagtgtgataagggtttctttcatatatcagaacttcatattcattggagagaccatacaggagagaaggtctataaatgtgatgattgtggtaaggattttagcactacaacaaaacttaatagacataagaaaatccacacagtggagaagccctataaatgttacgagtgtggcaaagccttcaattggagctcccatcttcaaattcatatgagagttcatacaggtgagaaaccgtatgtctgtagtgagtgtggaaggggctttagtaatagttcaaacctttgcatgcatcagagagtccacaccggagagaagccctttaaatgtgaagagtgtgggaaggccttcaggcacacctccagcctctgcatgcatcaaagagtccacacaggagagaaaccctataaatgttatgagtgtgggaaggcgttcagtcagagttcgagcctctgcatccaccagagagtccacactggagagaaaccctatagatgttgtggatgtgggaaggccttcagtcagagttcgagcctgtgcatccaccagagagtccacacaggagagaaacctttcaaatgtgatgagtgcggaaaggccttcagtcagagtacgagcctctgcatccaccagagagtccacacaaaggagagaaaccatctcaaaatatcagttatataaaacgttttgctaagagtttaaaatcttaaaacccataagtgccactaggaaggaaaccctgtatatacctacattgacccaagaaatatttacgcaatccctagcagaacattgtttctgaggaggcatatgtgagattgatttgttggttcatgccaagtgtgttccacaggttgactttgaatgtggacctctgagcatccacgcaggatggctctcaggtcccagtcacagacgtcgcttcctgggattccagcacgatgcctccatagttgaaagactacacaaaaagccacaatcattgcccggcctcctgagtcaccttctatctatactttgcttaaaagctatcccagatactcccccttgaggagctcatgcccttccttcctctttattcgagcatactggcaatgcattggaaaacagacagctcccactaagatcacgttctggtatttctgaggttaacacttgatttagcccctacatatctttccatatatcctattatttctgaatatatgtcattttaggtgactcataattcccattcacttagcctatcagaaaagtcattggcagacatatatgtccttgaaccttttttatttgtgtggattctgctcatcactgtctctgttagacttattttgtagtggctgcatcacatatttttcacttgaatttttttggaaatagctgaatgtaaatagcagggaggaagaagcaagcaaagtgagagcttttcttcatccagaattgccctctgggctcctttggtaacagatggagctccttcctagctagggagaccttatgagaagtggatggtaggaggagtcactaatgtttcaatctctatttctgtaatcttgggcaataatgcataggagttcttgataccccttcattgattactgtgtatcagttctttgttaggcatgaacgtctttattaatccatcattcttttcttcattcaacaaatatgtattgaacacctcctatatgccaggcactgtgctaggtgctgggaataccactgatgagacagacaaggtccctactcttgtggagtttacttctggtggaggagacagatgataagtaaacaaataaataatgtagtttgagatagtgattaagtgctatgaagaaaataaactagggtgatgattttagtggtggggtggggtgggggtggggtgacattagctagtggtcagggaggcctttccgcggtgggatgttgagctgaggccggaggagaagtagcagtcgctggcagagcacacaggctgctctgggggatgagctggtgcgtttaaggaacaggccagcactggcattcgcaagcagtggggaaggggagagatgccgaggtggtcagtatcctgactttcagaggcctttttttgtttgttttaatttttgctagattgatattaaaaactcatgtggaggaactcaaggaatgtttagaagaccaaaagtccccaatgacaggaacaaaagcaaccaatttttaactttctcttctcattcctgttttcattgatttcccacatgtagtccttttgctcaggaagtctttggggaaattaaggatctttgaagctctgaaataggtgatcaggttagtggtgtctgtcagctgtctaagaggttggaaaatgaactactcaagatagtcacgaaaatactgaaagtttgatttttctttccatatttgaattaattttttctgtttgactggaaggggtttttgtataactaaaacctcagcgcataaaggagatttaaaaggagcacatgatttagtgggtgggccatgaaactagagatgggatttgggggtgaatttgtcaatatctggattttaatccagacatctctgctaacaagcctttggtaagtcacttcagatacttttcctcctttttacaaagagagggctggcttagttatttgccaaagccccttccaggcctgaattccacaagtacgatttactgtagtgtcttatcactctttcatgtcacaatagcgtggagcattagagaaaagcctagacttttagttgatagccagttgaaatatcattgatnngaattttagttttaggaaaaatgggttgatttctagctttattactatnaggtatgtgagcttgggcaaatcgcttaatcttgnggtctagtttnctctcnannatgagaacattaggctaaatgatttcccgagttccagctagtcctaggagttctataatttctacattagttgaacttatttcatcatgctgtttgctggggaatatgactaaccccttttgaagctactaatttaatgtcgagcttaaaggccataattgtatttcagaacatattattgacttacggttgtccaatcaatttataaatcgtttttaccggaaaaaaacacaaaaaaaaaatttggggcccccaaaatt

SEQ ID NO: 292614 - DNA, 4132 bp, Homo sapiens
  misc_feature (3767)..(3768): n is a, c, g, or t
  misc_feature (3817)..(3817): n is a, c, g, or t
  misc_feature (3852)..(3852): n is a, c, g, or t
  misc_feature (3863)..(3863): n is a, c, g, or t
  misc_feature (3869)..(3869): n is a, c, g, or t
  misc_feature (3871)..(3872): n is a, c, g, or t
agcgcgcgctgtcccccggaggcgtctgggtgtgcggagcgcgcgcgcgcgcggctcggaggcgcacctgtgaggtgtccctgaggagagggagggcgccctgcgtccggcagaggaggcgagcatcccgctcaggtgatgaggaacccctcgcgcacccagcgcagaaggctgctgccgccggacgcctccattgtttgaccacaacaagggccggattctcacccaggatcctaaggcctttgtagtccttcagccactgtgggccctgcctctgcctgttcttctggaatgtcttgggggttttgatcctgtcactgtgacctgcaaatccaagagacacatctttggaagataagagagcttcttcaagaccaaaaaaggagacggcatgatacccatgtagggaattccccaaagcagggcttgccatacctggaccccgaggagcctgcttgctggaaaggctttcctgtctgatgtgcaggaggcagaatgccaaactgactcttcaaggggcaactgcaggggctcgagaccagccagcagtatctcatccttcgatacaggggatatactgtacagtcctttttctagaagtgagacatacaagattactctacaagaggaagattccaggggctcaaaaacgcaaaggtttgcactttgagagccccttggaatgttgacaactcaggatctaaaacaaagttctgtgttaatgagttacagaattcacgtggaagtcaatgtcactttataatcgataataatactgagtgaggaacactatgcaggaagaaaccttccgtagaaagacaggcagggaaaagcttaggctgaccttaaacttacctaatagagcaagcctgagatagactgccaaaatggccaaataagagactctatgaaataacagtcttgtaactgtagtaatcataaggaaattttctccttgaaatcacgataccaaataggaaaaatgatctacaagtgccccatgtgtagggaatttttctctgagagagcagatctttttatgcatcagaaaattcacacagctgagaagccccataaatgtgacaagtgtgataagggtttctttcatatatcagaacttcatattcattggagagaccatacaggagagaaggtctataaatgtgatgattgtggtaaggattttagcactacaacaaaacttaatagacataagaaaatccacacagtggagaagccctataaatgttacgagtgtggcaaagccttcaattggagctcccatcttcaaattcatatgagagttcatacaggtgagaaaccgtatgtctgtagtgagtgtggaaggggctttagtaatagttcaaacctttgcatgcatcagagagtccacaccggagagaagccctttaaatgtgaagagtgtgggaaggccttcaggcacacctccagcctctgcatgcatcaaagagtccacacaggagagaaaccctataaatgttatgagtgtgggaaggcgttcagtcagaagtacgagcctctgcatccaccagagagtccacacaaaggagagaaaccatctcaaaatatcagttatataaaacgttttgctaagagtttaaaatcttaaaacccataagtgccactaggaaggaaaccctgtatatacctacattgacccaagaaatatttacgcaatccctagcagaacattgtttctgaggaggcatatgtgagattgatttgttggttcatgccaagtgtgttccacaggttgactttgaatgtggacctctgagcatccacgcaggatggctctcaggtcccagtcacagacgtcgcttcctgggattccagcacgatgcctccatagttgaaagactacacaaaaagccacaatcattgcccggcctcctgagtcaccttctatctatactttgcttaaaagctatcccagatactcccccttgaggagctcatgcccttccttcctctttattcgagcatactggcaatgcattggaaaacagacagctcccactaagatcacgttctggtatttctgaggttaacacttgatttagcccctacatatctttccatatatcctattatttctgaatatatgtcctcaaaatccccataaatatccatcccttcctagatggcattaactttcattttagattttaggtgactcataattcccattcacttagcctatcagaaaagtcattggcagacatatatgtccttgaaccttttttatttgtgtggattctgctcatcactgtctctgttagacttattttgtagtggctgcatcacatatttttcacttgaatttttttggaaatagctgaatgtaaatagcagggaggaagaagcaagcaaagtgagagcttttcttcatccagaattgccctctgggctcctttggtaacagatggagctccttcctagctagggagaccttatgagaagtggatggtaggaggagtcactaatgtttcaatctctatttctgtaatcttgggcaataatgcataggagttcttgataccccttcattgattactgtgtatcagttctttgttaggcatgaacgtctttattaatccatcattcttttcttcattcaacaaatatgtattgaacacctcctatatgccaggcactgtgctaggtgctgggaataccactgatgagacagacaaggtccctactcttgtggagtttacttctggtggaggagacagatgataagtaaacaaataaataatgtagtttgagatagtgattaagtgctatgaagaaaataaactagggtgatgattttagtggtggggtggggtgggggtggggtgacattagctagtggtcagggaggcctttccgcggtgggatgttgagctgaggccggaggagaagtagcagtcgctggcagagcacacaggctgctctgggggatgagctggtgcgtttaaggaacaggccagcactggcattcgcaagcagtggggaaggggagagatgccgaggtggtcagtatcctgactttcagaggcctttttttgtttgttttaatttttgctagattgatattaaaaactcatgtggaggaactcaaggaatgtttagaagaccaaaagtccccaatgacaggaacaaaagcaaccaatttttaactttctcttctcattcctgttttcattgatttcccacatgtagtccttttgctcaggaagtctttggggaaattaaggatctttgaagctctgaaataggtgatcaggttagtggtgtctgtcagctgtctaagaggttggaaaatgaactactcaagatagtcacgaaaatactgaaagtttgatttttctttccatatttgaattaattttttctgtttgactggaaggggtttttgtataactaaaacctcagcgcataaaggagatttaaaaggagcacatgatttagtgggtgggccatgaaactagagatgggatttgggggtgaatttgtcaatatctggattttaatccagacatctctgctaacaagcctttggtaagtcacttcagatacttttcctcctttttacaaagagagggctggcttagttatttgccaaagccccttccaggcctgaattccacaagtacgatttactgtagtgtcttatcactctttcatgtcacaatagcgtggagcattagagaaaagcctagacttttagttgatagccagttgaaatatcattgatnngaattttagttttaggaaaaatgggttgatttctagctttattactatnaggtatgtgagcttgggcaaatcgcttaatcttgnggtctagtttnctctcnannatgagaacattaggctaaatgatttcccgagttccagctagtcctaggagttctataatttctacattagttgaacttatttcatcatgctgtttgctggggaatatgactaaccccttttgaagctactaatttaatgtcgagcttaaaggccataattgtatttcagaacatattattgacttacggttgtccaatcaatttataaatcgtttttaccggaaaaaaacacaaaaaaaaaatttggggcccccaaaatt

SEQ ID NO: 292615 - DNA, 2828 bp, Homo sapiens
  misc_feature (2463)..(2464): n is a, c, g, or t
  misc_feature (2513)..(2513): n is a, c, g, or t
  misc_feature (2548)..(2548): n is a, c, g, or t
  misc_feature (2559)..(2559): n is a, c, g, or t
  misc_feature (2565)..(2565): n is a, c, g, or t
  misc_feature (2567)..(2568): n is a, c, g, or t
ctgatcggacatggtacattcttgagagccactaacaatatggaacaggatcacacatctgctcccttattgttaaagatgagaaaaccctcggagagaagccctttaaatgtgaagagtgtgggaaggccttcaggcacacctccagcctctgcatgcatcaaagagtccacacaggagagaaaccctataaatgttatgagtgtgggaaggcgttcagtcagaagtacgagcctctgcatccaccagagagtccacacaaaggagagaaaccatctcaaaatatcagttatataaaacgttttgctaagagtttaaaatcttaaaacccataagtgccactaggaaggaaaccctgtatatacctacattgacccaagaaatatttacgcaatccctagcagaacattgtttctgaggaggcatatgtgagattgatttgttggttcatgccaagtgtgttccacaggttgactttgaatgtggacctctgagcatccacgcaggatggctctcaggtcccagtcacagacgtcgcttcctgggattccagcacgatgcctccatagttgaaagactacacaaaaagccacaatcattgcccggcctcctgagtcaccttctatctatactttgcttaaaagctatcccagatactcccccttgaggagctcatgcccttccttcctctttattcgagcatactggcaatgcattggaaaacagacagctcccactaagatcacgttctggtatttctgaggttaacacttgatttagcccctacatatctttccatatatcctattatttctgaatatatgtcctcaaaatccccataaatatccatcccttcctagatggcattaactttcattttagattttaggtgactcataattcccattcacttagcctatcagaaaagtcattggcagacatatatgtccttgaaccttttttatttgtgtggattctgctcatcactgtctctgttagacttattttgtagtggctgcatcacatatttttcacttgaatttttttggaaatagctgaatgtaaatagcagggaggaagaagcaagcaaagtgagagcttttcttcatccagaattgccctctgggctcctttggtaacagatggagctccttcctagctagggagaccttatgagaagtggatggtaggaggagtcactaatgtttcaatctctatttctgtaatcttgggcaataatgcataggagttcttgataccccttcattgattactgtgtatcagttctttgttaggcatgaacgtctttattaatccatcattcttttcttcattcaacaaatatgtattgaacacctcctatatgccaggcactgtgctaggtgctgggaataccactgatgagacagacaaggtccctactcttgtggagtttacttctggtggaggagacagatgataagtaaacaaataaataatgtagtttgagatagtgattaagtgctatgaagaaaataaactagggtgatgattttagtggtggggtggggtgggggtggggtgacattagctagtggtcagggaggcctttccgcggtgggatgttgagctgaggccggaggagaagtagcagtcgctggcagagcacacaggctgctctgggggatgagctggtgcgtttaaggaacaggccagcactggcattcgcaagcagtggggaaggggagagatgccgaggtggtcagtatcctgactttcagaggcctttttttgtttgttttaatttttgctagattgatattaaaaactcatgtggaggaactcaaggaatgtttagaagaccaaaagtccccaatgacaggaacaaaagcaaccaatttttaactttctcttctcattcctgttttcattgatttcccacatgtagtccttttgctcaggaagtctttggggaaattaaggatctttgaagctctgaaataggtgatcaggttagtggtgtctgtcagctgtctaagaggttggaaaatgaactactcaagatagtcacgaaaatactgaaagtttgatttttctttccatatttgaattaattttttctgtttgactggaaggggtttttgtataactaaaacctcagcgcataaaggagatttaaaaggagcacatgatttagtgggtgggccatgaaactagagatgggatttgggggtgaatttgtcaatatctggattttaatccagacatctctgctaacaagcctttggtaagtcacttcagatacttttcctcctttttacaaagagagggctggcttagttatttgccaaagccccttccaggcctgaattccacaagtacgatttactgtagtgtcttatcactctttcatgtcacaatagcgtggagcattagagaaaagcctagacttttagttgatagccagttgaaatatcattgatnngaattttagttttaggaaaaatgggttgatttctagctttattactatnaggtatgtgagcttgggcaaatcgcttaatcttgnggtctagtttnctctcnannatgagaacattaggctaaatgatttcccgagttccagctagtcctaggagttctataatttctacattagttgaacttatttcatcatgctgtttgctggggaatatgactaaccccttttgaagctactaatttaatgtcgagcttaaaggccataattgtatttcagaacatattattgacttacggttgtccaatcaatttataaatcgtttttaccggaaaaaaacacaaaaaaaaaatttggggcccccaaaatt

SEQ ID NO: 292616 - DNA, 4244 bp, Homo sapiens
  misc_feature (3879)..(3880): n is a, c, g, or t
  misc_feature (3929)..(3929): n is a, c, g, or t
  misc_feature (3964)..(3964): n is a, c, g, or t
  misc_feature (3975)..(3975): n is a, c, g, or t
  misc_feature (3981)..(3981): n is a, c, g, or t
  misc_feature (3983)..(3984): n is a, c, g, or t
agcgcgcgctgtcccccggaggcgtctgggtgtgcggagcgcgcgcgcgcgcggctcggaggcgcacctgtgaggtgtccctgaggagagggagggcgccctgcgtccggcagaggaggcgagcatcccgctcaggtgatgaggaacccctcgcgcacccagcgcagaaggctgctgccgccggacgcctccattgtttgaccacaacaagggccggattctcacccaggatcctaaggcctttgtagtccttcagccactgtgggccctgcctctgcctgttcttctggaatgtcttgggggttttgatcctgtcactgtgacctgcaaatccaagagacacatctttggaagataagagagcttcttcaagaccaaaaaaggagacggcatgatacccatgtagggaattccccaaagcagggcttgccatacctggaccccgaggagcctgcttgctggaaaggctttcctgtctgatgtgcaggaggcagaatgccaaactgactcttcaaggggcaactgcaggggctcgagaccagccagcagtatctcatccttcgatacaggggatatactgtacagtcctttttctagaagtgagacatacaagattactctacaagaggaagattccaggggctcaaaaacgcaaaggtttgcactttgagagccccttggaatgttgacaactcaggatctaaaacaaagttctgtgttaatgagttacagaattcacgtggaagtcaatgtcactttataatcgataataatactgagtgaggaacactatgcaggaagaaaccttccgtagaaagacaggcagggaaaagcttaggctgaccttaaacttacctaatagagcaagcctgagatagactgccaaaatggccaaataagagactctatgaaataacagtcttgtaactgtagtaatcataaggaaattttctccttgaaatcacgataccaaataggaaaaatgatctacaagtgccccatgtgtagggaatttttctctgagagagcagatctttttatgcatcagaaaattcacacagctgagaagccccataaatgtgacaagtgtgataagggtttctttcatatatcagaacttcatattcattggagagaccatacaggagagaaggtctataaatgtgatgattgtggtaaggattttagcactacaacaaaacttaatagacataagaaaatccacacagtggagaagccctataaatgttacgagtgtggcaaagccttcaattggagctcccatcttcaaattcatatgagagttcatacaggtgagaaaccgtatgtctgtagtgagtgtggaaggggctttagtaatagttcaaacctttgcatgcatcagagagtccacaccggagagaagccctttaaatgtgaagagtgtgggaaggccttcaggcacacctccagcctctgcatgcatcaaagagtccacacaggagagaaaccctataaatgttatgagtgtgggaaggcgttcagtcagagttcgagcctctgcatccaccagagagtccacactggagagaaaccctatagatgttgtggatgtgggaaggccttcagtcagagttcgagcctgtgcatccaccagagagtccacacaggagagaaacctttcaaatgtgatgagtgcggaaaggccttcagtcagagtacgagcctctgcatccaccagagagtccacacaaaggagagaaaccatctcaaaatatcagttatataaaacgttttgctaagagtttaaaatcttaaaacccataagtgccactaggaaggaaaccctgtatatacctacattgacccaagaaatatttacgcaatccctagcagaacattgtttctgaggaggcatatgtgagattgatttgttggttcatgccaagtgtgttccacaggttgactttgaatgtggacctctgagcatccacgcaggatggctctcaggtcccagtcacagacgtcgcttcctgggattccagcacgatgcctccatagttgaaagactacacaaaaagccacaatcattgcccggcctcctgagtcaccttctatctatactttgcttaaaagctatcccagatactcccccttgaggagctcatgcccttccttcctctttattcgagcatactggcaatgcattggaaaacagacagctcccactaagatcacgttctggtatttctgaggttaacacttgatttagcccctacatatctttccatatatcctattatttctgaatatatgtcctcaaaatccccataaatatccatcccttcctagatggcattaactttcattttagattttaggtgactcataattcccattcacttagcctatcagaaaagtcattggcagacatatatgtccttgaaccttttttatttgtgtggattctgctcatcactgtctctgttagacttattttgtagtggctgcatcacatatttttcacttgaatttttttggaaatagctgaatgtaaatagcagggaggaagaagcaagcaaagtgagagcttttcttcatccagaattgccctctgggctcctttggtaacagatggagctccttcctagctagggagaccttatgagaagtggatggtaggaggagtcactaatgtttcaatctctatttctgtaatcttgggcaataatgcataggagttcttgataccccttcattgattactgtgtatcagttctttgttaggcatgaacgtctttattaatccatcattcttttcttcattcaacaaatatgtattgaacacctcctatatgccaggcactgtgctaggtgctgggaataccactgatgagacagacaaggtccctactcttgtggagtttacttctggtggaggagacagatgataagtaaacaaataaataatgtagtttgagatagtgattaagtgctatgaagaaaataaactagggtgatgattttagtggtggggtggggtgggggtggggtgacattagctagtggtcagggaggcctttccgcggtgggatgttgagctgaggccggaggagaagtagcagtcgctggcagagcacacaggctgctctgggggatgagctggtgcgtttaaggaacaggccagcactggcattcgcaagcagtggggaaggggagagatgccgaggtggtcagtatcctgactttcagaggcctttttttgtttgttttaatttttgctagattgatattaaaaactcatgtggaggaactcaaggaatgtttagaagaccaaaagtccccaatgacaggaacaaaagcaaccaatttttaactttctcttctcattcctgttttcattgatttcccacatgtagtccttttgctcaggaagtctttggggaaattaaggatctttgaagctctgaaataggtgatcaggttagtggtgtctgtcagctgtctaagaggttggaaaatgaactactcaagatagtcacgaaaatactgaaagtttgatttttctttccatatttgaattaattttttctgtttgactggaaggggtttttgtataactaaaacctcagcgcatgggatttgggggtgaatttgtcaatatctggattttaatccagacatctctgctaacaagcctttggtaagtcacttcagatacttttcctcctttttacaaagagagggctggcttagttatttgccaaagccccttccaggcctgaattccacaagtacgatttactgtagtgtcttatcactctttcatgtcacaatagcgtggagcattagagaaaagcctagacttttagttgatagccagttgaaatatcattgatnngaattttagttttaggaaaaatgggttgatttctagctttattactatnaggtatgtgagcttgggcaaatcgcttaatcttgnggtctagtttnctctcnannatgagaacattaggctaaatgatttcccgagttccagctagtcctaggagttctataatttctacattagttgaacttatttcatcatgctgtttgctggggaatatgactaaccccttttgaagctactaatttaatgtcgagcttaaaggccataattgtatttcagaacatattattgacttacggttgtccaatcaatttataaatcgtttttaccggaaaaaaacacaaaaaaaaaatttggggcccccaaaatt

SEQ ID NO: 292617 - DNA, 4245 bp, Homo sapiens
  misc_feature (3880)..(3881): n is a, c, g, or t
  misc_feature (3930)..(3930): n is a, c, g, or t
  misc_feature (3965)..(3965): n is a, c, g, or t
  misc_feature (3976)..(3976): n is a, c, g, or t
  misc_feature (3982)..(3982): n is a, c, g, or t
  misc_feature (3984)..(3985): n is a, c, g, or t
agcgcgcgctgtcccccggaggcgtctgggtgtgcggagcgcgcgcgcgcgcggctcggaggcgcacctgtgaggtgtccctgaggagagggagggcgccctgcgtccggcagaggaggcgagcatcccgctcaggtgatgaggaacccctcgcgcacccagcgcagaaggctgctgccgccggacgcctccattgtttgaccacaacaagggccggattctcacccaggatcctaaggcctttgtagtccttcagccactgtgggccctgcctctgcctgttcttctggaatgtcttgggggttttgatcctgtcactgtgacctgcaaatccaagagacacatctttggaagataagagagcttcttcaagaccaaaaaaggagacggcatgatacccatgtagggaattccccaaagcagggcttgccatacctggaccccgaggagcctgcttgctggaaaggctttcctgtctgatgtgcaggaggcagaatgccaaactgactcttcaaggggcaactgcaggggctcgagaccagccagcagtatctcatccttcgatacaggggatatactgtacagtcctttttctagaagtgagacatacaagattactctacaagaggaagattccaggggctcaaaaacgcaaaggtttgcactttgagagccccttggaatgttgacaactcaggatctaaaacaaagttctgtgttaatgagttacagaattcacgtggaagtcaatgtcactttataatcgataataatactgagtgaggaacactatgcaggaagaaaccttccgtagaaagacaggcagggaaaagcttaggctgaccttaaacttacctaatagagcaagcctgagatagactgccaaaatggccaaataagagactctatgaaataacagtcttgtaactgtagtaatcataaggaaattttctccttgaaatcacgataccaaataggaaaaatgatctacaagtgccccatgtgtagggaatttttctctgagagagcagatctttttatgcatcagaaaattcacacagctgagaagccccataaatgtgacaagtgtgataagggtttctttcatatatcagaacttcatattcattggagagaccatacaggagagaaggtctataaatgtgatgattgtggtaaggattttagcactacaacaaaacttaatagacataagaaaatccacacagtggagaagccctataaatgttacgagtgtggcaaagccttcaattggagctcccatcttcaaattcatatgagagttcatacaggtgagaaaccgtatgtctgtagtgagtgtggaaggggctttagtaatagttcaaacctttgcatgcatcagagagtccacaccggagagaagccctttaaatgtgaagagtgtgggaaggccttcaggcacacctccagcctctgcatgcatcaaagagtccacacaggagagaaaccctataaatgttatgagtgtgggaaggcgttcagtcagagttcgagcctctgcatccaccagagagtccacactggagagaaaccctatagatgttgtggatgtgggaaggccttcagtcagagttcgagcctgtgcatccaccagagagtccacacaggagagaaacctttcaaatgtgatgagtgcggaaaggccttcagtcagagtacgagcctctgcatccaccagagagtccacacaaaggagagaaaccatctcaaaatatcagttatataaaacgttttgctaagagtttaaaatcttaaaacccataagtgccactaggaaggaaaccctgtatatacctacattgacccaagaaatatttacgcaatccctagcagaacattgtttctgaggaggcatatgtgagattgatttgttggttcatgccaagtgtgttccacaggttgactttgaatgtggacctctgagcatccacgcaggatggctctcaggtcccagtcacagacgtcgcttcctgggattccagcacgatgcctccatagttgaaagactacacaaaaagccacaatcattgcccggcctcctgagtcaccttctatctatactttgcttaaaagctatcccagatactcccccttgaggagctcatgcccttccttcctctttattcgagcatactggcaatgcattggaaaacagacagctcccactaagatcacgttctggtatttctgaggttaacacttgatttagcccctacatatctttccatatatcctattatttctgaatatatgtcctcaaaatccccataaatatccatcccttcctagatggcattaactttcattttagattttaggtgactcataattcccattcacttagcctatcagaaaagtcattggcagacatatatgtccttgaaccttttttatttgtgtggattctgctcatcactgtctctgttagacttattttgtagtggctgcatcacatatttttcacttgaatttttttggaaatagctgaatgtaaatagcagggaggaagaagcaagcaaagtgagagcttttcttcatccagaattgccctctgggctcctttggtaacagatggagctccttcctagctagggagaccttatgagaagtggatggtaggaggagtcactaatgtttcaatctctatttctgtaatcttgggcaataatgcataggagttcttgataccccttcattgattactgtgtatcagttctttgttaggcatgaacgtctttattaatccatcattcttttcttcattcaacaaatatgtattgaacacctcctatatgccaggcactgtgctaggtgctgggaataccactgatgagacagacaaggtccctactcttgtggagtttacttctggtggaggagacagatgataagtaaacaaataaataatgtagtttgagatagtgattaagtgctatgaagaaaataaactagggtgatgattttagtggtggggtggggtgggggtggggtgacattagctagtggtcagggaggcctttccgcggtgggatgttgagctgaggccggaggagaagtagcagtcgctggcagagcacacaggctgctctgggggatgagctggtgcgtttaaggaacaggccagcactggcattcgcaagcagtggggaaggggagagatgccgaggtggtcagtatcctgactttcagaggcctttttttgtttgttttaatttttgctagattgatattaaaaactcatgtggaggaactcaaggaatgtttagaagaccaaaagtccccaatgacaggaacaaatgtagtccttttgctcaggaagtctttggggaaattaaggatctttgaagctctgaaataggtgatcaggttagtggtgtctgtcagctgtctaagaggttggaaaatgaactactcaagatagtcacgaaaatactgaaagtttgatttttctttccatatttgaattaattttttctgtttgactggaaggggtttttgtataactaaaacctcagcgcataaaggagatttaaaaggagcacatgatttagtgggtgggccatgaaactagagatgggatttgggggtgaatttgtcaatatctggattttaatccagacatctctgctaacaagcctttggtaagtcacttcagatacttttcctcctttttacaaagagagggctggcttagttatttgccaaagccccttccaggcctgaattccacaagtacgatttactgtagtgtcttatcactctttcatgtcacaatagcgtggagcattagagaaaagcctagacttttagttgatagccagttgaaatatcattgatnngaattttagttttaggaaaaatgggttgatttctagctttattactatnaggtatgtgagcttgggcaaatcgcttaatcttgnggtctagtttnctctcnannatgagaacattaggctaaatgatttcccgagttccagctagtcctaggagttctataatttctacattagttgaacttatttcatcatgctgtttgctggggaatatgactaaccccttttgaagctactaatttaatgtcgagcttaaaggccataattgtatttcagaacatattattgacttacggttgtccaatcaatttataaatcgtttttaccggaaaaaaacacaaaaaaaaaatttggggcccccaaaatt

SEQ ID NO: 292618 - DNA, 3500 bp, Homo sapiens
  misc_feature (2996)..(2996): n is a, c, g, or t
  misc_feature (3002)..(3002): n is a, c, g, or t
  misc_feature (3103)..(3104): n is a, c, g, or t
  misc_feature (3117)..(3117): n is a, c, g, or t
  misc_feature (3151)..(3151): n is a, c, g, or t
  misc_feature (3159)..(3159): n is a, c, g, or t
  misc_feature (3175)..(3175): n is a, c, g, or t
  misc_feature (3191)..(3191): n is a, c, g, or t
  misc_feature (3193)..(3193): n is a, c, g, or t
  misc_feature (3201)..(3202): n is a, c, g, or t
  misc_feature (3214)..(3214): n is a, c, g, or t
  misc_feature (3221)..(3221): n is a, c, g, or t
  misc_feature (3231)..(3231): n is a, c, g, or t
  misc_feature (3242)..(3242): n is a, c, g, or t
  misc_feature (3247)..(3247): n is a, c, g, or t
  misc_feature (3255)..(3255): n is a, c, g, or t
  misc_feature (3259)..(3259): n is a, c, g, or t
  misc_feature (3269)..(3271): n is a, c, g, or t
  misc_feature (3279)..(3280): n is a, c, g, or t
  misc_feature (3282)..(3283): n is a, c, g, or t
  misc_feature (3291)..(3291): n is a, c, g, or t
  misc_feature (3319)..(3319): n is a, c, g, or t
  misc_feature (3321)..(3321): n is a, c, g, or t
  misc_feature (3341)..(3341): n is a, c, g, or t
  misc_feature (3348)..(3348): n is a, c, g, or t
  misc_feature (3352)..(3352): n is a, c, g, or t
  misc_feature (3356)..(3356): n is a, c, g, or t
  misc_feature (3371)..(3371): n is a, c, g, or t
  misc_feature (3379)..(3379): n is a, c, g, or t
  misc_feature (3415)..(3415): n is a, c, g, or t
  misc_feature (3417)..(3417): n is a, c, g, or t
agcgcgcgctgtcccccggaggcgtctgggtgtgcggagcgcgcgcgcgcgcggctcggaggcgcacctgtgaggtgtccctgaggagagggagggcgccctgcgtccggcagaggaggcgagcatcccgctcaggtgatgaggaacccctcgcgcacccagcgcagaaggctgctgccgccggacgcctccattgtttgaccacaacaagggccggattctcacccaggatcctaaggcctttgtagtccttcagccactgtgggccctgcctctgcctgttcttctggaatgtcttgggggttttgatcctgtcactgtgacctgcaaatccaagagacacatctttggaagataagagagcttcttcaagaccaaaaaaggagacggcatgatacccatgtagggaattccccaaagcagggcttgccatacctggaccccgaggagcctgcttgctggaaaggctttcctgtctgatgtgcaggaggcagaatgccaaactgactcttcaaggggcaactgcaggggctcgagaccagccagcagtatctcatccttcgatacaggggatatactgtacagtcctttttctagaagtgagacatacaagattactctacaagaggaagattccaggggctcaaaaacgcaaaggtttgcactttgagagccccttggaatgttgacaactcaggatctaaaacaaagttctgtgttaatgagttacagaattcacgtggaagtcaatgtcactttataatcgataataatactgagtgaggaacactatgcaggaagaaaccttccgtagaaagacaggcagggaaaagcttaggctgaccttaaacttacctaatagagcaagcctgagatagactgccaaaatggccaaataagagactctatgaaataacagtcttgtaactgtagtaatcataaggaaattttctccttgaaatcacgataccaaataggaaaaatgatctacaagtgccccatgtgtagggaatttttctctgagagagcagatctttttatgcatcagaaaattcacacagctgagaagccccataaatgtgacaagtgtgataagggtttctttcatatatcagaacttcatattcattggagagaccatacaggagagaaggtctataaatgtgatgattgtggtaaggattttagcactacaacaaaacttaatagacataagaaaatccacacagtggagaagccctataaatgttacgagtgtggcaaagccttcaattggagctcccatcttcaaattcatatgagagttcatacaggtgagaaaccgtatgtctgtagtgagtgtggaaggggctttagtaatagttcaaacctttgcatgcatcagagagtccacaccggagagaagccctttaaatgtgaagagtgtgggaaggccttcaggcacacctccagcctctgcatgcatcaaagagtccacacaggagagaaaccctataaatgttatgagtgtgggaaggcgttcagtcagagttcgagcctctgcatccaccagagagtccacactggagagaaaccctatagatgttgtggatgtgggaaggccttcagtcagagttcgagcctgtgcatccaccagagagtccacacaggagagaaacctttcaaatgtgatgagtgcggaaaggccttcagtcagagtacgagcctctgcatccaccagagagtccacacaaaggagagaaaccatctcaaaatatcagttatataaaacgttttgctaagagtttaaaatcttaaaacccataagtgccactaggaaggaaaccctgtatatacctacattgacccaagaaatatttacgcaatccctagcagaacattgtttctgaggaggcatatgtgagattgatttgttggttcatgccaagtgtgttccacaggttgactttgaatgtggacctctgagcatccacgcaggatggctctcaggtcccagtcacagacgtcgcttcctgggattccagcacgatgcctccatagttgaaagactacacaaaaagccacaatcattgcccggcctcctgagtcaccttctatctatactttgcttaaaagctatcccagatactcccccttgaggagctcatgcccttccttcctctttattcgagcatactggcaatgcattggaaaacagacagctcccactaagatcacgttctggtatttctgaggttaacacttgatttagcccctacatatctttccatatatcctattatttctgaatatatgtcctcaaaatccccataaatatccatcccttcctagatggcattaactttcattttagattttaggtgactcataattcccattcacttagcctatcagaaaagtcattggcagacatatatgtccttgaaccttttttatttgtgtggattctgctcatcactgtctctgttagacttattttgtagtggctgcatcacatatttttcacttgaatttttttggaaatagctgaatgtaaatagcagggaggaagaagcaagcaaagtgagagcttttcttcatccagaattgccctctgggctcctttggtaacagatggagctccttcctagctagggagaccttatgagaagtggatggtaggaggagtcactaatgtttcaatctctatttctgtaatcttgggcaataatgcataggagttcttgataccccttcattgattactgtgtatcagttctttgttaggcatgaacgtctttattaatccatcattcttttcttcattcaacaaatatgtattgaacacctcctatatgccaggcactgtgctaggtgctgggaataccactgatgagacagacaaggtccctactcttgtggagtttacttctggtggaggagacagatgataagtaaacaaataaataatgtagtttgagatagtgattaagtgctatgaagcccccccctccccncccccnccccccccccccccccccccccccccccccccccccccccccccccccccccccccccccccccccccccccccccccccccccccccccccccccccccnnccccccccccccncccctcccctcccccccccccctccccccccccncccccccncccttctttcttcttntcttctttctttcttntntcctcttnnttttttctttcnttttttnttctctttcnttttctctctncttcncttttttntttnttttctttcnnnttttttcnntnntttcttcncctttttctctcttttctttctcttttntntttttcttcttttctttccnttttttntctntttnctcttctcctttttnctttcttnttttcttcttttcttttttcttctttttccttttcntnttctttttctttctctttcctttcttttttcttctcttttcttctcttttctcttctcttcttctctttctcttttttttcct

SEQ ID NO: 292619 - DNA, 3320 bp, Homo sapiens
  misc_feature (2995)..(2995): n is a, c, g, or t
  misc_feature (3011)..(3011): n is a, c, g, or t
  misc_feature (3013)..(3013): n is a, c, g, or t
  misc_feature (3021)..(3022): n is a, c, g, or t
  misc_feature (3034)..(3034): n is a, c, g, or t
  misc_feature (3041)..(3041): n is a, c, g, or t
  misc_feature (3051)..(3051): n is a, c, g, or t
  misc_feature (3062)..(3062): n is a, c, g, or t
  misc_feature (3067)..(3067): n is a, c, g, or t
  misc_feature (3075)..(3075): n is a, c, g, or t
  misc_feature (3079)..(3079): n is a, c, g, or t
  misc_feature (3089)..(3091): n is a, c, g, or t
  misc_feature (3099)..(3100): n is a, c, g, or t
  misc_feature (3102)..(3103): n is a, c, g, or t
  misc_feature (3111)..(3111): n is a, c, g, or t
  misc_feature (3139)..(3139): n is a, c, g, or t
  misc_feature (3141)..(3141): n is a, c, g, or t
  misc_feature (3161)..(3161): n is a, c, g, or t
  misc_feature (3168)..(3168): n is a, c, g, or t
  misc_feature (3172)..(3172): n is a, c, g, or t
  misc_feature (3176)..(3176): n is a, c, g, or t
  misc_feature (3191)..(3191): n is a, c, g, or t
  misc_feature (3199)..(3199): n is a, c, g, or t
  misc_feature (3235)..(3235): n is a, c, g, or t
  misc_feature (3237)..(3237): n is a, c, g, or t
agcgcgcgctgtcccccggaggcgtctgggtgtgcggagcgcgcgcgcgcgcggctcggaggcgcacctgtgaggtgtccctgaggagagggagggcgccctgcgtccggcagaggaggcgagcatcccgctcaggtgatgaggaacccctcgcgcacccagcgcagaaggctgctgccgccggacgcctccattgtttgaccacaacaagggccggattctcacccaggatcctaaggcctttgtagtccttcagccactgtgggccctgcctctgcctgttcttctggaatgtcttgggggttttgatcctgtcactgtgacctgcaaatccaagagacacatctttggaagataagagagcttcttcaagaccaaaaaaggagacggcatgatacccatgtagggaattccccaaagcagggcttgccatacctggaccccgaggagcctgcttgctggaaaggctttcctgtctgatgtgcaggaggcagaatgccaaactgactcttcaaggggcaactgcaggggctcgagaccagccagcagtatctcatccttcgatacaggggatatactgtacagtcctttttctagaagtgagacatacaagattactctacaagaggaagattccaggggctcaaaaacgcaaaggtttgcactttgagagccccttggaatgttgacaactcaggatctaaaacaaagttctgtgttaatgagttacagaattcacgtggaagtcaatgtcactttataatcgataataatactgagtgaggaacactatgcaggaagaaaccttccgtagaaagacaggcagggaaaagcttaggctgaccttaaacttacctaatagagcaagcctgagatagactgccaaaatggccaaataagagactctatgaaataacagtcttgtaactgtagtaatcataaggaaattttctccttgaaatcacgataccaaataggaaaaatgatctacaagtgccccatgtgtagggaatttttctctgagagagcagatctttttatgcatcagaaaattcacacagctgagaagccccataaatgtgacaagtgtgataagggtttctttcatatatcagaacttcatattcattggagagaccatacaggagagaaggtctataaatgtgatgattgtggtaaggattttagcactacaacaaaacttaatagacataagaaaatccacacagtggagaagccctataaatgttacgagtgtggcaaagccttcaattggagctcccatcttcaaattcatatgagagttcatacaggtgagaaaccgtatgtctgtagtgagtgtggaaggggctttagtaatagttcaaacctttgcatgcatcagagagtccacaccggagagaagccctttaaatgtgaagagtgtgggaaggccttcaggcacacctccagcctctgcatgcatcaaagagtccacacaggagagaaaccctataaatgttatgagtgtgggaaggcgttcagtcagagttcgagcctctgcatccaccagagagtccacactggagagaaaccctatagatgttgtggatgtgggaaggccttcagtcagagttcgagcctgtgcatccaccagagagtccacacaggagagaaacctttcaaatgtgatgagtgcggaaaggccttcagtcagagtacgagcctctgcatccaccagagagtccacacaaaggagagaaaccatctcaaaatatcagttatataaaacgttttgctaagagtttaaaatcttaaaacccataagtgccactaggaaggaaaccctgtatatacctacattgacccaagaaatatttacgcaatccctagcagaacattgtttctgaggaggcatatgtgagattgatttgttggttcatgccaagtgtgttccacaggttgactttgaatgtggacctctgagcatccacgcaggatggctctcaggtcccagtcacagacgtcgcttcctgggattccagcacgatgcctccatagttgaaagactacacaaaaagccacaatcattgcccggcctcctgagtcaccttctatctatactttgcttaaaagctatcccagatactcccccttgaggagctcatgcccttccttcctctttattcgagcatactggcaatgcattggaaaacagacagctcccactaagatcacgttctggtatttctgaggttaacacttgatttagcccctacatatctttccatatatcctattatttctgaatatatgtcctcaaaatccccataaatatccatcccttcctagatggcattaactttcattttagattttaggtgactcataattcccattcacttagcctatcagaaaagtcattggcagacatatatgtccttgaaccttttttatttgtgtggattctgctcatcactgtctctgttagacttattttgtagtggctgcatcacatatttttcacttgaatttttttggaaatagctgaatgtaaatagcagggaggaagaagcaagcaaagtgagagcttttcttcatccagaattgccctctgggctcctttggtaacagatggagctccttcctagctagggagaccttatgagaagtggatggtaggaggagtcactaatgtttcaatctctatttctgtaatcttgggcaataatgcataggagttcttgataccccttcattgattactgtgtatcagttctttgttaggcatgaacgtctttattaatccatcattcttttcttcattcaacaaatatgtattgaacacctcctatatgccaggcactgtgctaggtgctgggaataccactgatgagacagacaaggtccctactcttgtggagtttacttctggtggaggagacagatgataagtaaacaaataaataatgtagtttgagatagtgattaagtgctatgaagttctttcttcttntcttctttctttcttntntcctcttnnttttttctttcnttttttnttctctttcnttttctctctncttcncttttttntttnttttctttcnnnttttttcnntnntttcttcncctttttctctcttttctttctcttttntntttttcttcttttctttccnttttttntctntttnctcttctcctttttnctttcttnttttcttcttttcttttttcttctttttccttttcntnttctttttctttctctttcctttcttttttcttctcttttcttctcttttctcttctcttcttctctttctcttttttttcct

SEQ ID NO: 292620 - DNA, 702 bp, Homo sapiens
agcgcgcgctgtcccccggaggcgtctgggtgtgcggagcgcgcgcgcgcgcggctcggaggcgcacctgtgaggtgtccctgaggagagggaggtgggtgcgcggcgcccgcggcctggggcgctgactcccctcacttggaggcgccctgcgtccggcagaggaggcgagcatcccgctcaggtgatgaggaacccctcgcgcacccagcgcagaaggctgctgccgccggacgcctccattgtttgaccacaacaagggccggattctcacccaggatcctaaggcctttgtagtccttcagccactgtgggccctgcctctgcctgttcttctggaatgtcttgggggttttgatcctgtcactgtgatcggtgttgctggaagtcggtccaggagctttttggataatccacctcatgactggaaaacaacgaagaaacccagtagcttcttcgccgtgtggattcagaccccgggagcccaggcctgcacctgggcagctgctccctgcacgtggccggacatatggaatatggagccccgctgccttggagtcagagagctgccaagtagaatttgcatgtaatgctgctatcattttcaattgctctcccaataaaacaggccctggagccgaggtgaatgccgtagaaggcattttttccactgggtgtgggtccagaataaataatcaaaag

SEQ ID NO: 292621 - DNA, 491 bp, Homo sapiens
agcgcgcgctgtcccccggaggcgtctgggtgtgcggagcgcgcgcgcgcgcggctcggaggcgcacctgtgaggtgtccctgaggagagggaggtgggtgcgcggcgcccgcggcctggggcgctgactcccctcacttggaggcgccctgcgtccggcagaggaggcgagcatcccgctcaggtgatgaggaacccctcgcgcacccagcgcagaaggctgctgccgccggacgcctccattgtttgaccacaacaagggccggattctcacccaggccgcacttggtgagagtcttcacggaccacagtgttgcacgaggtgattgtgtttgcagaggtttttttgtccttgaagagcacttagggctggagagcaagacacatgctgacgagcagaagctgacaggcttgctgccatgtgggaaagtccttggacgagttgtctgcttgcggagaggtgtctgcggctcaggtagggtgtcccagct

SEQ ID NO: 292622 - DNA, 491 bp, Homo sapiens
cacactgtcagggaaatgtatgtctccttaggcttaaaagcatttttttttttaaatgagaaatggagctttggaataaatatttttcattgctcacgacacggagcccctgggtcaccatggcctgtgttcttttaagtcatgtaaaactagtttctgctgagaacattcaaatgtttcaccttgtgctgaggaatttggaactaatcttctcagatcggtgttgctggaagtcggtccaggagctttttggataatccacctcatgactggaaaacaacgaagaaacccagtagcttcttcgccgtgtggattcagaccccgggagcccaggcctgcacctgggcagctgctccctgcacgtggccggacatatggaatatggagccccgctgccttggagtcagagagctgccaagtagaatttgcatgtaatgctgctatcattttcaattgctctcccaataaaacaggccctggagccgaggtga

SEQ ID NO: 292623 - DNA, 316 bp, Homo sapiens
ggaggcgggcggtgggggcgcgggccgggtggccgcgcatgcgtgcggcccccgctcccccggggcttccccggcctcgtgcgtgcgcagcgcgcgctgtcccccggaggcgtctgggtgtgcggagcgcgcgcgcgcgcggctcggaggcgcacctgtgaggtgtccctgaggagagggaggtgggtgcgcggcgcccgcggcctggggcgctgactcccctcacttggagtgagttctcggcggccgggctgcagtctttctttctttcccggagggaggcgggggccgggggccagggagcgggctgggggtg

SEQ ID NO: 292624 - DNA, 7209 bp, Homo sapiens
  misc_feature (4612)..(4612): n is a, c, g, or t
  misc_feature (7144)..(7144): n is a, c, g, or t
  misc_feature (7181)..(7181): n is a, c, g, or t
  misc_feature (7189)..(7190): n is a, c, g, or t
ggtgtgtggcagggtcatgaaaaagcggcggcggcgggagagaggaggaggcggcggcggggcagtgaaactacggtagctgccccctgagctggtggtgtggctttgtggggagggcgtagttcctaatcccctttccgggcagccgccggggctcggggctgtgagcggccgtgaggctgcctccccgggccccctgcctccgccatgttccgcagggcacgccttagcgtgaagccgaatgtcaggcctggtgtaggcgccaggggctccacagcttccaatccccagcgtggacgggagtctcccaggccgccggagcctgccacggactctgcttccaagcccgcggagcccacagatgtgcccacagtcgatttcggtggagcggagccccaagaaaaggctcctaggagcagtactgaaaagactggtggtgacaatgatgttgaagaatccagtagatcttcctctactgtttcacagagaagaaagcgaatatcaagtacttctagcctggttaagtctagtgtcagtgttccttcagaatctcatcccttatctacaattaatcaagaggctccacagccaactgccacttcaacaaaagagaaacagccatgctcagacagataccgaatatacaaagcccagaaactgagggaaatgttaaaagaagaattgagaaaagagaagaaacaatggaaaaacaaatatgctataaatgaaagtcagaggccaccagatcgttcaaaaatgactatgagagacttcatatattatctaccagataataatccaatgacttcttcactggaacaagaaaagaaaactgaaaagccatcgactccagtccagacaagagagcaagaaggtaagagtactcctaatgctgaagataatgaaatggaagaagagacagatgatgggccattactggttcctcgagtaaaagtggcagaagatggttccattattttggatgaagaaagtttaactgtagaagttttaagaacaaaaggcccttgtgttgttgaagaaaatgaccccatatttgagcgcggttctacaactacatactccagctttaggaaaaactattactctaaaccatggtcaaataaagaaacagatatgttttttttagccatcagcatggtaggaactgacttttctatgatcggacaactttttcctcacagagcaaggatagaaattaagaataaatttaaacgggaagagaaaacaaatggatggagaatagacaaagcattccaggaaaagcgcccttttgacttcgatttttttgctcatttgcttcagaaagttcttgctgaagaagagaaaagaaaacaaaaatctgttaaaaatcacagtttaaaggagaagaaatccaccaaaccacggaaaaatgtaaaagtgaaaaaagttgcctgtgaaggagtgaataatgatccagatgagtctatgagttctagaatttcagacacggaaagatctcagaaggatgctcagacagttgaagaagagtctctgaccttatcaagggaggatgcagagcaggttgcattagaagtagacctaaatcaaaagaaaagaaggaggaagaagcaagatggagctaatgaactgggagtaaacaatcttttagaaaatgccactgttcaggcgggtccttctaaaggagaaaaacacaagaataaatgtcaggctataaggcctgagctaaaggaaggtgaatgcagtaaggagcagatgctttcctgcacacaaaacatagatggcattgtgggttttgcctccactgaaaaagttgagaaaagaactgaccccatcctttcattaagtaatcaacaagatgccacatcagtagcaactgagtcttcagaatcaagcacttcagatttgccttcattcgaagttggaattagagcattgtgtgaggtgaataatgctgagggtagttgtatagaagaaagaaatgttgacctaaaaaataattcactggaaattgatcaaacagaaaatgttaaaccaatgttgagaggtcgcttccaaagacctaaacccaatttgtcaagggctgggaagaaatcagttctttcacaaggcaaaacagagtcagagagcaagaattcacattcaaaaacttcagttgaaaagaaccacgtggaaaaagataaaatgaatacattggacattttgagaatggagactacagagagagagaatccagaagctgaaactgtatctgttttgggtgaaaaaaattgtctgcaggaagggagtcaactaaaggctttaagacctgtacaagtgaggggccgattgcaaaagccaaagccaaatgcaggtaaagctgctgaaagaaaagaaattctcatatcacaggaagaaattggggccaatgtagagaagaatgaaaatgaatcctgtgctgatagagatactcctcaacacatggaagatcaatcgcgtaaagattttgaagaggaagatgtcatattacagcctgagaaaaatgattcttttcaaaatgtgcagccagatgagcccaaggttcttaatgaatgtctaagcgttcaagagaataataaggcaaataaacttaaccaagtcccaattctaaggactcgatttcagaaaccaaagccaaatataggaagaggaactggaaggagagaaatttcctcaaaggaagaggtactagagaagattcttgtctctggggaaatggcggcagcattgagagaaactgtaagactagacacctcaccaaaggagatggtaccagcagagattaatactaaagaaatgcagtcagatttaaaagaaactggaagaagagccatttctcccagggagaagattctagatgtgattgatgacaccatagaaatggagacaggtctgaaagcaatgggaagagagatttgtctaagggagaagacgccagaggtgattgatgccactgaggaaatagacaaagatttggaagaagctggaagaagagaaatatccccacagaaaaatggcccagaggaggttaagcctctaggtgaagtggagacagatttgaaagcaactggaaatgagagttccccaagggagaagacaccagaggtgactgatgccactgaggaaatagacaaaaatttggaagaaactggaagaagaaaaatatccccaagggaaaatggcccagaggaggtcaagcctgtagatgaaatggagacagatttgaacgcaactggaagagagagttctccaagggagaagacaccagaggtgattgatgctactgaggaaatagatttggaagaaactgaaagagaagtatccccacaggaaaatggactagaggaggtcaagcctctaggtgaaatggagacggatttgaaagcaactggaagagacagtttcccaagggggaagacaccagaggtgattgatgccattgaggaaatagagatagatttggaagaaactgaaagagaaatatccccacaggaaaatggcctagaggaggttaagcctctaggtgaaatgcaaacagatttgaaagcaaccggaagggagatttccccaagggagaagacaccagaggtgattgatgccactgaggaaatagacaaagatctggaagaaactggaagaagagaaatatccccagaggaaaatggcccagaggaggtcaagcctgtagatgaaatggagacagacttgaaaacaactggaagagagggttcctcaagggagaagacacgagaggtgattgatgctgctgaggtaatagagacagatttggaagaaactgaaagagaaatatcgccacaggaaaatggcccagaggaggtcaagcctgtaggtaaaatggagacagatttgaaagaaattagagaagaaatttcccaaagggaaaaggtgctagcagagttcagtgctataagggaaaaggagattgatttgaaagaaactggaaaaagagacattcccatgatggagaaagtatcaggaaagatggctgttgttgaagaaatggaggcagatttgaaagaaactggaaaagaaaattttagagagagaggatctgaagagatctgtgttactgaggaaaaggtggcagaattgaaacaaactggaaaaacagacatttctccaagggaaaacgagctagaggagaccagtacctcaagacaaactgacacacatttaatgcagagcggtagcaatgacttcagtgctatgccttcactagatattcagaacattagcagtgaagtactgtcgatgatgcatacacctgtagaagaaaaaagaaattctgaaaaagaagtatcaagtcacttcagtcatttcaagatttcttcacagactcatgaatctgataaaacagaagtccaggggattcaatctccagatgttccagagcagttttcagatattaatttaagcaaatctcttcctcaagaacagaagccacttgaaattaaaccagcaccttttgtgaggagccgattcaaaagaccaaaaccaaacttagcaagagcagctttgaagagagagactacagaatcagaaaaatatatatatgagaagaaatcagaaaccnagaaaatggagactattgtgatgcaagaaaataatgaacaaactgatactctcccttctcaacatgatgaagcttccctaatgatatcaagagaaaaagacacattaggtcacaggaatgaggaggctgtgatattgccatgtacacagactgaaaggaacctttcaccttcaaattcttgtgaacctaaagaggagtctcagtcagcaccagtccagaaaaatgactcagttgtttctgtggggactaataatgtaaacactttccagcaagaaatgaaggaaagtgttatccaaactgctcgacaagtaaggggccgacttcagagaccgagaccaaatataagaaagacaggacagaggcaaatagtagacaaaggtgaagccaaaggcataattaaggaaggaagaacgatattaccaaaagatgaaactgaaaagaaagtcttaactgtgtcaaattctcaaattgaaactgaaattgaagttccatcgtccgcagttccagaacacagaatgtatgaaaatcaaagtcaggtggttcttgtagaaaaccttcatgttaacaaaacaaatgaaacaatcagacatgaaaataaaccgtatgttcctagttcagcacaaatgacaagaaggaaattccaaaaggctaagccaaatttgggaagagcacacagtaagaaagaggaaccagttttagaaaaagtcacaacagatcagagcaaggaaggcaagccagaagatcatttgctgcagaaaggagcttccaacacccagctccttctaaaagaaaaagctgagcttctgacatctctggaggtttcagcaagaaaagattgtgtaggttccaaagagtctgctttggcaaaaatagatgcggaattagaagaagttggaccatcaagaagggttggagaggaaactgtaggagataattcaccatcttcagttgttgaagagcaatatctcaataaactaacaagctgtccacaaccgttaaacgaaacaagttactctaaaattgccctggatgggaaaacaactatctcttctacatctgagtatgagagaaatcgtggtgaaaggagaagtcataaaaagttcaaaccaaatgtcaccagaggtcgtggatcaaaacgagttcggggtaagacctctaagaaggaacctagagcttccaaggccatgctggtgactcttcgggcttcccaggaagaagatgatgatgctgacgattttgagtctgactatgaggaagaaagctatcatcttgctcccgaagaagtaaacaaagctccagtatttgtacctgttggtctcagatctcctgaacctgtttctgctcagattgaggaaacaatggaagagcttgaaataactgtgaatgtcccagatgtaggatgcatagctgttgttgaacatgagctaccaaacacagatgtgactactgaagaaatgaaacaagaagaaaatttgagtgtaccgtttgaaatgaccacaagtgaacatatccaagatgaaccaggtaccaatgatggaagcaccgaagctgcaataactttacttacaatgggagatctagtattgcagtcagagatcagtagtgaacagggtgatgtaggagtatgtatacttcctcatgttcattcaaaggataaaagccatattccttctagcctagataatgtaaatcacaaaattgttcatgaatgtcaggaactttcttcacctgtcattactacatctcctgcatcatttgaagaaaacaagattgtattggaggaacaaagttccagagaagaaataagtttaatggagaaagtaaaggagaatgctacaccaaccaggaatacaatttctaaagtgaccagtaatttgagaataagaagtaggcttgctaagcctaaaccaaatcttgagaagactttagggaccaacaggcttgatgattatcaggaagtttccagtttgtgtgtaaccaaaggggcagaaatggaaactcaaagagaaacagagaaaaatgcttccaaagcaacagaattggaaaataaaaaccttggaccagttacaacagcagagaataaggatcagagcaaattggcatgtgtacatggtatcaaagggaccagtatttcttcagaagtaaacctaactgaaagaaacgaaaatcaagaagagagctctcaggaggttcacatgttgtcagttgctccagttgcttcctctgagacagggccctgcacacttggtttggataggggtcttggtgaaaattctgttgaagagccccagataaaggactctaaaggagacagtgtgcttacacttcctgtgccagaggtaaaagaatgtacagtataataagggatagcaaggtgttttcctccatttaaaaaaaaaaaggtataatttacatacaataaacttcacctcttttatcttcatttttctttatttcttcttttttttttggagacagtcttgttctgttgcccaggcaagagtgcagtggtatgatctcagctcactgcancctctgccacccagattcaacagattctcctgcctcngcctgccnngtagctgggactacaggca

SEQ ID NO: 292625 - DNA, 5756 bp, Homo sapiens
  misc_feature (757)..(757): n is a, c, g, or t
aaataaataaaataaataaaaaataaaatacaataacaaggcacgtgctaccacacctggctgatatttgaaatattttttaatatagtagttctcactttgcgtaggactatgttaactcaacttgagcttattggagctgtatctttgctttatttgacttttggttacacagtaccctgcatagcaaggattgcctatataaattttaatgaaagctaattcctaaatattagtattattttacgcatgtttgatttgtgaaccacatttaataatttctcattttgaagccttttctttttttgaaacagagctttgctctgtcacccagtctggagtgcagtggtgtgattccacctcccgggttcaagtgattcttttgcctcagcctcctgagtaggtgggattataggcctgcaccaccatgcccagctagtttttgtatttttagtagagatgggatttaaccatgttggccaggatgttccaaactcctggcctcaagtgatctgcccgccctggcttcccaaagtgctgggattacaggcgtgagccaccttgtccggccttcattttgaaacttcttgagcatgttcctaagcgtgtaaatttgtggctgctgctttctctggaggtacagtttttataacatgatgcaagatggatcatagaaaagctaatgtagcagtttgtattactctataatgtgaagcagcatcttgcaaaatggtgattttgtgtgtttaacattttnaaaaataattataaaatatatatcattaggaattcttttctctctgaaatattttcttttttttagtaatcaacaagatgccacatcagtagcaactgagtcttcagaatcaagcacttcagatttgccttcattcgaagttggaattagagcattgtgtgaggtgaataatgctgagggtagttgtatagaagaaagaaatgttgacctaaaaaataattcactggaaattgatcaaacagaaaatgttaaaccaatgttgagaggtcgcttccaaagacctaaacccaatttgtcaagggctgggaagaaatcagttctttcacaaggcaaaacagagtcagagagcaagaattcacattcaaaaacttcagttgaaaagaaccacgtggaaaaagataaaatgaatacattggacattttgagaatggagactacagagagagagaatccagaagctgaaactgtatctgttttgggtgaaaaaaattgtctgcaggaagggagtcaactaaaggctttaagacctgtacaagtgaggggccgattgcaaaagccaaagccaaatgcaggtaaagctgctgaaagaaaagaaattctcatatcacaggaagaaattggggccaatgtagagaagaatgaaaatgaatcctgtgctgatagagatactcctcaacacatggaagatcaatcgcgtaaagattttgaagaggaagatgtcatattacagcctgagaaaaatgattcttttcaaaatgtgcagccagatgagcccaaggttcttaatgaatgtctaagcgttcaagagaataataaggcaaataaacttaaccaagtcccaattctaaggactcgatttcagaaaccaaagccaaatataggaagaggaactggaaggagagaaatttcctcaaaggaagaggtactagagaagattcttgtctctggggaaatggcggcagcattgagagaaactgtaagactagacacctcaccaaaggagatggtaccagcagagattaatactaaagaaatgcagtcagatttaaaagaaactggaagaagagccatttctcccagggagaagattctagatgtgattgatgacaccatagaaatggagacaggtctgaaagcaatgggaagagagatttgtctaagggagaagacgccagaggtgattgatgccactgaggaaatagacaaagatttggaagaagctggaagaagagaaatatccccacagaaaaatggcccagaggaggttaagcctctaggtgaagtggagacagatttgaaagcaactggaaatgagagttccccaagggagaagacaccagaggtgactgatgccactgaggaaatagacaaaaatttggaagaaactggaagaagaaaaatatccccaagggaaaatggcccagaggaggtcaagcctgtagatgaaatggagacagatttgaacgcaactggaagagagagttctccaagggagaagacaccagaggtgattgatgctactgaggaaatagatttggaagaaactgaaagagaagtatccccacaggaaaatggactagaggaggtcaagcctctaggtgaaatggagacggatttgaaagcaactggaagagacagtttcccaagggggaagacaccagaggtgattgatgccattgaggaaatagagatagatttggaagaaactgaaagagaaatatccccacaggaaaatggcctagaggaggttaagcctctaggtgaaatgcaaacagatttgaaagcaaccggaagggagatttccccaagggagaagacaccagaggtgattgatgccactgaggaaatagacaaagatctggaagaaactggaagaagagaaatatccccagaggaaaatggcccagaggaggtcaagcctgtagatgaaatggagacagacttgaaaacaactggaagagagggttcctcaagggagaagacacgagaggtgattgatgctgctgaggtaatagagacagatttggaagaaactgaaagagaaatatcgccacaggaaaatggcccagaggaggtcaagcctgtaggtaaaatggagacagatttgaaagaaattagagaagaaatttcccaaagggaaaaggtgctagcagagttcagtgctataagggaaaaggagattgatttgaaagaaactggaaaaagagacattcccatgatggagaaagtatcaggaaagatggctgttgttgaagaaatggaggcagatttgaaagaaactggaaaagaaaattttagagagagaggatctgaagagatctgtgttactgaggaaaaggtggcagaattgaaacaaactggaaaaacagacatttctccaagggaaaacgagctagaggagaccagtacctcaagacaaactgacacacatttaatgcagagcggtagcaatgacttcagtgctatgccttcactagatattcaggtatgtatttttctgtcctttaaaagttttttgaatgcttttttcagaggaaataaataattccatgattattttgtccttaagtccaacaacacttaaaaatctctaaaagtctaaagtcttttgtagccctaagtttctatgtttcagtgccttgaagaaactgtatgttcttttttaaaaagataactttaggctggtcttgaactgagctcaggtgatccacctgccctggcctcccaaagtgctgggattacaggtgtgagtcacagcgcccagcctcatgcagtatttttctttctgtgactggcttatttcacttaatgtaatgtcctcaaggttcatccatggtgtagcatatgagaagatttccttttttatgagcaaataatattctagtacatgtatagaccacattttctttatggacatttaggttgtttttgtctgttggcatcactgaacatgggagtgcaaatatctctttgagatcctgatttcagttcttgtggataaatacccagaagtggggttgctagatcatatggtagttctacttttaattttttgaggaccctccatactgtttccaatagcgggtacaccattttacataaccaccaacaatgtacagggttccagtttttttcacatcttcttcaatacttgttatcttttattttattaataatgtccttctgaacaggtagaaggtggtttcttatggttgttttgatttgcatttcccggataattattgagttgagcatctttcatagctgttagccatttgtatatcttctttggagacatgtctattcaggtcctgtgcccaattttttaattaggttattttcttttttgctattgagttttgagaattatttatatagtttggattttaggaccttatcagaaatatgatttacacattttctcccattccataggttgccttttcactctgctgtttcctttggcgtacagaagttttttagttcaatgtagtcccatttgtctaattttgcttttgttgcctatacttttggtgtcatatctaagaaactgttgccaaaaacaaacttaaagctgtttactatttttaagcatacaatttagtggcattatttacatttacattgttgtgcagccatcagcactatttctaaagctattttatcactgcaaacagaaaacctgtacccattatgcagtaattcctcattctcccctccctgcaaccactgataatctctaatctgctttctgtttctcatccaagtattaatcaggaccagacttgcttagtttgagatcaaattaggctcattgagagcggtaaggatgtagacaactttctgtctctatgactctgtctaatctagatattcacataagtggaatcatatgctatttctcatagttgtttgttcctaggtgacagataatctaaagtgtgagttcagagatacacctaatttcataaactacacaaaactgtactcgtgactttttctaatttttaaaataattaaaaaatgttgtgacagggtcttactctgttgctcaggctagagtgtagtagcgtgatcacagctcaccacaaccttgaactcttgggctcaaatgattctatcacctcagcatctcgagtagctgggactacagtcatgggacaccatgactggctaattttaaaaacattttttagtagagatgttttccaggctggtctcaaactcctgggctcaagcaatcctcgcacctcagcatgagccactgtgtctggccctagctttttctaatttaggggaaaaacaaccttgtaatgactgttaaagtcccagttggttttggaaaacaaagagttgattctaaaattgtcatgtacacaagaacaaaggctcaagaatggtaaagacagttttaaaaaacaccaactttgcagagggactgtgctagtagactaattttcgagctagagtaactaaagcagcatggtattggtgtagggttagatgaattgactcactggaactgaatatagagtttaggaagagacatttaggaatctgttatatggcagaggtagctttagaaattagcgggcaaagatagaactaacttcattagattgagctgagatttgaaaaacataatatttgatccttgtgttaccatatccgctaacttcctgatggattgaagactacatgtataaaacaaatctttacaacttttagaagaaatgtagaaaaatatctttgtaatgtgaaggcctcaggtaagacatttctattaagacgtagaaaacacagactttaaaagataagattgataagtttgatggtagtaaaattaaatacttctgttaacaaatcctccataaagaaaataaaaggcaagttactgatcgggagattttatgtgtaatatctagacaataaaaatatatagagaactcttgctgataagtcaggaaaacataaacacctagtagaaaaaatgaacaag

SEQ ID NO: 292626 - DNA, 400 bp, Homo sapiens
cccaagtagctgatattacaggcgcccaccaccacacctggctaatttttgtatttttagtagagacaggtttaaccatgtcggccaggctggtctcgaacttctgacctcaaatgattcgcccgcctcggcctctcaaagtgctgggattacaggtgtgagccactgcgcccgggcggattatgtcttttcaggaaacttgtgaattatttcatattccaaatggtttacttattcatgccagggagaaggaaattggtgacttcaaaataaacattaattttatttctttgtggttctagtttgggtgaaaaaaattgtctgcaggaagggagtcaactaaaggctttaagacctgtacaagtgttgggatacatccgggatcctctagatcgcccgc

SEQ ID NO: 292627 - DNA, 11017 bp, Homo sapiens
  misc_feature (4612)..(4612): n is a, c, g, or t
ggtgtgtggcagggtcatgaaaaagcggcggcggcgggagagaggaggaggcggcggcggggcagtgaaactacggtagctgccccctgagctggtggtgtggctttgtggggagggcgtagttcctaatcccctttccgggcagccgccggggctcggggctgtgagcggccgtgaggctgcctccccgggccccctgcctccgccatgttccgcagggcacgccttagcgtgaagccgaatgtcaggcctggtgtaggcgccaggggctccacagcttccaatccccagcgtggacgggagtctcccaggccgccggagcctgccacggactctgcttccaagcccgcggagcccacagatgtgcccacagtcgatttcggtggagcggagccccaagaaaaggctcctaggagcagtactgaaaagactggtggtgacaatgatgttgaagaatccagtagatcttcctctactgtttcacagagaagaaagcgaatatcaagtacttctagcctggttaagtctagtgtcagtgttccttcagaatctcatcccttatctacaattaatcaagaggctccacagccaactgccacttcaacaaaagagaaacagccatgctcagacagataccgaatatacaaagcccagaaactgagggaaatgttaaaagaagaattgagaaaagagaagaaacaatggaaaaacaaatatgctataaatgaaagtcagaggccaccagatcgttcaaaaatgactatgagagacttcatatattatctaccagataataatccaatgacttcttcactggaacaagaaaagaaaactgaaaagccatcgactccagtccagacaagagagcaagaaggtaagagtactcctaatgctgaagataatgaaatggaagaagagacagatgatgggccattactggttcctcgagtaaaagtggcagaagatggttccattattttggatgaagaaagtttaactgtagaagttttaagaacaaaaggcccttgtgttgttgaagaaaatgaccccatatttgagcgcggttctacaactacatactccagctttaggaaaaactattactctaaaccatggtcaaataaagaaacagatatgttttttttagccatcagcatggtaggaactgacttttctatgatcggacaactttttcctcacagagcaaggatagaaattaagaataaatttaaacgggaagagaaaacaaatggatggagaatagacaaagcattccaggaaaagcgcccttttgacttcgatttttttgctcatttgcttcagaaagttcttgctgaagaagagaaaagaaaacaaaaatctgttaaaaatcacagtttaaaggagaagaaatccaccaaaccacggaaaaatgtaaaagtgaaaaaagttgcctgtgaaggagtgaataatgatccagatgagtctatgagttctagaatttcagacacggaaagatctcagaaggatgctcagacagttgaagaagagtctctgaccttatcaagggaggatgcagagcaggttgcattagaagtagacctaaatcaaaagaaaagaaggaggaagaagcaagatggagctaatgaactgggagtaaacaatcttttagaaaatgccactgttcaggcgggtccttctaaaggagaaaaacacaagaataaatgtcaggctataaggcctgagctaaaggaaggtgaatgcagtaaggagcagatgctttcctgcacacaaaacatagatggcattgtgggttttgcctccactgaaaaagttgagaaaagaactgaccccatcctttcattaagtaatcaacaagatgccacatcagtagcaactgagtcttcagaatcaagcacttcagatttgccttcattcgaagttggaattagagcattgtgtgaggtgaataatgctgagggtagttgtatagaagaaagaaatgttgacctaaaaaataattcactggaaattgatcaaacagaaaatgttaaaccaatgttgagaggtcgcttccaaagacctaaacccaatttgtcaagggctgggaagaaatcagttctttcacaaggcaaaacagagtcagagagcaagaattcacattcaaaaacttcagttgaaaagaaccacgtggaaaaagataaaatgaatacattggacattttgagaatggagactacagagagagagaatccagaagctgaaactgtatctgttttgggtgaaaaaaattgtctgcaggaagggagtcaactaaaggctttaagacctgtacaagtgaggggccgattgcaaaagccaaagccaaatgcaggtaaagctgctgaaagaaaagaaattctcatatcacaggaagaaattggggccaatgtagagaagaatgaaaatgaatcctgtgctgatagagatactcctcaacacatggaagatcaatcgcgtaaagattttgaagaggaagatgtcatattacagcctgagaaaaatgattcttttcaaaatgtgcagccagatgagcccaaggttcttaatgaatgtctaagcgttcaagagaataataaggcaaataaacttaaccaagtcccaattctaaggactcgatttcagaaaccaaagccaaatataggaagaggaactggaaggagagaaatttcctcaaaggaagaggtactagagaagattcttgtctctggggaaatggcggcagcattgagagaaactgtaagactagacacctcaccaaaggagatggtaccagcagagattaatactaaagaaatgcagtcagatttaaaagaaactggaagaagagccatttctcccagggagaagattctagatgtgattgatgacaccatagaaatggagacaggtctgaaagcaatgggaagagagatttgtctaagggagaagacgccagaggtgattgatgccactgaggaaatagacaaagatttggaagaagctggaagaagagaaatatccccacagaaaaatggcccagaggaggttaagcctctaggtgaagtggagacagatttgaaagcaactggaaatgagagttccccaagggagaagacaccagaggtgactgatgccactgaggaaatagacaaaaatttggaagaaactggaagaagaaaaatatccccaagggaaaatggcccagaggaggtcaagcctgtagatgaaatggagacagatttgaacgcaactggaagagagagttctccaagggagaagacaccagaggtgattgatgctactgaggaaatagatttggaagaaactgaaagagaagtatccccacaggaaaatggactagaggaggtcaagcctctaggtgaaatggagacggatttgaaagcaactggaagagacagtttcccaagggggaagacaccagaggtgattgatgccattgaggaaatagagatagatttggaagaaactgaaagagaaatatccccacaggaaaatggcctagaggaggttaagcctctaggtgaaatgcaaacagatttgaaagcaaccggaagggagatttccccaagggagaagacaccagaggtgattgatgccactgaggaaatagacaaagatctggaagaaactggaagaagagaaatatccccagaggaaaatggcccagaggaggtcaagcctgtagatgaaatggagacagacttgaaaacaactggaagagagggttcctcaagggagaagacacgagaggtgattgatgctgctgaggtaatagagacagatttggaagaaactgaaagagaaatatcgccacaggaaaatggcccagaggaggtcaagcctgtaggtaaaatggagacagatttgaaagaaattagagaagaaatttcccaaagggaaaaggtgctagcagagttcagtgctataagggaaaaggagattgatttgaaagaaactggaaaaagagacattcccatgatggagaaagtatcaggaaagatggctgttgttgaagaaatggaggcagatttgaaagaaactggaaaagaaaattttagagagagaggatctgaagagatctgtgttactgaggaaaaggtggcagaattgaaacaaactggaaaaacagacatttctccaagggaaaacgagctagaggagaccagtacctcaagacaaactgacacacatttaatgcagagcggtagcaatgacttcagtgctatgccttcactagatattcagaacattagcagtgaagtactgtcgatgatgcatacacctgtagaagaaaaaagaaattctgaaaaagaagtatcaagtcacttcagtcatttcaagatttcttcacagactcatgaatctgataaaacagaagtccaggggattcaatctccagatgttccagagcagttttcagatattaatttaagcaaatctcttcctcaagaacagaagccacttgaaattaaaccagcaccttttgtgaggagccgattcaaaagaccaaaaccaaacttagcaagagcagctttgaagagagagactacagaatcagaaaaatatatatatgagaagaaatcagaaaccnagaaaatggagactattgtgatgcaagaaaataatgaacaaactgatactctcccttctcaacatgatgaagcttccctaatgatatcaagagaaaaagacacattaggtcacaggaatgaggaggctgtgatattgccatgtacacagactgaaaggaacctttcaccttcaaattcttgtgaacctaaagaggagtctcagtcagcaccagtccagaaaaatgactcagttgtttctgtggggactaataatgtaaacactttccagcaagaaatgaaggaaagtgttatccaaactgctcgacaagtaaggggccgacttcagagaccgagaccaaatataagaaagacaggacagaggcaaatagtagacaaaggtgaagccaaaggcataattaaggaaggaagaacgatattaccaaaagatgaaactgaaaagaaagtcttaactgtgtcaaattctcaaattgaaactgaaattgaagttccatcgtccgcagttccagaacacagaatgtatgaaaatcaaagtcaggtggttcttgtagaaaaccttcatgttaacaaaacaaatgaaacaatcagacatgaaaataaaccgtatgttcctagttcagcacaaatgacaagaaggaaattccaaaaggctaagccaaatttgggaagagcacacagtaagaaagaggaaccagttttagaaaaagtcacaacagatcagagcaaggaaggcaagccagaagatcatttgctgcagaaaggagcttccaacacccagctccttctaaaagaaaaagctgagcttctgacatctctggaggtttcagcaagaaaagattgtgtaggttccaaagagtctgctttggcaaaaatagatgcggaattagaagaagttggaccatcaagaagggttggagaggaaactgtaggagataattcaccatcttcagttgttgaagagcaatatctcaataaactaacaagctgtccacaaccgttaaacgaaacaagttactctaaaattgccctggatgggaaaacaactatctcttctacatctgagtatgagagaaatcgtggtgaaaggagaagtcataaaaagttcaaaccaaatgtcaccagaggtcgtggatcaaaacgagttcggggtaagacctctaagaaggaacctagagcttccaaggccatgctggtgactcttcgggcttcccaggaagaagatgatgatgctgacgattttgagtctgactatgaggaagaaagctatcatcttgctcccgaagaagtaaacaaagctccagtatttgtacctgttggtctcagatctcctgaacctgtttctgctcagattgaggaaacaatggaagagcttgaaataactgtgaatgtcccagatgtaggatgcatagctgttgttgaacatgagctaccaaacacagatgtgactactgaagaaatgaaacaagaagaaaatttgagtgtaccgtttgaaatgaccacaagtgaacatatccaagatgaaccaggtaccaatgatggaagcaccgaagctgcaataactttacttacaatgggagatctagtattgcagtcagagatcagtagtgaacagggtgatgtaggagtatgtatacttcctcatgttcattcaaaggataaaagccatattccttctagcctagataatgtaaatcacaaaattgttcatgaatgtcaggaactttcttcacctgtcattactacatctcctgcatcatttgaagaaaacaagattgtattggaggaacaaagttccagagaagaaataagtttaatggagaaagtaaaggagaatgctacaccaaccaggaatacaatttctaaagtgaccagtaatttgagaataagaagtaggcttgctaagcctaaaccaaatcttgagaagactttagggaccaacaggcttgatgattatcaggaagtttccagtttgtgtgtaaccaaaggggcagaaatggaaactcaaagagaaacagagaaaaatgcttccaaagcaacagaattggaaaataaaaaccttggaccagttacaacagcagagaataaggatcagagcaaattggcatgtgtacatggtatcaaagggaccagtatttcttcagaagtaaacctaactgaaagaaacgaaaatcaagaagagagctctcaggaggttcacatgttgtcagttgctccagttgcttcctctgagacagggccctgcacacttggtttggataggggtcttggtgaaaattctgttgaagagccccagataaaggactctaaaggagacagtgtgcttacacttcctgtgccagagtatacaccaacaagtattccagaagtccaacaagagaatataatcaatcctcaagacctaacagtgaatctagttgctaatgtacctcaagatggagaagatgaacaagcctttattttaactctggtggaaatcccagccaatgcagtagaagaatttactgatgccactgcacagttcatgccaaaccctttactgccagctcccatattggtcaaatcagtgaataccgaagaaaggggtgacatgagtatttgtttaccagcaacttcagttggtcaagatgccatgggtttatctatttctggaagagataattctaaaaagcctcctgataatttggatcttgtatctaggaagagatttcaatgcaggcttgataaaaatgaccacattcctcctgccaaaaaacgttcactcactttaagagatgactgtcaagaatataccactgaggtgcactcaaaggaattaacaaatgtttttgaggaaacaggggagtctcacaagggacaagatatttttcttacctcaggaagcacactgacaactccagaacctcaaagacagcaagttgaagcagcttttcagagtagaggatctagatctcctgatgcatgcatggacaagaatgtgcctcagttacctcaggatgaaatgattgtgtctgataaggaagaaagaactgatgctgctcctaagtctcagcaaatggatagcagaacatcgtcttctaaagcctcactatccagacctggcagaagacccctgggatttttatctttaatatgctcaaagaatagtttggagtctgatgaacctatgcaagtccatagtaagaaacgcctaaaacctcttatacctggattaagaaagaaattgaaaagatctaatccattcaatgaaagccaggaaaaaaatcgagagtcctctgatctgcttccatctccaagtgttattactactcaatctgagaatattagcagctcagcaactcaggtttcttgtgatcagcccttactgaaagaaggatataaaagtgcccaaaagcgggcccctcaaggggaggcaaccacagtctctgaatatttcttcaatgatatcttcattgaagtggatgaaacagaataaaacaatcttttctctttttcttttttaaattaggtctaggatttccagagtcaattacatcaacaaaacagtatttagagcaaaatatcactgtcttatttttctttaggttgattttgaatacttaatgagcttgatttgaagcttttataatcagtggaaaacatttctgaggttcctttcattctgactgattcagcattttgcaaatagcaagcaattaagactgctttctcagacagaaataacaactcttgtttacattttgactcttcctgtgctaagcacacatggacatttgggaatgttgtggatatatgtctctgtatgaattgcagtgcagacagatttgggggttaattgtatcatatttaacatttagcaacttcttttgtgaagattttttatttttagggggagatgatgaaggatgaaggctttttcatttgcttctaagtacagtcatgtatcacataatgaagtttaagtcaatgatggaccacatatattacagtggtcccatgcaattaaaatggagataaattcctatcaactagtgacattatagccatcataacacagtgcattgcttttttatgtttagatatgtttagatacacaaatacttactattgtgttacaactgcctacagtattcagcatagtaacacattgtagaggtttgtagccgaggagcaataggctataccacatagcctcagtctgtacggtgtgtagcagcctgtaccatctcagtgtttgtaagtacactctgcgttgtttcacacaagatcacctaacaaggcaattcttagaacatgtagttaagggacacgtgactatatgtgaaaacaaattgtcaaacttcactttagtatggcaaatgttaaagaacttttctattatcagctgtttgtctgactgaaaaatacatatttttctaattcatggtgatgtaacattagtcctaattgaaaaactagtatttaaacataattatttataaagatgacacatcaaagggcttatttatttttaaattttttatttaaaaggatattcagttttagctatttttacccctcagattgtagataaagaaggcattaaatttatgtttgtctcctttttctgtttaattttaaagatatttaaaatgatataactaaaaatgtttagctggtgtatatgttttgaatacctttttcccctcagtttagtatattgactttgtactgtaaatttttctgcttttcttggataatctcaggattttcatgaggatagggggaactcaactttatttatgagacaaaatttccatacaaagctcaatctcctttatatacccacagacataatattagtttttaaaaagccaatttcttcatagttttttcccattaaattctcaaggaacacttggatctttaagcacggaacataatcatgatgttaaaaacagagaaaataaggctttataaagttaatgattatcatcagtatgaatttaaggtttgttttaatttcaagatttgattttttatacgtgtaattctattatctacccaagcagatctgtagtggttccaattagacttctcaaacagcaaatttatcctgattttatttgaaaagcctcttggattgatagtatagtagctcaggcattggaaactttctgcaaactgttttgggtttgcaggccagatggtctctgtggcagctactcagctctgcaatttcagtgtgaaagaagccatagacagtacttgaatgaaggactgtggctggattggccttttagtttgaccccctacattaggccccaaattttcttaccctgaggtgctgatatctgtatggatgagttatttgtcactaaagttatgagttgtgcctaaaagttaaaactgttgactgtattatgtaatgatcagtatttcagttgggaagatattttagagtctagataattatgtttgtatattgaaaaaatggtggccagtttttaagttccttaatagaagagaattatgtctcagcacatataacagtaatgctaatttattgaaactactgctgttagagcacttcttattcattgtcttttagtgaaatttatggcgtaacactttgtcagagaggaggctatataattcggagcggaaattgtctataagtaggcatttatttcatgattgatatgtcacagaaatcatggtagtaaatcacattgctatttgaataccctgtttttgtaagtttttaaaactcatattctgaaaagatttcattctcttagtgttagcttgggagttagattgccatgattaaactattatttatccttgtgtaatattagtttttaactttaacatctgtttctttttaatctataatgagctagttttatggaaaatggaatttcttactatataaagaatacagagactcattgtattagagaatcaagtcagccagctaaagtatcctactgttaaatccttaaacctaattttggaaaagagaaagttaatcaatgtatttaccttacatgttggaaagaactatgttaggtctgattcatgtgaagaagatgttgcaaaggatttatttcacaaattttaaaggagatatgagtaaaagtttttatcttttcttgactttttctcctgaacacttatgtcttagcaagtggtcaacatgaggatttgaacgcctaattgttggtaaatggttgaggcatgacaaaaatattaatatccactgtttaccatcatgttatttgaaacaaaagtgaccatgtatactatcttgcttgaagaagtctttgacagaaaaagcaatatcatgtcatttataaattttcttgttctaaagaaagcagttatatatatatataaattatgtaaataaaagttattttatatca

SEQ ID NO: 292628 - DNA, 6780 bp, Homo sapiens
ggtgtgtggcagggtcatgaaaaagcggcggcggcgggagagaggaggaggcggcggcggggcagtgaaactacggtagctgccccctgagctggtggtgtggctttgtggggagggcgtagttcctaatcccctttccgggcagccgccggggctcggggctgtgagcggccgtgaggctgcctccccgggccccctgcctccgccatgttccgcagggcacgccttagcgtgaagccgaatgtcaggcctggtgtaggcgccaggggctccacagcttccaatccccagcgtggacgggagtctcccaggccgccggagcctgccacggactctgcttccaagcccgcggagcccacagatgtgcccacagtcgatttcggtggagcggagccccaagaaaaggctcctaggagcagtactgaaaagactggtggtgacaatgatgttgaagaatccagtagatcttcctctactgtttcacagagaagaaagcgaatatcaagtacttctagcctggttaagtctagtgtcagtgttccttcagaatctcatcccttatctacaattaatcaagaggctccacagccaactgccacttcaacaaaagagaaacagccatgctcagacagataccgaatatacaaagcccagaaactgagggaaatgttaaaagaagaattgagaaaagagaagaaacaatggaaaaacaaatatgctataaatgaaagtcagaggccaccagatcgttcaaaaatgactatgagagacttcatatattatctaccagataataatccaatgacttcttcactggaacaagaaaagaaaactgaaaagccatcgactccagtccagacaagagagcaagaaggtaagagtactcctaatgctgaagataatgaaatggaagaagagacagatgatgggccattactggttcctcgagtaaaagtggcagaagatggttccattattttggatgaagaaagtttaactgtagaagttttaagaacaaaaggcccttgtgttgttgaagaaaatgaccccatatttgagcgcggttctacaactacatactccagctttaggaaaaactattactctaaaccatggtcaaataaagaaacagatatgttttttttagccatcagcatggtaggaactgacttttctatgatcggacaactttttcctcacagagcaaggatagaaattaagaataaatttaaacgggaagagaaaacaaatggatggagaatagacaaagcattccaggaaaagcgcccttttgacttcgatttttttgctcatttgcttcagaaagttcttgctgaagaagagaaaagaaaacaaaaatctgttaaaaatcacagtttaaaggagaagaaatccaccaaaccacggaaaaatgtaaaagtgaaaaaagttgcctgtgaaggagtgaataatgatccagatgagtctatgagttctagaatttcagacacggaaagatctcagaaggatgctcagacagttgaagaagagtctctgaccttatcaagggaggatgcagagcaggttgcattagaagtagacctaaatcaaaagaaaagaaggaggaagaagcaagatggagctaatgaactgggagtaaacaatcttttagaaaatgccactgttcaggcgggtccttctaaaggagaaaaacacaagaataaatgtcaggctataaggcctgagctaaaggaaggtgaatgcagtaaggagcagatgctttcctgcacacaaaacatagatggcattgtgggttttgcctccactgaaaaagttgagaaaagaactgaccccatcctttcattaagtaatcaacaagatgccacatcagtagcaactgagtcttcagaatcaagcacttcagatttgccttcattcgaagttggaattagagcattgtgtgaggtgaataatgctgagggtagttgtatagaagaaagaaatgttgacctaaaaaataattcactggaaattgatcaaacagaaaatgttaaaccaatgttgagaggtcgcttccaaagacctaaacccaatttgtcaagggctgggaagaaatcagttctttcacaaggcaaaacagagtcagagagcaagaattcacattcaaaaacttcagttgaaaagaaccacgtggaaaaagataaaatgaatacattggacattttgagaatggagactacagagagagagaatccagaagctgaaactgtatctgttttgggtgaaaaaaattgtctgcaggaagggagtcaactaaaggctttaagacctgtacaagtgaggggccgattgcaaaagccaaagccaaatgcaggtaaagctgctgaaagaaaagaaattctcatatcacaggaagaaattggggccaatgtagagaagaatgaaaatgaatcctgtgctgatagagatactcctcaacacatggaagatcaatcgcgtaaagattttgaagaggaagatgtcatattacagcctgagaaaaatgattcttttcaaaatgtgcagccagatgagcccaaggttcttaatgaatgtctaagcgttcaagagaataataaggcaaataaacttaaccaagtcccaattctaaggactcgatttcagaaaccaaagccaaatataggaagaggaactggaaggagagaaatttcctcaaaggaagaggtactagagaagattcttgtctctggggaaatggcggcagcattgagagaaactgtaagactagacacctcaccaaaggagatggtaccagcagagattaatactaaagaaatgcagtcagatttaaaagaaactggaagaagagccatttctcccagggagaagattctagatgtgattgatgacaccatagaaatggagacaggtctgaaagcaatgggaagagagatttgtctaagggagaagacgccagaggtgattgatgccactgaggaaatagacaaagatttggaagaagctggaagaagagaaatatccccacagaaaaatggcccagaggaggttaagcctctaggtgaagtggagacagatttgaaagcaactggaaatgagagttccccaagggagaagacaccagaggtgactgatgccactgaggaaatagacaaaaatttggaagaaactggaagaagaaaaatatccccaagggaaaatggcccagaggaggtcaagcctgtagatgaaatggagacagatttgaacgcaactggaagagagagttctccaagggagaagacaccagaggtgattgatgctactgaggaaatagatttggaagaaactgaaagagaagtatccccacaggaaaatggactagaggaggtcaagcctctaggtgaaatggagacggatttgaaagcaactggaagagacagtttcccaagggggaagacaccagaggtgattgatgccattgaggaaatagagatagatttggaagaaactgaaagagaaatatccccacaggaaaatggcctagaggaggttaagcctctaggtgaaatgcaaacagatttgaaagcaaccggaagggagatttccccaagggagaagacaccagaggtgattgatgccactgaggaaatagacaaagatctggaagaaactggaagaagagaaatatccccagaggaaaatggcccagaggaggtcaagcctgtagatgaaatggagacagacttgaaaacaactggaagagagggttcctcaagggagaagacacgagaggtgattgatgctgctgaggtaatagagacagatttggaagaaactgaaagagaaatatcgccacaggaaaatggcccagaggaggtcaagcctgtaggtaaaatggagacagatttgaaagaaattagagaagaaatttcccaaagggaaaaggtgctagcagagttcagtgctataagggaaaaggagattgatttgaaagaaactggaaaaagagacattcccatgatggagaaagtatcaggaaagatggctgttgttgaagaaatggaggcagatttgaaagaaactggaaaagaaaattttagagagagaggatctgaagagatctgtgttactgaggaaaaggtggcagaattgaaacaaactggaaaaacagacatttctccaagggaaaacgagctagaggagaccagtacctcaagacaaactgacacacatttaatgcagagcggtagcaatgacttcagtgctatgccttcactagatattcaggtatgtatttttctgtcctttaaaagttttttgaatgcttttttcagaggaaataaataattccatgattattttgtccttaagtccaacaacacttaaaaatctctaaaagtctaaagtcttttgtagccctaagtttctatgtttcagtgccttgaagaaactgtatgttcttttttaaaaagataactttaggctggtcttgaactgagctcaggtgatccacctgccctggcctcccaaagtgctgggattacaggtgtgagtcacagcgcccagcctcatgcagtatttttctttctgtgactggcttatttcacttaatgtaatgtcctcaaggttcatccatggtgtagcatatgagaagatttccttttttatgagcaaataatattctagtacatgtatagaccacattttctttatggacatttaggttgtttttgtctgttggcatcactgaacatgggagtgcaaatatctctttgagatcctgatttcagttcttgtggataaatacccagaagtggggttgctagatcatatggtagttctacttttaattttttgaggaccctccatactgtttccaatagcgggtacaccattttacataaccaccaacaatgtacagggttccagtttttttcacatcttcttcaatacttgttatcttttattttattaataatgtccttctgaacaggtagaaggtggtttcttatggttgttttgatttgcatttcccggataattattgagttgagcatctttcatagctgttagccatttgtatatcttctttggagacatgtctattcaggtcctgtgcccaattttttaattaggttattttcttttttgctattgagttttgagaattatttatatagtttggattttaggaccttatcagaaatatgatttacacattttctcccattccataggttgccttttcactctgctgtttcctttggcgtacagaagttttttagttcaatgtagtcccatttgtctaattttgcttttgttgcctatacttttggtgtcatatctaagaaactgttgccaaaaacaaacttaaagctgtttactatttttaagcatacaatttagtggcattatttacatttacattgttgtgcagccatcagcactatttctaaagctattttatcactgcaaacagaaaacctgtacccattatgcagtaattcctcattctcccctccctgcaaccactgataatctctaatctgctttctgtttctcatccaagtattaatcaggaccagacttgcttagtttgagatcaaattaggctcattgagagcggtaaggatgtagacaactttctgtctctatgactctgtctaatctagatattcacataagtggaatcatatgctatttctcatagttgtttgttcctaggtgacagataatctaaagtgtgagttcagagatacacctaatttcataaactacacaaaactgtactcgtgactttttctaatttttaaaataattaaaaaatgttgtgacagggtcttactctgttgctcaggctagagtgtagtagcgtgatcacagctcaccacaaccttgaactcttgggctcaaatgattctatcacctcagcatctcgagtagctgggactacagtcatgggacaccatgactggctaattttaaaaacattttttagtagagatgttttccaggctggtctcaaactcctgggctcaagcaatcctcgcacctcagcatgagccactgtgtctggccctagctttttctaatttaggggaaaaacaaccttgtaatgactgttaaagtcccagttggttttggaaaacaaagagttgattctaaaattgtcatgtacacaagaacaaaggctcaagaatggtaaagacagttttaaaaaacaccaactttgcagagggactgtgctagtagactaattttcgagctagagtaactaaagcagcatggtattggtgtagggttagatgaattgactcactggaactgaatatagagtttaggaagagacatttaggaatctgttatatggcagaggtagctttagaaattagcgggcaaagatagaactaacttcattagattgagctgagatttgaaaaacataatatttgatccttgtgttaccatatccgctaacttcctgatggattgaagactacatgtataaaacaaatctttacaacttttagaagaaatgtagaaaaatatctttgtaatgtgaaggcctcaggtaagacatttctattaagacgtagaaaacacagactttaaaagataagattgataagtttgatggtagtaaaattaaatacttctgttaacaaatcctccataaagaaaataaaaggcaagttactgatcgggagattttatgtgtaatatctagacaataaaaatatatagagaactcttgctgataagtcaggaaaacataaacacctagtagaaaaaatgaacaag

SEQ ID NO: 292629 - DNA, 11468 bp, Homo sapiens
  misc_feature (4612)..(4612): n is a, c, g, or t
ggtgtgtggcagggtcatgaaaaagcggcggcggcgggagagaggaggaggcggcggcggggcagtgaaactacggtagctgccccctgagctggtggtgtggctttgtggggagggcgtagttcctaatcccctttccgggcagccgccggggctcggggctgtgagcggccgtgaggctgcctccccgggccccctgcctccgccatgttccgcagggcacgccttagcgtgaagccgaatgtcaggcctggtgtaggcgccaggggctccacagcttccaatccccagcgtggacgggagtctcccaggccgccggagcctgccacggactctgcttccaagcccgcggagcccacagatgtgcccacagtcgatttcggtggagcggagccccaagaaaaggctcctaggagcagtactgaaaagactggtggtgacaatgatgttgaagaatccagtagatcttcctctactgtttcacagagaagaaagcgaatatcaagtacttctagcctggttaagtctagtgtcagtgttccttcagaatctcatcccttatctacaattaatcaagaggctccacagccaactgccacttcaacaaaagagaaacagccatgctcagacagataccgaatatacaaagcccagaaactgagggaaatgttaaaagaagaattgagaaaagagaagaaacaatggaaaaacaaatatgctataaatgaaagtcagaggccaccagatcgttcaaaaatgactatgagagacttcatatattatctaccagataataatccaatgacttcttcactggaacaagaaaagaaaactgaaaagccatcgactccagtccagacaagagagcaagaaggtaagagtactcctaatgctgaagataatgaaatggaagaagagacagatgatgggccattactggttcctcgagtaaaagtggcagaagatggttccattattttggatgaagaaagtttaactgtagaagttttaagaacaaaaggcccttgtgttgttgaagaaaatgaccccatatttgagcgcggttctacaactacatactccagctttaggaaaaactattactctaaaccatggtcaaataaagaaacagatatgttttttttagccatcagcatggtaggaactgacttttctatgatcggacaactttttcctcacagagcaaggatagaaattaagaataaatttaaacgggaagagaaaacaaatggatggagaatagacaaagcattccaggaaaagcgcccttttgacttcgatttttttgctcatttgcttcagaaagttcttgctgaagaagagaaaagaaaacaaaaatctgttaaaaatcacagtttaaaggagaagaaatccaccaaaccacggaaaaatgtaaaagtgaaaaaagttgcctgtgaaggagtgaataatgatccagatgagtctatgagttctagaatttcagacacggaaagatctcagaaggatgctcagacagttgaagaagagtctctgaccttatcaagggaggatgcagagcaggttgcattagaagtagacctaaatcaaaagaaaagaaggaggaagaagcaagatggagctaatgaactgggagtaaacaatcttttagaaaatgccactgttcaggcgggtccttctaaaggagaaaaacacaagaataaatgtcaggctataaggcctgagctaaaggaaggtgaatgcagtaaggagcagatgctttcctgcacacaaaacatagatggcattgtgggttttgcctccactgaaaaagttgagaaaagaactgaccccatcctttcattaagtaatcaacaagatgccacatcagtagcaactgagtcttcagaatcaagcacttcagatttgccttcattcgaagttggaattagagcattgtgtgaggtgaataatgctgagggtagttgtatagaagaaagaaatgttgacctaaaaaataattcactggaaattgatcaaacagaaaatgttaaaccaatgttgagaggtcgcttccaaagacctaaacccaatttgtcaagggctgggaagaaatcagttctttcacaaggcaaaacagagtcagagagcaagaattcacattcaaaaacttcagttgaaaagaaccacgtggaaaaagataaaatgaatacattggacattttgagaatggagactacagagagagagaatccagaagctgaaactgtatctgttttgggtgaaaaaaattgtctgcaggaagggagtcaactaaaggctttaagacctgtacaagtgaggggccgattgcaaaagccaaagccaaatgcaggtaaagctgctgaaagaaaagaaattctcatatcacaggaagaaattggggccaatgtagagaagaatgaaaatgaatcctgtgctgatagagatactcctcaacacatggaagatcaatcgcgtaaagattttgaagaggaagatgtcatattacagcctgagaaaaatgattcttttcaaaatgtgcagccagatgagcccaaggttcttaatgaatgtctaagcgttcaagagaataataaggcaaataaacttaaccaagtcccaattctaaggactcgatttcagaaaccaaagccaaatataggaagaggaactggaaggagagaaatttcctcaaaggaagaggtactagagaagattcttgtctctggggaaatggcggcagcattgagagaaactgtaagactagacacctcaccaaaggagatggtaccagcagagattaatactaaagaaatgcagtcagatttaaaagaaactggaagaagagccatttctcccagggagaagattctagatgtgattgatgacaccatagaaatggagacaggtctgaaagcaatgggaagagagatttgtctaagggagaagacgccagaggtgattgatgccactgaggaaatagacaaagatttggaagaagctggaagaagagaaatatccccacagaaaaatggcccagaggaggttaagcctctaggtgaagtggagacagatttgaaagcaactggaaatgagagttccccaagggagaagacaccagaggtgactgatgccactgaggaaatagacaaaaatttggaagaaactggaagaagaaaaatatccccaagggaaaatggcccagaggaggtcaagcctgtagatgaaatggagacagatttgaacgcaactggaagagagagttctccaagggagaagacaccagaggtgattgatgctactgaggaaatagatttggaagaaactgaaagagaagtatccccacaggaaaatggactagaggaggtcaagcctctaggtgaaatggagacggatttgaaagcaactggaagagacagtttcccaagggggaagacaccagaggtgattgatgccattgaggaaatagagatagatttggaagaaactgaaagagaaatatccccacaggaaaatggcctagaggaggttaagcctctaggtgaaatgcaaacagatttgaaagcaaccggaagggagatttccccaagggagaagacaccagaggtgattgatgccactgaggaaatagacaaagatctggaagaaactggaagaagagaaatatccccagaggaaaatggcccagaggaggtcaagcctgtagatgaaatggagacagacttgaaaacaactggaagagagggttcctcaagggagaagacacgagaggtgattgatgctgctgaggtaatagagacagatttggaagaaactgaaagagaaatatcgccacaggaaaatggcccagaggaggtcaagcctgtaggtaaaatggagacagatttgaaagaaattagagaagaaatttcccaaagggaaaaggtgctagcagagttcagtgctataagggaaaaggagattgatttgaaagaaactggaaaaagagacattcccatgatggagaaagtatcaggaaagatggctgttgttgaagaaatggaggcagatttgaaagaaactggaaaagaaaattttagagagagaggatctgaagagatctgtgttactgaggaaaaggtggcagaattgaaacaaactggaaaaacagacatttctccaagggaaaacgagctagaggagaccagtacctcaagacaaactgacacacatttaatgcagagcggtagcaatgacttcagtgctatgccttcactagatattcagaacattagcagtgaagtactgtcgatgatgcatacacctgtagaagaaaaaagaaattctgaaaaagaagtatcaagtcacttcagtcatttcaagatttcttcacagactcatgaatctgataaaacagaagtccaggggattcaatctccagatgttccagagcagttttcagatattaatttaagcaaatctcttcctcaagaacagaagccacttgaaattaaaccagcaccttttgtgaggagccgattcaaaagaccaaaaccaaacttagcaagagcagctttgaagagagagactacagaatcagaaaaatatatatatgagaagaaatcagaaaccnagaaaatggagactattgtgatgcaagaaaataatgaacaaactgatactctcccttctcaacatgatgaagcttccctaatgatatcaagagaaaaagacacattaggtcacaggaatgaggaggctgtgatattgccatgtacacagactgaaaggaacctttcaccttcaaattcttgtgaacctaaagaggagtctcagtcagcaccagtccagaaaaatgactcagttgtttctgtggggactaataatgtaaacactttccagcaagaaatgaaggaaagtgttatccaaactgctcgacaagtaaggggccgacttcagagaccgagaccaaatataagaaagacaggacagaggcaaatagtagacaaaggtgaagccaaaggcataattaaggaaggaagaacgatattaccaaaagatgaaactgaaaagaaagtcttaactgtgtcaaattctcaaattgaaactgaaattgaagttccatcgtccgcagttccagaacacagaatgtatgaaaatcaaagtcaggtggttcttgtagaaaaccttcatgttaacaaaacaaatgaaacaatcagacatgaaaataaaccgtatgttcctagttcagcacaaatgacaagaaggaaattccaaaaggctaagccaaatttgggaagagcacacagtaagaaagaggaaccagttttagaaaaagtcacaacagatcagagcaaggaaggcaagccagaagatcatttgctgcagaaaggagcttccaacacccagctccttctaaaagaaaaagctgagcttctgacatctctggaggtttcagcaagaaaagattgtgtaggttccaaagagtctgctttggcaaaaatagatgcggaattagaagaagttggaccatcaagaagggttggagaggaaactgtaggagataattcaccatcttcagttgttgaagagcaatatctcaataaactaacaagctgtccacaaccgttaaacgaaacaagttactctaaaattgccctggatgggaaaacaactatctcttctacatctgagtatgagagaaatcgtggtgaaaggagaagtcataaaaagttcaaaccaaatgtcaccagaggtcgtggatcaaaacgagttcggggtaagacctctaagaaggaacctagagcttccaaggccatgctggtgactcttcgggcttcccaggaagaagatgatgatgctgacgattttgagtctgactatgaggaagaaagctatcatcttgctcccgaagaagtaaacaaagctccagtatttgtacctgttggtctcagatctcctgaacctgtttctgctcagattgaggaaacaatggaagagcttgaaataactgtgaatgtcccagatgtaggatgcatagctgttgttgaacatgagctaccaaacacagatgtgactactgaagaaatgaaacaagaagaaaatttgagtgtaccgtttgaaatgaccacaagtgaacatatccaagatgaaccaggtaccaatgatggaagcaccgaagctgcaataactttacttacaatgggagatctagtattgcagtcagagatcagtagtgaacagggtgatgtaggagtatgtatacttcctcatgttcattcaaaggataaaagccatattccttctagcctagataatgtaaatcacaaaattgttcatgaatgtcaggaactttcttcacctgtcattactacatctcctgcatcatttgaagaaaacaagattgtattggaggaacaaagttccagagaagaaataagtttaatggagaaagtaaaggagaatgctacaccaaccaggaatacaatttctaaagtgaccagtaatttgagaataagaagtaggcttgctaagcctaaaccaaatcttgagaagactttagggaccaacaggcttgatgattatcaggaagtttccagtttgtgtgtaaccaaaggggcagaaatggaaactcaaagagaaacagagaaaaatgcttccaaagcaacagaattggaaaataaaaaccttggaccagttacaacagcagagaataaggatcagagcaaattggcatgtgtacatggtatcaaagggaccagtatttcttcagaagtaaacctaactgaaagaaacgaaaatcaagaagagagctctcaggaggttcacatgttgtcagttgctccagttgcttcctctgagacagggccctgcacacttggtttggataggggtcttggtgaaaattctgttgaagagccccagataaaggactctaaaggagacagtgtgcttacacttcctgtgccagagtatacaccaacaagtattccagaagtccaacaagagaatataatcaatcctcaagacctaacagtgaatctagttgctaatgtacctcaagatggagaagatgaacaagcctttattttaactctggtggaaatcccagccaatgcagtagaagaatttactgatgccactgcacagttcatgccaaaccctttactgccagctcccatattggtcaaatcagtgaataccgaagaaaggggtgacatgagtatttgtttaccagcaacttcagttggtcaagatgccatgggtttatctatttctggaagagataattctaaaaagcctcctgataatttggatcttgtatctaggaagagatttcaatgcaggcttgataaaaatgaccacattcctcctgccaaaaaacgttcactcactttaagagatgactgtcaagaatataccactgaggtgcactcaaaggaattaacaaatgtttttgaggaaacaggggagtctcacaagggacaagatatttttcttacctcaggaagcacactgacaactccagaacctcaaagacagcaagttgaagcagcttttcagagtagaggatctagatctcctgatgcatgcatggacaagaatgtgcctcagttacctcaggatgaaatgattgtgtctgataaggaagaaagaactgatgctgctcctaagtctcagcaaatggatagcagaacatcgtcttctaaagcctcactatccagacctggcagaagacccctgggatttttatctttaatatgctcaaagaatagtttggagtctgatgaacctatgcaagtccatagtaagaaacgcctaaaacctcttatacctggattaagaaagaaattgaaaagatctaatccattcaatgaaagccaggaaaaaaatcgagagtcctctgatctgcttccatctccaagtgttattactactcaatctgagaatattagcagctcagcaactcaggtttcttgtgatcagcccttactgaaagaaggatataaaagtgcccaaaagcgggcccctcaaggggaggcaaccacagtctctgaatatttcttcaatgatatcttcattgaagtggatgaaacagaataaaacaatcttttctctttttcttttttaaattaggtctaggatttccagagtcaattacatcaacaaaacagtatttagagcaaaatatcactgtcttatttttctttaggttgattttgaatacttaatgagcttgatttgaagcttttataatcagtggaaaacatttctgaggttcctttcattctgactgattcagcattttgcaaatagcaagcaattaagactgctttctcagacagaaataacaactcttgtttacattttgactcttcctgtgctaagcacacatggacatttgggaatgttgtggatatatgtctctgtatgaattgcagtgcagacagatttgggggttaattgtatcatatttaacatttagcaacttcttttgtgaagattttttatttttagggggagatgatgaaggatgaaggctttttcatttgcttctaagtacagtcatgtatcacataatgaagtttaagtcaatgatggaccacatatattacagtggtcccatgcaattaaaatggagataaattcctatcaactagtgacattatagccatcataacacagtgcattgcttttttatgtttagatatgtttagatacacaaatacttactattgtgttacaactgcctacagtattcagcatagtaacacattgtagaggtttgtagccgaggagcaataggctataccacatagcctcagtctgtacggtgtgtagcagcctgtaccatctcagtgtttgtaagtacactctgcgttgtttcacacaagatcacctaacaaggcaattcttagaacatgtagttaagggacacgtgactatatgtgaaaacaaattgtcaaacttcactttagtatggcaaatgttaaagaacttttctattatcagctgtttgtctgactgaaaaatacatatttttctaattcatggtgatgtaacattagtcctaattgaaaaactagtatttaaacataattatttataaagatgacacatcaaagggcttatttatttttaaattttttatttaaaaggatattcagttttagctatttttacccctcagattgtagataaagaaggcattaaatttatgtttgtctcctttttctgtttaattttaaagatatttaaaatgatataactaaaaatgtttagctggtgtatatgttttgaatacctttttcccctcagtttagtatattgactttgtactgtaaatttttctgcttttcttggataatctcaggattttcatgaggatagggggaactcaactttatttatgagacaaaatttccatacaaagctcaatctcctttatatacccacagacataatattagtttttaaaaagccaatttcttcatagttttttcccattaaattctcaaggaacacttggatctttaagcacggaacataatcatgatgttaaaaacagagaaaataaggctttataaagttaatgattatcatcagtatgaatttaaggtttgttttaatttcaagatttgattttttatacgtgtaattctattatctacccaagcagatctgtagtggttccaattagacttctcaaacagcaaatttatcctgattttatttgaaaagcctcttggattgatagtatagtagctcaggcattggaaactttctgcaaactgttttgggtttgcaggccagatggtctctgtggcagctactcagctctgcaatttcagtgtgaaagaagccatagacagtacttgaatgaaggactgtggctggattggccttttagtttgaccccctacattaggccccaaattttcttaccctgaggtgctgatatctgtatggatgagttatttgtcactaaagttatgagttgtgcctaaaagttaaaactgttgactgtattatgtaatgatcagtatttcagttgggaagatattttagagtctagataattatgtttgtatattgaaaaaatggtggccagtttttaagttccttaatagaagagaattatgtctcagcacatataacagtaatgctaatttattgaaactactgctgttagagcacttcttattcattgtcttttagtgaaatttatggcgtaacactttgtcagagaggaggctatataattcggagcggaaattgtctataagtaggcatttatttcatgattgatatgtcacagaaatcatggtagtaaatcacattgctatttgaataccctgtttttgtaagtttttaaaactcatattctgaaaagatttcattctcttagtgttagcttgggagttagattgccatgattaaactattatttatccttgtgtaatattagtttttaactttaacatctgtttctttttaatctataatgagctagttttatggaaaatggaatttcttactatataaagaatacagagactcattgtattagagaatcaagtcagccagctaaagtatcctactgttaaatccttaaacctaattttggaaaagagaaagttaatcaatgtatttaccttacatgttggaaagaactatgttaggtctgattcatgtgaagaagatgttgcaaaggatttatttcacaaattttaaaggagatatgagtaaaagtttttatcttttcttgactttttctcctgaacacttatgtcttagcaagtggtcaacatgaggatttgaacgcctaattgttggtaaatggttgaggcatgacaaaaatattaatatccactgtttaccatcatgttatttgaaacaaaagtgaccatgtatactatcttgcttgaagaagtctttgacagaaaaagcaatatcatgtcatttataaattttcttgttctaaagaaagcagttatatatatatataaattatgtaaataaaagttattttatatcaaaaaaaaaaaaaaaaaaaaaaaaaaaaaaaaaaaaaaaaaaaaaaaaaaaaaaagaaaaaaaaaaaaaaaaaagggggggggaaaaaaaaaacaggggagaatataacatttataaaagcaaaagataaaatgaagagagagccagcgtctatcaaaaaaacagaccgatcgaagaaagaaacagaacaaagaggttaaaatctgaggacgagaaccaatttgaccggggattaaaaaagaggacaccaccgcacaagaattcccgcaggggaaataaactaggagttgtactacgaaccaccctaataacgcagcaagacgtgccgacattaaacaataagcggcgaaatctacagggagaagaataacaggtaccgaggatacacgatagcagcgagaggagaagagtcaacacgacaacgtagaggcagaacacacggcacagagaac

SEQ ID NO: 292630 - DNA, 10580 bp, Homo sapiens
  misc_feature (4612)..(4612): n is a, c, g, or t
ggtgtgtggcagggtcatgaaaaagcggcggcggcgggagagaggaggaggcggcggcggggcagtgaaactacggtagctgccccctgagctggtggtgtggctttgtggggagggcgtagttcctaatcccctttccgggcagccgccggggctcggggctgtgagcggccgtgaggctgcctccccgggccccctgcctccgccatgttccgcagggcacgccttagcgtgaagccgaatgtcaggcctggtgtaggcgccaggggctccacagcttccaatccccagcgtggacgggagtctcccaggccgccggagcctgccacggactctgcttccaagcccgcggagcccacagatgtgcccacagtcgatttcggtggagcggagccccaagaaaaggctcctaggagcagtactgaaaagactggtggtgacaatgatgttgaagaatccagtagatcttcctctactgtttcacagagaagaaagcgaatatcaagtacttctagcctggttaagtctagtgtcagtgttccttcagaatctcatcccttatctacaattaatcaagaggctccacagccaactgccacttcaacaaaagagaaacagccatgctcagacagataccgaatatacaaagcccagaaactgagggaaatgttaaaagaagaattgagaaaagagaagaaacaatggaaaaacaaatatgctataaatgaaagtcagaggccaccagatcgttcaaaaatgactatgagagacttcatatattatctaccagataataatccaatgacttcttcactggaacaagaaaagaaaactgaaaagccatcgactccagtccagacaagagagcaagaaggtaagagtactcctaatgctgaagataatgaaatggaagaagagacagatgatgggccattactggttcctcgagtaaaagtggcagaagatggttccattattttggatgaagaaagtttaactgtagaagttttaagaacaaaaggcccttgtgttgttgaagaaaatgaccccatatttgagcgcggttctacaactacatactccagctttaggaaaaactattactctaaaccatggtcaaataaagaaacagatatgttttttttagccatcagcatggtaggaactgacttttctatgatcggacaactttttcctcacagagcaaggatagaaattaagaataaatttaaacgggaagagaaaacaaatggatggagaatagacaaagcattccaggaaaagcgcccttttgacttcgatttttttgctcatttgcttcagaaagttcttgctgaagaagagaaaagaaaacaaaaatctgttaaaaatcacagtttaaaggagaagaaatccaccaaaccacggaaaaatgtaaaagtgaaaaaagttgcctgtgaaggagtgaataatgatccagatgagtctatgagttctagaatttcagacacggaaagatctcagaaggatgctcagacagttgaagaagagtctctgaccttatcaagggaggatgcagagcaggttgcattagaagtagacctaaatcaaaagaaaagaaggaggaagaagcaagatggagctaatgaactgggagtaaacaatcttttagaaaatgccactgttcaggcgggtccttctaaaggagaaaaacacaagaataaatgtcaggctataaggcctgagctaaaggaaggtgaatgcagtaaggagcagatgctttcctgcacacaaaacatagatggcattgtgggttttgcctccactgaaaaagttgagaaaagaactgaccccatcctttcattaagtaatcaacaagatgccacatcagtagcaactgagtcttcagaatcaagcacttcagatttgccttcattcgaagttggaattagagcattgtgtgaggtgaataatgctgagggtagttgtatagaagaaagaaatgttgacctaaaaaataattcactggaaattgatcaaacagaaaatgttaaaccaatgttgagaggtcgcttccaaagacctaaacccaatttgtcaagggctgggaagaaatcagttctttcacaaggcaaaacagagtcagagagcaagaattcacattcaaaaacttcagttgaaaagaaccacgtggaaaaagataaaatgaatacattggacattttgagaatggagactacagagagagagaatccagaagctgaaactgtatctgttttgggtgaaaaaaattgtctgcaggaagggagtcaactaaaggctttaagacctgtacaagtgaggggccgattgcaaaagccaaagccaaatgcaggtaaagctgctgaaagaaaagaaattctcatatcacaggaagaaattggggccaatgtagagaagaatgaaaatgaatcctgtgctgatagagatactcctcaacacatggaagatcaatcgcgtaaagattttgaagaggaagatgtcatattacagcctgagaaaaatgattcttttcaaaatgtgcagccagatgagcccaaggttcttaatgaatgtctaagcgttcaagagaataataaggcaaataaacttaaccaagtcccaattctaaggactcgatttcagaaaccaaagccaaatataggaagaggaactggaaggagagaaatttcctcaaaggaagaggtactagagaagattcttgtctctggggaaatggcggcagcattgagagaaactgtaagactagacacctcaccaaaggagatggtaccagcagagattaatactaaagaaatgcagtcagatttaaaagaaactggaagaagagccatttctcccagggagaagattctagatgtgattgatgacaccatagaaatggagacaggtctgaaagcaatgggaagagagatttgtctaagggagaagacgccagaggtgattgatgccactgaggaaatagacaaagatttggaagaagctggaagaagagaaatatccccacagaaaaatggcccagaggaggttaagcctctaggtgaagtggagacagatttgaaagcaactggaaatgagagttccccaagggagaagacaccagaggtgactgatgccactgaggaaatagacaaaaatttggaagaaactggaagaagaaaaatatccccaagggaaaatggcccagaggaggtcaagcctgtagatgaaatggagacagatttgaacgcaactggaagagagagttctccaagggagaagacaccagaggtgattgatgctactgaggaaatagatttggaagaaactgaaagagaagtatccccacaggaaaatggactagaggaggtcaagcctctaggtgaaatggagacggatttgaaagcaactggaagagacagtttcccaagggggaagacaccagaggtgattgatgccattgaggaaatagagatagatttggaagaaactgaaagagaaatatccccacaggaaaatggcctagaggaggttaagcctctaggtgaaatgcaaacagatttgaaagcaaccggaagggagatttccccaagggagaagacaccagaggtgattgatgccactgaggaaatagacaaagatctggaagaaactggaagaagagaaatatccccagaggaaaatggcccagaggaggtcaagcctgtagatgaaatggagacagacttgaaaacaactggaagagagggttcctcaagggagaagacacgagaggtgattgatgctgctgaggtaatagagacagatttggaagaaactgaaagagaaatatcgccacaggaaaatggcccagaggaggtcaagcctgtaggtaaaatggagacagatttgaaagaaattagagaagaaatttcccaaagggaaaaggtgctagcagagttcagtgctataagggaaaaggagattgatttgaaagaaactggaaaaagagacattcccatgatggagaaagtatcaggaaagatggctgttgttgaagaaatggaggcagatttgaaagaaactggaaaagaaaattttagagagagaggatctgaagagatctgtgttactgaggaaaaggtggcagaattgaaacaaactggaaaaacagacatttctccaagggaaaacgagctagaggagaccagtacctcaagacaaactgacacacatttaatgcagagcggtagcaatgacttcagtgctatgccttcactagatattcagaacattagcagtgaagtactgtcgatgatgcatacacctgtagaagaaaaaagaaattctgaaaaagaagtatcaagtcacttcagtcatttcaagatttcttcacagactcatgaatctgataaaacagaagtccaggggattcaatctccagatgttccagagcagttttcagatattaatttaagcaaatctcttcctcaagaacagaagccacttgaaattaaaccagcaccttttgtgaggagccgattcaaaagaccaaaaccaaacttagcaagagcagctttgaagagagagactacagaatcagaaaaatatatatatgagaagaaatcagaaaccnagaaaatggagactattgtgatgcaagaaaataatgaacaaactgatactctcccttctcaacatgatgaagcttccctaatgatatcaagagaaaaagacacattaggtcacaggaatgaggaggctgtgatattgccatgtacacagactgaaaggaacctttcaccttcaaattcttgtgaacctaaagaggagtctcagtcagcaccagtccagaaaaatgactcagttgtttctgtggggactaataatgtaaacactttccagcaagaaatgaaggaaagtgttatccaaactgctcgacaagtaaggggccgacttcagagaccgagaccaaatataagaaagacaggacagaggcaaatagtagacaaaggtgaagccaaaggcataattaaggaaggaagaacgatattaccaaaagatgaaactgaaaagaaagtcttaactgtgtcaaattctcaaattgaaactgaaattgaagttccatcgtccgcagttccagaacacagaatgtatgaaaatcaaagtcaggtggttcttgtagaaaaccttcatgttaacaaaacaaatgaaacaatcagacatgaaaataaaccgtatgttcctagttcagcacaaatgacaagaaggaaattccaaaaggctaagccaaatttgggaagagcacacagtaagaaagaggaaccagttttagaaaaagtcacaacagatcagagcaaggaaggcaagccagaagatcatttgctgcagaaaggagcttccaacacccagctccttctaaaagaaaaagctgagcttctgacatctctggaggtttcagcaagaaaagattgtgtaggttccaaagagtctgctttggcaaaaatagatgcggaattagaagaagttggaccatcaagaagggttggagaggaaactgtaggagataattcaccatcttcagttgttgaagagcaatatctcaataaactaacaagctgtccacaaccgttaaacgaaacaagttactctaaaattgccctggatgggaaaacaactatctcttctacatctgagtatgagagaaatcgtggtgaaaggagaagtcataaaaagttcaaaccaaatgtcaccagaggtcgtggatcaaaacgagttcggggtaagacctctaagaaggaacctagagcttccaaggccatgctggtgactcttcgggcttcccaggaagaagatgatgatgctgacgattttgagtctgactatgaggaagaaagctatcatcttgctcccgaagaagtaaacaaagctccagtatttgtacctgttggtctcagatctcctgaacctgtttctgctcagattgaggaaacaatggaagagcttgaaataactgtgaatgtcccagatgtaggatgcatagctgttgttgaacatgagctaccaaacacagatgtgactactgaagaaatgaaacaagaagaaaatttgagtgtaccgtttgaaatgaccacaagtgaacatatccaagatgaaccaggtaccaatgatggaagcaccgaagctgcaataactttacttacaatgggagatctagtattgcagtcagagatcagtagtgaacagggtgatgtaggagtatgtatacttcctcatgttcattcaaaggataaaagccatattccttctagcctagataatgtaaatcacaaaattgttcatgaatgtcaggaactttcttcacctgtcattactacatctcctgcatcatttgaagaaaacaagattgtattggaggaacaaagttccagagaagaaataagtttaatggagaaagtaaaggagaatgctacaccaaccaggaatacaatttctaaagtgaccagtaatttgagaataagaagtaggcttgctaagcctaaaccaaatcttgagaagactttagggaccaacaggcttgatgattatcaggaagtttccagtttgtgtgtaaccaaaggggcagaaatggaaactcaaagagaaacagagaaaaatgcttccaaagcaacagaattggaaaataaaaaccttggaccagttacaacagcagagaataaggatcagagcaaattggcatgtgtacatggtatcaaagggaccagtatttcttcagaagtaaacctaactgaaagaaacgaaaatcaagaagagagctctcaggaggttcacatgttgtcagttgctccagttgcttcctctgagacagggccctgcacacttggtttggataggggtcttggtgaaaattctgttgaagagccccagataaaggactctaaaggagacagtgtgcttacacttcctgtgccagagtatacaccaacaagtattccagaagtccaacaagagaatataatcaatcctcaagacctaacagtgaatctagttgctaatgtacctcaagatggagaagatgaacaagcctttattttaactctggtggaaatcccagccaatgcagtagaagaatttactgatgccactgcacagttcatgccaaaccctttactgccagctcccatattggtcaaatcagtgaataccgaagaaaggggtgacatgagtatttgtttaccagcaacttcagttggtcaagatgccatgggtttatctatttctggaagagataattctaaaaagcctcctgataatttggatcttgtatctaggaagagatttcaatgcaggcttgataaaaatgaccacattcctcctgccaaaaaacgttcactcactttaagagatgactgtcaagaatataccactgaggtgcactcaaaggaattaacaaatgtttttgaggaaacaggggagtctcacaagggacaagatatttttcttacctcaggaagcacactgacaactccagaacctcaaagacagcaagttgaagcagcttttcagagtagaggatctagatctcctgatgcatgcatggacaagaatgtgcctcagttacctcaggatgaaatgattgtgtctgataaggaagaaagaactgatgctgctcctaagtctcagcaaatggatagcagaacatcgtcttctaaagcctcactatccagacctggcagaagacccctgggatttttatctttaatatgctcaaagaatagtttggagtctgatgaacctatgcaagtccatagtaagaaacgcctaaaacctcttatacctggattaagaaagaaattgaaaagatctaatccattcaatgaaagccaggaaaaaaatcgagagtcctctgatctgcttccatctccaagtgttattactactcaatctgagaatattagcagctcagcaactcaggtttcttgtgatcagcccttactgaaagaaggatataaaagtgcccaaaagcgggcccctcaaggggaggcaaccacagtctctgaatatttcttcaatgatatcttcattgaagtggatgaaacagaataaaacaatcttttctctttttcttttttaaattaggtctaggatttccagagtcaattacatcaacaaaacagtatttagagcaaaatatcactgtcttatttttctttaggttgattttgaatacttaatgagcttgatttgaagcttttataatcagtggaaaacatttctgaggttcctttcattctgactgattcagcattttgcaaatagcaagcaattaagactgctttctcagacagaaataacaactcttgtttacattttgactcttcctgtgctaagcacacatggacatttgggaatgttgtggatatatgtctctgtatgaattgcagtgcagacagatttgggggttaattgtatcatatttaacatttagcaacttcttttgtgaagattttttatttttagggggagatgatgaaggatgaaggctttttcatttgcttctaagtacagtcatgtatcacataatgaagtttaagtcaatgatggaccacatatattacagtggtcccatgcaattaaaatggagataaattcctatcaactagtgacattatagccatcataacacagtgcattgcttttttatgtttagatatgtttagatacacaaatacttactattgtgttacaactgcctacagtattcagcatagtaacacattgtagaggtttgtagccgaggagcaataggctataccacatagcctcagtctgtacggtgtgtagcagcctgtaccatctcagtgtttgtaagtacactctgcgttgtttcacacaagatcacctaacaaggcaattcttagaacatgtagttaagggacacgtgactatatgtgaaaacaaattgtcaaacttcactttagtatggcaaatgttaaagaacttttctattatcagctgtttgtctgactgaaaaatacatatttttctaattcatggtgatgtaacattagtcctaattgaaaaactagtatttaaacataattatttataaagatgacacatcaaagggcttatttatttttaaattttttatttaaaaggatattcagttttagctatttttacccctcagattgtagataaagaaggcattaaatttatgtttgtctcctttttctgtttaattttaaagatatttaaaatgatataactaaaaatgtttagctggtgtatatgttttgaatacctttttcccctcagtttagtatattgactttgtactgtaaatttttctgcttttcttggataatctcaggattttcatgaggatagggggaactcaactttatttatgagacaaaatttccatacaaagctcaatctcctttatatacccacagacataatattagtttttaaaaagccaatttcttcatagttttttcccattaaattctcaaggaacacttggatctttaagcacggaacataatcatgatgttaaaaacagagaaaataaggctttataaagttaatgattatcatcagtatgaatttaaggtttgttttaatttcaagatttgattttttatacgtgtaattctattatctacccaagcagatctgtagtggttccaattagacttctcaaacagcaaatttatcctgattttatttgaaaagcctcttggattgatagtatagtagctcaggcattggaaactttctgcaaactgttttgggtttgcaggccagatggtctctgtggcagctactcagctctgcaatttcagtgtgaaagaagccatagacagtacttgaatgaaggactgtggctggattggccttttagtttgaccccctacattaggccccaaattttcttaccctgaggtgctgatatctgtatggatgagttatttgtcactaaagttatgagttgtgcctaaaagttaaaactgttgactgtattatgtaatgatcagtatttcagttgggaagatattttagagtctagataattatgtttgtatattgaaaaaatggtggccagtttttaagttccttaatagaagagaattatgtctcagcacatataacagtaatgctaatttattgaaactactgctgttagagcacttcttattcattgtcttttagtgaaatttatggcgtaacactttgtcagagaggaggctatataattcggagcggaaattgtctataagtaggcatttatttcatgattgatatgtcacagaaatcatggtagtaaatcacattgctatttgaataccctgtttttgtaagtttttaaaactcatattctgaaaagatttcattctcttagtgttagcttgggagttagattgccatgattaaactattatttatccttgtgtaatattagtttttaactttaacatctgtttcttttttaaatcaattaaaggagccttagctttttaatgggaaaaaatggggaacattttcctctaacctaattgttaaaagggaaattccccggggtggaaccctccatt

SEQ ID NO: 292631 - DNA, 10360 bp, Homo sapiens
  misc_feature (4612)..(4612): n is a, c, g, or t
ggtgtgtggcagggtcatgaaaaagcggcggcggcgggagagaggaggaggcggcggcggggcagtgaaactacggtagctgccccctgagctggtggtgtggctttgtggggagggcgtagttcctaatcccctttccgggcagccgccggggctcggggctgtgagcggccgtgaggctgcctccccgggccccctgcctccgccatgttccgcagggcacgccttagcgtgaagccgaatgtcaggcctggtgtaggcgccaggggctccacagcttccaatccccagcgtggacgggagtctcccaggccgccggagcctgccacggactctgcttccaagcccgcggagcccacagatgtgcccacagtcgatttcggtggagcggagccccaagaaaaggctcctaggagcagtactgaaaagactggtggtgacaatgatgttgaagaatccagtagatcttcctctactgtttcacagagaagaaagcgaatatcaagtacttctagcctggttaagtctagtgtcagtgttccttcagaatctcatcccttatctacaattaatcaagaggctccacagccaactgccacttcaacaaaagagaaacagccatgctcagacagataccgaatatacaaagcccagaaactgagggaaatgttaaaagaagaattgagaaaagagaagaaacaatggaaaaacaaatatgctataaatgaaagtcagaggccaccagatcgttcaaaaatgactatgagagacttcatatattatctaccagataataatccaatgacttcttcactggaacaagaaaagaaaactgaaaagccatcgactccagtccagacaagagagcaagaaggtaagagtactcctaatgctgaagataatgaaatggaagaagagacagatgatgggccattactggttcctcgagtaaaagtggcagaagatggttccattattttggatgaagaaagtttaactgtagaagttttaagaacaaaaggcccttgtgttgttgaagaaaatgaccccatatttgagcgcggttctacaactacatactccagctttaggaaaaactattactctaaaccatggtcaaataaagaaacagatatgttttttttagccatcagcatggtaggaactgacttttctatgatcggacaactttttcctcacagagcaaggatagaaattaagaataaatttaaacgggaagagaaaacaaatggatggagaatagacaaagcattccaggaaaagcgcccttttgacttcgatttttttgctcatttgcttcagaaagttcttgctgaagaagagaaaagaaaacaaaaatctgttaaaaatcacagtttaaaggagaagaaatccaccaaaccacggaaaaatgtaaaagtgaaaaaagttgcctgtgaaggagtgaataatgatccagatgagtctatgagttctagaatttcagacacggaaagatctcagaaggatgctcagacagttgaagaagagtctctgaccttatcaagggaggatgcagagcaggttgcattagaagtagacctaaatcaaaagaaaagaaggaggaagaagcaagatggagctaatgaactgggagtaaacaatcttttagaaaatgccactgttcaggcgggtccttctaaaggagaaaaacacaagaataaatgtcaggctataaggcctgagctaaaggaaggtgaatgcagtaaggagcagatgctttcctgcacacaaaacatagatggcattgtgggttttgcctccactgaaaaagttgagaaaagaactgaccccatcctttcattaagtaatcaacaagatgccacatcagtagcaactgagtcttcagaatcaagcacttcagatttgccttcattcgaagttggaattagagcattgtgtgaggtgaataatgctgagggtagttgtatagaagaaagaaatgttgacctaaaaaataattcactggaaattgatcaaacagaaaatgttaaaccaatgttgagaggtcgcttccaaagacctaaacccaatttgtcaagggctgggaagaaatcagttctttcacaaggcaaaacagagtcagagagcaagaattcacattcaaaaacttcagttgaaaagaaccacgtggaaaaagataaaatgaatacattggacattttgagaatggagactacagagagagagaatccagaagctgaaactgtatctgttttgggtgaaaaaaattgtctgcaggaagggagtcaactaaaggctttaagacctgtacaagtgaggggccgattgcaaaagccaaagccaaatgcaggtaaagctgctgaaagaaaagaaattctcatatcacaggaagaaattggggccaatgtagagaagaatgaaaatgaatcctgtgctgatagagatactcctcaacacatggaagatcaatcgcgtaaagattttgaagaggaagatgtcatattacagcctgagaaaaatgattcttttcaaaatgtgcagccagatgagcccaaggttcttaatgaatgtctaagcgttcaagagaataataaggcaaataaacttaaccaagtcccaattctaaggactcgatttcagaaaccaaagccaaatataggaagaggaactggaaggagagaaatttcctcaaaggaagaggtactagagaagattcttgtctctggggaaatggcggcagcattgagagaaactgtaagactagacacctcaccaaaggagatggtaccagcagagattaatactaaagaaatgcagtcagatttaaaagaaactggaagaagagccatttctcccagggagaagattctagatgtgattgatgacaccatagaaatggagacaggtctgaaagcaatgggaagagagatttgtctaagggagaagacgccagaggtgattgatgccactgaggaaatagacaaagatttggaagaagctggaagaagagaaatatccccacagaaaaatggcccagaggaggttaagcctctaggtgaagtggagacagatttgaaagcaactggaaatgagagttccccaagggagaagacaccagaggtgactgatgccactgaggaaatagacaaaaatttggaagaaactggaagaagaaaaatatccccaagggaaaatggcccagaggaggtcaagcctgtagatgaaatggagacagatttgaacgcaactggaagagagagttctccaagggagaagacaccagaggtgattgatgctactgaggaaatagatttggaagaaactgaaagagaagtatccccacaggaaaatggactagaggaggtcaagcctctaggtgaaatggagacggatttgaaagcaactggaagagacagtttcccaagggggaagacaccagaggtgattgatgccattgaggaaatagagatagatttggaagaaactgaaagagaaatatccccacaggaaaatggcctagaggaggttaagcctctaggtgaaatgcaaacagatttgaaagcaaccggaagggagatttccccaagggagaagacaccagaggtgattgatgccactgaggaaatagacaaagatctggaagaaactggaagaagagaaatatccccagaggaaaatggcccagaggaggtcaagcctgtagatgaaatggagacagacttgaaaacaactggaagagagggttcctcaagggagaagacacgagaggtgattgatgctgctgaggtaatagagacagatttggaagaaactgaaagagaaatatcgccacaggaaaatggcccagaggaggtcaagcctgtaggtaaaatggagacagatttgaaagaaattagagaagaaatttcccaaagggaaaaggtgctagcagagttcagtgctataagggaaaaggagattgatttgaaagaaactggaaaaagagacattcccatgatggagaaagtatcaggaaagatggctgttgttgaagaaatggaggcagatttgaaagaaactggaaaagaaaattttagagagagaggatctgaagagatctgtgttactgaggaaaaggtggcagaattgaaacaaactggaaaaacagacatttctccaagggaaaacgagctagaggagaccagtacctcaagacaaactgacacacatttaatgcagagcggtagcaatgacttcagtgctatgccttcactagatattcagaacattagcagtgaagtactgtcgatgatgcatacacctgtagaagaaaaaagaaattctgaaaaagaagtatcaagtcacttcagtcatttcaagatttcttcacagactcatgaatctgataaaacagaagtccaggggattcaatctccagatgttccagagcagttttcagatattaatttaagcaaatctcttcctcaagaacagaagccacttgaaattaaaccagcaccttttgtgaggagccgattcaaaagaccaaaaccaaacttagcaagagcagctttgaagagagagactacagaatcagaaaaatatatatatgagaagaaatcagaaaccnagaaaatggagactattgtgatgcaagaaaataatgaacaaactgatactctcccttctcaacatgatgaagcttccctaatgatatcaagagaaaaagacacattaggtcacaggaatgaggaggctgtgatattgccatgtacacagactgaaaggaacctttcaccttcaaattcttgtgaacctaaagaggagtctcagtcagcaccagtccagaaaaatgactcagttgtttctgtggggactaataatgtaaacactttccagcaagaaatgaaggaaagtgttatccaaactgctcgacaagtaaggggccgacttcagagaccgagaccaaatataagaaagacaggacagaggcaaatagtagacaaaggtgaagccaaaggcataattaaggaaggaagaacgatattaccaaaagatgaaactgaaaagaaagtcttaactgtgtcaaattctcaaattgaaactgaaattgaagttccatcgtccgcagttccagaacacagaatgtatgaaaatcaaagtcaggtggttcttgtagaaaaccttcatgttaacaaaacaaatgaaacaatcagacatgaaaataaaccgtatgttcctagttcagcacaaatgacaagaaggaaattccaaaaggctaagccaaatttgggaagagcacacagtaagaaagaggaaccagttttagaaaaagtcacaacagatcagagcaaggaaggcaagccagaagatcatttgctgcagaaaggagcttccaacacccagctccttctaaaagaaaaagctgagcttctgacatctctggaggtttcagcaagaaaagattgtgtaggttccaaagagtctgctttggcaaaaatagatgcggaattagaagaagttggaccatcaagaagggttggagaggaaactgtaggagataattcaccatcttcagttgttgaagagcaatatctcaataaactaacaagctgtccacaaccgttaaacgaaacaagttactctaaaattgccctggatgggaaaacaactatctcttctacatctgagtatgagagaaatcgtggtgaaaggagaagtcataaaaagttcaaaccaaatgtcaccagaggtcgtggatcaaaacgagttcggggtaagacctctaagaaggaacctagagcttccaaggccatgctggtgactcttcgggcttcccaggaagaagatgatgatgctgacgattttgagtctgactatgaggaagaaagctatcatcttgctcccgaagaagtaaacaaagctccagtatttgtacctgttggtctcagatctcctgaacctgtttctgctcagattgaggaaacaatggaagagcttgaaataactgtgaatgtcccagatgtaggatgcatagctgttgttgaacatgagctaccaaacacagatgtgactactgaagaaatgaaacaagaagaaaatttgagtgtaccgtttgaaatgaccacaagtgaacatatccaagatgaaccaggtaccaatgatggaagcaccgaagctgcaataactttacttacaatgggagatctagtattgcagtcagagatcagtagtgaacagggtgatgtaggagtatgtatacttcctcatgttcattcaaaggataaaagccatattccttctagcctagataatgtaaatcacaaaattgttcatgaatgtcaggaactttcttcacctgtcattactacatctcctgcatcatttgaagaaaacaagattgtattggaggaacaaagttccagagaagaaataagtttaatggagaaagtaaaggagaatgctacaccaaccaggaatacaatttctaaagtgaccagtaatttgagaataagaagtaggcttgctaagcctaaaccaaatcttgagaagactttagggaccaacaggcttgatgattatcaggaagtttccagtttgtgtgtaaccaaaggggcagaaatggaaactcaaagagaaacagagaaaaatgcttccaaagcaacagaattggaaaataaaaaccttggaccagttacaacagcagagaataaggatcagagcaaattggcatgtgtacatggtatcaaagggaccagtatttcttcagaagtaaacctaactgaaagaaacgaaaatcaagaagagagctctcaggaggttcacatgttgtcagttgctccagttgcttcctctgagacagggccctgcacacttggtttggataggggtcttggtgaaaattctgttgaagagccccagataaaggactctaaaggagacagtgtgcttacacttcctgtgccagagtatacaccaacaagtattccagaagtccaacaagagaatataatcaatcctcaagacctaacagtgaatctagttgctaatgtacctcaagatggagaagatgaacaagcctttattttaactctggtggaaatcccagccaatgcagtagaagaatttactgatgccactgcacagttcatgccaaaccctttactgccagctcccatattggtcaaatcagtgaataccgaagaaaggggtgacatgagtatttgtttaccagcaacttcagttggtcaagatgccatgggtttatctatttctggaagagataattctaaaaagcctcctgataatttggatcttgtatctaggaagagatttcaatgcaggcttgataaaaatgaccacattcctcctgccaaaaaacgttcactcactttaagagatgactgtcaagaatataccactgaggtgcactcaaaggaattaacaaatgtttttgaggaaacaggggagtctcacaagggacaagatatttttcttacctcaggaagcacactgacaactccagaacctcaaagacagcaagttgaagcagcttttcagagtagaggatctagatctcctgatgcatgcatggacaagaatgtgcctcagttacctcaggatgaaatgattgtgtctgataaggaagaaagaactgatgctgctcctaagtctcagcaaatggatagcagaacatcgtcttctaaagcctcactatccagacctggcagaagacccctgggatttttatctttaatatgctcaaagaatagtttggagtctgatgaacctatgcaagtccatagtaagaaacgcctaaaacctcttatacctggattaagaaagaaattgaaaagatctaatccattcaatgaaagccaggaaaaaaatcgagagtcctctgatctgcttccatctccaagtgttattactactcaatctgagaatattagcagctcagcaactcaggtttcttgtgatcagcccttactgaaagaaggatataaaagtgcccaaaagcgggcccctcaaggggaggcaaccacagtctctgaatatttcttcaatgatatcttcattgaagtggatgaaacagaataaaacaatcttttctctttttcttttttaaattaggtctaggatttccagagtcaattacatcaacaaaacagtatttagagcaaaatatcactgtcttatttttctttaggttgattttgaatacttaatgagcttgatttgaagcttttataatcagtggaaaacatttctgaggttcctttcattctgactgattcagcattttgcaaatagcaagcaattaagactgctttctcagacagaaataacaactcttgtttacattttgactcttcctgtgctaagcacacatggacatttgggaatgttgtggatatatgtctctgtatgaattgcagtgcagacagatttgggggttaattgtatcatatttaacatttagcaacttcttttgtgaagattttttatttttagggggagatgatgaaggatgaaggctttttcatttgcttctaagtacagtcatgtatcacataatgaagtttaagtcaatgatggaccacatatattacagtggtcccatgcaattaaaatggagataaattcctatcaactagtgacattatagccatcataacacagtgcattgcttttttatgtttagatatgtttagatacacaaatacttactattgtgttacaactgcctacagtattcagcatagtaacacattgtagaggtttgtagccgaggagcaataggctataccacatagcctcagtctgtacggtgtgtagcagcctgtaccatctcagtgtttgtaagtacactctgcgttgtttcacacaagatcacctaacaaggcaattcttagaacatgtagttaagggacacgtgactatatgtgaaaacaaattgtcaaacttcactttagtatggcaaatgttaaagaacttttctattatcagctgtttgtctgactgaaaaatacatatttttctaattcatggtgatgtaacattagtcctaattgaaaaactagtatttaaacataattatttataaagatgacacatcaaagggcttatttatttttaaattttttatttaaaaggatattcagttttagctatttttacccctcagattgtagataaagaaggcattaaatttatgtttgtctcctttttctgtttaattttaaagatatttaaaatgatataactaaaaatgtttagctggtgtatatgttttgaatacctttttcccctcagtttagtatattgactttgtactgtaaatttttctgcttttcttggataatctcaggattttcatgaggatagggggaactcaactttatttatgagacaaaatttccatacaaagctcaatctcctttatatacccacagacataatattagtttttaaaaagccaatttcttcatagttttttcccattaaattctcaaggaacacttggatctttaagcacggaacataatcatgatgttaaaaacagagaaaataaggctttataaagttaatgattatcatcagtatgaatttaaggtttgttttaatttcaagatttgattttttatacgtgtaattctattatctacccaagcagatctgtagtggttccaattagacttctcaaacagcaaatttatcctgattttatttgaaaagcctcttggattgatagtatagtagctcaggcattggaaactttctgcaaactgttttgggtttgcaggccagatggtctctgtggcagctactcagctctgcaatttcagtgtgaaagaagccatagacagtacttgaatgaaggactgtggctggattggccttttagtttgaccccctacattaggccccaaattttcttaccctgaggtgctgatatctgtatggatgagttatttgtcactaaagttatgagttgtgcctaaaagttaaaactgttgactgtattatgtaatgatcagtatttcagttgggaagatattttagagtctagataattatgtttgtatattgaaaaaatggtggccagtttttaagttccttaatagaagagaattatgtctcagcacatataacagtaatgctaatttattgaaactactgctgttagagcacttcttattcattgtcttttagtgaaatttatggcgtaacactttgtcagagaggaggctatataattcggagcggaaattgtctataagtaggcatttatttcatgattgatatgtcacagaaatcatggtagtaaatcacattgctattgaacttctaaactaggggaccggctcgatcgatt

SEQ ID NO: 292632 - DNA, 5110 bp, Homo sapiens
atattatttaatgggagggaggcatggtcagtgagtcaaaaccaacagtgatgatttatttatttgtagcatataacctgaacaaaagactaccttagtaagggattaatggctcagaggatattggaatctgctcctaggagataaacaccttaattaaaaatcttttttaagtgaacagatttccggattcattcttttttttaatgttgatatatttcctcacaaggtaccaatgatggaagcaccgaagctgcaataactttacttacaatgggagatctagtattgcagtcagagatcagtagtgaacagggtgatgtaggagtatgtatacttcctcatgttcattcaaaggataaaagccatattccttctagcctagataatgtaaatcacaaaattgttcatgaatgtcaggaactttcttcacctgtcattactacatctcctgcatcatttgaagaaaacaagattgtattggaggaacaaagttccagagaagaaataagtttaatggagaaagtaaaggagaatgctacaccaaccaggaatacaatttctaaagtgaccagtaatttgagaataagaagtaggcttgctaagcctaaaccaaatcttgagaagactttagggaccaacaggcttgatgattatcaggaagtttccagtttgtgtgtaaccaaaggggcagaaatggaaactcaaagagaaacagagaaaaatgcttccaaagcaacagaattggaaaataaaaaccttggaccagttacaacagcagagaataaggatcagagcaaattggcatgtgtacatggtatcaaagggaccagtatttcttcagaagtaaacctaactgaaagaaacgaaaatcaagaagagagctctcaggaggttcacatgttgtcagttgctccagttgcttcctctgagacagggccctgcacacttggtttggataggggtcttggtgaaaattctgttgaagagccccagataaaggactctaaaggagacagtgtgcttacacttcctgtgccagagtatacaccaacaagtattccagaagtccaacaagagaatataatcaatcctcaagacctaacagtgaatctagttgctaatgtacctcaagatggagaagatgaacaagcctttattttaactctggtggaaatcccagccaatgcagtagaagaatttactgatgccactgcacagttcatgccaaaccctttactgccagctcccatattggtcaaatcagtgaataccgaagaaaggggtgacatgagtatttgtttaccagcaacttcagttggtcaagatgccatgggtttatctatttctggaagagataattctaaaaagcctcctgataatttggatcttgtatctaggaagagatttcaatgcaggcttgataaaaatgaccacattcctcctgccaaaaaacgttcactcactttaagagatgactgtcaagaatataccactgaggtgcactcaaaggaattaacaaatgtttttgaggaaacaggggagtctcacaagggacaagatatttttcttacctcaggaagcacactgacaactccagaacctcaaagacagcaagttgaagcagcttttcagagtagaggatctagatctcctgatgcatgcatggacaagaatgtgcctcagttacctcaggatgaaatgattgtgtctgataaggaagaaagaactgatgctgctcctaagtctcagcaaatggatagcagaacatcgtcttctaaagcctcactatccagacctggcagaagacccctgggatttttatctttaatatgctcaaagaatagtttggagtctgatgaacctatgcaagtccatagtaagaaacgcctaaaacctcttatacctggattaagaaagaaattgaaaagatctaatccattcaatgaaagccaggaaaaaaatcgagagtcctctgatctgcttccatctccaagtgttattactactcaatctgagaatattagcagctcagcaactcaggtttcttgtgatcagcccttactgaaagaaggatataaaagtgcccaaaagcgggcccctcaaggggaggcaaccacagtctctgaatatttcttcaatgatatcttcattgaagtggatgaaacagaataaaacaatcttttctctttttcttttttaaattaggtctaggatttccagagtcaattacatcaacaaaacagtatttagagcaaaatatcactgtcttatttttctttaggttgattttgaatacttaatgagcttgatttgaagcttttataatcagtggaaaacatttctgaggttcctttcattctgactgattcagcattttgcaaatagcaagcaattaagactgctttctcagacagaaataacaactcttgtttacattttgactcttcctgtgctaagcacacatggacatttgggaatgttgtggatatatgtctctgtatgaattgcagtgcagacagatttgggggttaattgtatcatatttaacatttagcaacttcttttgtgaagattttttatttttagggggagatgatgaaggatgaaggctttttcatttgcttctaagtacagtcatgtatcacataatgaagtttaagtcaatgatggaccacatatattacagtggtcccatgcaattaaaatggagataaattcctatcaactagtgacattatagccatcataacacagtgcattgcttttttatgtttagatatgtttagatacacaaatacttactattgtgttacaactgcctacagtattcagcatagtaacacattgtagaggtttgtagccgaggagcaataggctataccacatagcctcagtctgtacggtgtgtagcagcctgtaccatctcagtgtttgtaagtacactctgcgttgtttcacacaagatcacctaacaaggcaattcttagaacatgtagttaagggacacgtgactatatgtgaaaacaaattgtcaaacttcactttagtatggcaaatgttaaagaacttttctattatcagctgtttgtctgactgaaaaatacatatttttctaattcatggtgatgtaacattagtcctaattgaaaaactagtatttaaacataattatttataaagatgacacatcaaagggcttatttatttttaaattttttatttaaaaggatattcagttttagctatttttacccctcagattgtagataaagaaggcattaaatttatgtttgtctcctttttctgtttaattttaaagatatttaaaatgatataactaaaaatgtttagctggtgtatatgttttgaatacctttttcccctcagtttagtatattgactttgtactgtaaatttttctgcttttcttggataatctcaggattttcatgaggatagggggaactcaactttatttatgagacaaaatttccatacaaagctcaatctcctttatatacccacagacataatattagtttttaaaaagccaatttcttcatagttttttcccattaaattctcaaggaacacttggatctttaagcacggaacataatcatgatgttaaaaacagagaaaataaggctttataaagttaatgattatcatcagtatgaatttaaggtttgttttaatttcaagatttgattttttatacgtgtaattctattatctacccaagcagatctgtagtggttccaattagacttctcaaacagcaaatttatcctgattttatttgaaaagcctcttggattgatagtatagtagctcaggcattggaaactttctgcaaactgttttgggtttgcaggccagatggtctctgtggcagctactcagctctgcaatttcagtgtgaaagaagccatagacagtacttgaatgaaggactgtggctggattggccttttagtttgaccccctacattaggccccaaattttcttaccctgaggtgctgatatctgtatggatgagttatttgtcactaaagttatgagttgtgcctaaaagttaaaactgttgactgtattatgtaatgatcagtatttcagttgggaagatattttagagtctagataattatgtttgtatattgaaaaaatggtggccagtttttaagttccttaatagaagagaattatgtctcagcacatataacagtaatgctaatttattgaaactactgctgttagagcacttcttattcattgtcttttagtgaaatttatggcgtaacactttgtcagagaggaggctatataattcggagcggaaattgtctataagtaggcatttatttcatgattgatatgtcacagaaatcatggtagtaaatcacattgctatttgaataccctgtttttgtaagtttttaaaactcatattctgaaaagatttcattctcttagtgttagcttgggagttagattgccatgattaaactattatttatccttgtgtaatattagtttttaactttaacatctgtttctttttaatctataatgagctagttttatggaaaatggaatttcttactatataaagaatacagagactcattgtattagagaatcaagtcagccagctaaagtatcctactgttaaatccttaaacctaattttggaaaagagaaagttaatcaatgtatttaccttacatgttggaaagaactatgttaggtctgattcatgtgaagaagatgttgcaaaggatttatttcacaaattttaaaggagatatgagtaaaagtttttatcttttcttgactttttctcctgaacacttatgtcttagcaagtggtcaacatgaggatttgaacgcctaattgttggtaaatggttgaggcatgacaaaaatattaatatccactgtttaccatcatgttatttgaaacaaaagtgaccatgtatactatcttgcttgaagaagtctttgacagaaaaagcaatatcatgtcatttataaattttcttgttctaaagaaagcagttatatatatatataaattatgtaaataaaagttattttatatca

SEQ ID NO: 292633 - DNA, 3025 bp, Homo sapiens
ggtgtgtggcagggtcatgaaaaagcggcggcggcgggagagaggaggaggcggcggcggggcagtgaaactacggtagctgccccctgagctggtggtgtggctttgtggggagggcgtagttcctaatcccctttccgggcagccgccggggctcggggctgtgagcggccgtgaggctgcctccccgggccccctgcctccgccatgttccgcagggcacgccttagcgtgaagccgaatgtcaggcctggtgtaggcgccaggggctccacagcttccaatccccagcgtggacgggagtctcccaggccgccggagcctgccacggactctgcttccaagcccgcggagcccacagatgtgcccacagtcgatttcggtggagcggagccccaagaaaaggctcctaggagcagtactgaaaagactggtggtgacaatgatgttgaagaatccagtagatcttcctctactgtttcacagagaagaaagcgaatatcaagtacttctagcctggttaagtctagtgtcagtgttccttcagaatctcatcccttatctacaattaatcaagaggctccacagccaactgccacttcaacaaaagagaaacagccatgctcagacagataccgaatatacaaagcccagaaactgagggaaatgttaaaagaagaattgagaaaagagaagaaacaatggaaaaacaaatatgctataaatgaaagtcagaggccaccagatcgttcaaaaatgactatgagagacttcatatattatctaccagataataatccaatgacttcttcactggaacaagaaaagaaaactgaaaagccatcgactccagtccagacaagagagcaagaaggtaagagtactcctaatgctgaagataatgaaatggaagaagagacagatgatgggccattactggttcctcgagtaaaagtggcagaagatggttccattattttggatgaagaaagtttaactgtagaagttttaagaacaaaaggcccttgtgttgttgaagaaaatgaccccatatttgagcgcggttctacaactacatactccagctttaggaaaaactattactctaaaccatggtcaaataaagaaacagatatgttttttttagccatcagcatggtaggaactgacttttctatgatcggacaactttttcctcacagagcaaggatagaaattaagaataaatttaaacgggaagagaaaacaaatggatggagaatagacaaagcattccaggaaaagcgcccttttgacttcgatttttttgctcatttgcttcagaaagttcttgctgaagaagagaaaagaaaacaaaaatctgttaaaaatcacagtttaaaggagaagaaatccaccaaaccacggaaaaatgtaaaagtgaaaaaagttgcctgtgaaggagtgaataatgatccagatgagtctatgagttctagaatttcagacacggaaagatctcagaaggatgctcagacagttgaagaagagtctctgaccttatcaagggaggatgcagagcaggttgcattagaagtagacctaaatcaaaagaaaagaaggaggaagaagcaagatggagctaatgaactgggagtaaacaatcttttagaaaatgccactgttcaggcgggtccttctaaaggagaaaaacacaagaataaatgtcaggctataaggcctgagctaaaggaaggtgaatgcagtaaggagcagatgctttcctgcacacaaaacatagatggcattgtgggttttgcctccactgaaaaagttgagaaaagaactgaccccatcctttcattaagtaatcaacaagatgccacatcagtagcaactgagtcttcagaatcaagcacttcagatttgccttcattcgaagttggaattagagcattgtgtgaggtgaataatgctgagggtagttgtatagaagaaagaaatgttgacctaaaaaataattcactggaaattgatcaaacagaaaatgttaaaccaatgttgagaggtcgcttccaaagacctaaacccaatttgtcaagggctgggaagaaatcagttctttcacaaggcaaaacagagtcagagagcaagaattcacattcaaaaacttcagttgaaaagaaccacgtggaaaaagataaaatgaatacattggacattttgagaatggagactacagagagagagaatccagaagctgaaactgtatctgttttgggtgaaaaaaattgtctgcaggaagggagtcaactaaaggctttaagacctgtacaagtgaggggccgattgcaaaagccaaagccaaatgcaggtaaagctgctgaaagaaaagaaattctcatatcacaggaagaaattggggccaatgtagagaagaatgaaaatgaatcctgtgctgatagagatactcctcaacacatggaagatcaatcgcgtaaagattttgaagaggaagatgtcatattacagcctgagaaaaatgattcttttcaaaatgtgcagccagatgagcccaaggttcttaatgaatgtctaaggtaagcatcattttgttgatatataatctttggattttgtaaaaagttttagaactcaatcagttttttaaagcagaagcaatttagatggatttgttgtctgcgtgtctagttatgtagtgtttaaaaatataacttcacctttcaagaaagtttatgttgtagcctttatgtgaatttctcagatggtttgaagaaagctactcatcgtaaattagtacttgagttaacatgaatagccttatcactttattttattttattttactttttattttttgagacggagtttcactcttcttgcctgggctggagtataatctcagctcactgcaaccactgcttcccaggagaattgcttgaaccaggaggtggaggctgcggtgagctgagatcgtaccactgcactccagcctgggcaacagagtgagactgcatctcaaaaa

SEQ ID NO: 292634 - DNA, 93 bp, Homo sapiens
cggccagttctgttgttttaatttccatttgtttattacaaagtttgaactgtttattgtaagtagataaattgtagcaaattaaattcacag

SEQ ID NO: 292635 - DNA, 284 bp, Homo sapiens
cactgcacagttcatgccaaaccctttactgccagctcccatattggtcaaatcagtgaataccgaagaaaggggtgacatgaggtaacgaatgagtgaaactgtttttgctaggaggaaaagtgatttatgaactaagtagcattgattgaacaaaccattcaccaatgttagttgttattgttgtggagatcttatttatcatttatgtggtaagttagagaagaaatgtaatgtggtagattttatatctgataaagatgccacttaaatgtttcatgtat

SEQ ID NO: 292636 - DNA, 563 bp, Homo sapiens
gctggtctcgaactcctgacctcaagtgatctacctgcctcaactttccatagtgttgggattataggcgtaagcctccatgcctggcccagccactcttattcttgtaccacctcttcctcacatccttgaggagataaagaatgtgtcatggctctcctttctgctcttgatcatgataacgttctaaagggtgtggaataaattacagtacagaactggtgtgtgctatgtgacatgagaggtactgagattagtttatggaagtaacagtgttatagttcctttataaattatttttctctaacttcatatatgacatagttgctaagtcattttgggaagtgttcgattggtgtatggcatcaccttgtatttgggcaaatacaatatatacaaaaaaatattacacatacataacttttttttttagacagtgtcttgctgtgttatccaagttggagtgcaatgtcgtgatcacagttcactgtaaccttaaactcttgggcttaaactatcttcccgcctcaacctccactacaagcagtaattaaaaaaaaaaa

SEQ ID NO: 292637 - DNA, 456 bp, Homo sapiens
cgtgctgtctaagctaatgtggagttgtgttttcgggtcctcagtctgctacgccatcctcgtgggtgtgaagtgacatctcattatgattatcatgtcttcttaaagaagcaaacacaaccaaattcagaagaatttataaggctggtgtctgattgattgaaaaggccccaggaagtggattttgccttcagagttcaactcctcctctggtgcagtcccaaaacactaggattctgctgtctacccaagagaacccaggaactctgagcaaccacactggcttcagtcagcttgcaaaactggcttttaggcttgttacctgatatacattctagaaatgaaccttctttggtacaaagatctccactgaaatttcctaaaagacatcattcccctgtaccccaagggaacctattcctagataagaatgcaaactcaccgtgaaggggtcgt

SEQ ID NO: 292638 - DNA, 355 bp, Homo sapiens
cgtgctgtctaagctaatgtggagttgtgttttcgggtcctcagtctgctacggtaaggcctgcatacagttgatacttcatcctcaacaaacttgtgatgttgaagtttttcccttaactattaagtaagggagcctacagttgaacctgtttcttctggttgtaaatctcaggtgtttctacagaaggtattctctctctttccctctctctctctctctctcactccctctccctctctctccctctctccccctttccctctccctccctccccctccccctccctctctctccctccgcctccctccctctccccctctccctctctctcccatctctccatctttccct

SEQ ID NO: 292639 - DNA, 1395 bp, Homo sapiens
ggccagagccggggagctgggaggggtctaccggggctcgactctaggagttgggctgaggatttccacccgatcctcgaacctccggcccatctcatggacgcccctcccccttcaaacaccctcccccacatttattcccgcgtctgttttaaagatgggtaaactgaggcacagggagccggaccggggagcactgacagaaccagaagcaggttctgcctcccgtcccctcggagggccgacttgccccttctgggtttcgtcgggggtctcagatacgaggaggcccagctggaagccacctgagggtgtcccccgctaagatgcgcaaatgggaaaagcgaggccggggttggggaaagaacttgcccgagccgcagagcgcgtcagccggggaggtcggggcgggggcgacccgcgcgaccgaggatcgggtatctgggcccggcgcggagcctgcagggcggggccgcggcgcgtgctgatgacgcagtcggcgcggcggccctagcgacgcggttactagggagcggcgagccgagacggctacatggacgccactatcgccccgcaccgtatcccccccgagatgccccagtacggggaggagaaccacatcttcgagttgatgcagaacatgctggagcaactcctgatccaccagcccgaagatcccatccccttcatgatccagcacttgcatagagacaacgacaatgtgcccaggattgtaatattaggtccacccgcctcagggaaaacaacaatagcaatgtggctctgcaaacatctgaacagcagtctcctcaccctggagaacctgatcttaaatgagttttcctatacggccaccgaagccagaaggctttatctgcaaaggaagacagttcccagcgcgctgctcgtccagctgattcaggaacgcctggctgaagaggattgcatcaagcagggctggattctggatggcatccctgagacgcgtgagcaggctctgaggatccagaccctggggatcacacccagacacgtcattgtgctgagtgctccagacacggtcctgatcgagagaaacttggggaagagaatcgaccctcaaactggagagatttatcacaccacctttgactggccacccgaatctgaaatccagaaccgtctcatggtgccagaggacatctcagagctggagacggctcagaaactgctggagtatcataggaacatcgtcagggtcattccctcctaccccaaaatcctcaaagtcatcagtgctgaccagccatgtgtggacgtcttctaccaggctctgacctatgtccaaagcaaccatcgtactaatgccccgttcaccccgagggtgctgctgctcgggcctgtgggcagtgggaa

SEQ ID NO: 292640 - DNA, 782 bp, Homo sapiens
ggccagagccggggagctgggaggggtctaccggggctcgactctaggagttgggctgaggatttccacccgatcctcgaacctccggcccatctcatggacgcccctcccccttcaaacaccctcccccacatttattcccgcgtctgttttaaagatgggtaaactgaggcacagggagccggaccggggagcactgacagaaccagaagcaggttctgcctcccgtcccctcggagggccgacttgccccttctgggtttcgtcgggggtctcagatacgaggaggcccagctggaagccacctgagggtgtcccccgctaagatgcgcaaatgggaaaagcgaggccggggttggggaaagaacttgcccgagccgcagagcgcgtcagccggggaggtcggggcgggggcgacccgcgcgaccgaggatcgggtatctgggcccggcgcggagcctgcagggcggggccgcggcgcgtgctgatgacgcagtcggcgcggcggccctagcgacgcggttactagggagcggcgagccgagacggctacatggacgccactatcgccccgcaccgtatcccccccgagatgccccagtacggggaggagaaccacatcttcgagttgatgcaggtgaccggacacccctgcccgtcgcgacgctggcggcggctcgggagcctccactgcgacgtcgggtgcgcggccgggacccgcagctggggccgagtcgcgcgcccacgaagcagcccaactcgggatgtacgattcgtgtgtc

SEQ ID NO: 292641 - DNA, 818 bp, Homo sapiens
ggccagagccggggagctgggaggggtctaccggggctcgactctaggagttgggctgaggatttccacccgatcctcgaacctccggcccatctcatggacgcccctcccccttcaaacaccctcccccacatttattcccgcgtctgttttaaagatgggtaaactgaggcacagggagccggaccggggagcactgacagaaccagaagcaggttctgcctcccgtcccctcggagggccgacttgccccttctgggtttcgtcgggggtctcagatacgaggaggcccagctggaagccacctgagggtgtcccccgctaagatgcgcaaatgggaaaagcgaggccggggttggggaaagaacttgcccgagccgcagagcgcgtcagccggggaggtcggggcgggggcgacccgcgcgaccgaggatcgggtatctgggcccggcgcggagcctgcagggcggggccgcggcgcgtgctgatgacgcagtcggcgcggcggccctagcgacgcggttactagggagcggcgagccgagacggctacatggacgccactatcgccccgcaccgtatcccccccgagatgccccagtacggggaggagaaccacatcttcgagttgatgcagaacatgctggagcaactcctgatccaccagcccgaagatcccatccccttcatgatccagcacttgcatagagacaacgacaatgctgctttgaaggagctaccagtgcaccagtgaaattagtgcttggtacagctgaggacagagcccagagatgccctgtgtggaggttcagaaggcc

SEQ ID NO: 292642 - DNA, 1100 bp, Homo sapiens
ggccagagccggggagctgggaggggtctaccggggctcgactctaggagttgggctgaggatttccacccgatcctcgaacctccggcccatctcatggacgcccctcccccttcaaacaccctcccccacatttattcccgcgtctgttttaaagatgggtaaactgaggcacagggagccggaccggggagcactgacagaaccagaagcaggttctgcctcccgtcccctcggagggccgacttgccccttctgggtttcgtcgggggtctcagatacgaggaggcccagctggaagccacctgagggtgtcccccgctaagatgcgcaaatgggaaaagcgaggccggggttggggaaagaacttgcccgagccgcagagcgcgtcagccggggaggtcggggcgggggcgacccgcgcgaccgaggatcgggtatctgggcccggcgcggagcctgcagggcggggccgcggcgcgtgctgatgacgcagtcggcgcggcggccctagcgacgcggttactagggagcggcgagccgagacggctacatggacgccactatcgccccgcaccgtatcccccccgagatgccccagtacggggaggagaaccacatcttcgagttgatgcagaacatgctggagcaactcctgatccaccagcccgaagatcccatccccttcatgatccagcacttgcatagagacaacgacaatgtgcccaggattgtaatattaggtccacccgcctcagggaaaacaacaatagcaatgtggctctgcaaacatctgaacagcagtctcctcaccctggagaacctgatcttaaatgagttttcctatacggccaccgaagccagaaggctttatctgcaaaggaaggcatttcccagtggtttctgaaatacttcctaactgcctttttgccaagcactattctgcagtgctgtgggagagtcaaagatgagtttcttctccttaccccagaagcttccagccagtgaggagactgatggtcccataaaactaagcacaagccagggtatgggagccagggaaccttcaataaagcaattaatcggtggcttgtttgact

SEQ ID NO: 292643 - DNA, 396 bp, Homo sapiens
ttttcttttcctctccagaggggccgattagggagaggcgtgtctctctgtgacccgagtttggccaacaggcattttcagttccacccccaacccccagccccgctgacccgaggcggagagcaggcgcggaggtcgctgtcgcgtacccagcggagccgggcgggcggggagcaggggcgctgattcgctggagaagggatcttctcgaggtttgactttactggcttcttagctcttgaatcggtttttctgaaggagattgtgaagaagccaaggtgctggctgaagattacacctgtctgctcggttacccatttactctggagaattaatgcttattgtactttttaaaataaaacttatttttgtgtttccggaaagtttgctctttag

SEQ ID NO: 292644 - DNA, 359 bp, Homo sapiens
ggacacacagtgtccacagatttagttaatacaagcatgtcttgtgtcaggggccacttacggttgtgatagttttagagaagttccctccccacaccctgcccccccaccaagaacataggtaaaaataatctaatttggaaattatttaatgggaggaagtaatagtaatattatcatcatcccactgtatttcgtgaaaagggctaatctcaagtgcctcctttgtgcaaatgagccagactcgaagggtacaatcagaaaacagctttaatctttcctagcttggcccctgagattggctatgtgagaacagtctttctcaggctttttggatgatgtaagaaattaaagctttt

SEQ ID NO: 292645 - DNA, 3261 bp, Homo sapiens
cctcctcccctccccccgctcgcacgacacacacggcgccccccgcccgcccgcctcccccacagcaactatgaaataatcgtagtatgagaggcagagatcggggcgagacaatggggatgtgggcgcgggagccccgttccggcttagcagcacctcccagccccgcagaataaaaccgatcgcgccccctccgcgcgcgccctcccccgagtgcggagcgggaggaggcggcggcggccgaggaggaggaggaggaggccccggaggaggaggcgttggaggtcgaggcggaggcggaggaggaggaggccgaggcgccggaggaggccgaggcgccggagcaggaggaggccggccggaggcggcatgagacgagcgtggcggccgcggctgctcggggccgcgctggttgcccattgacagcggcgtctgcagctcgcttcaagatggccgcttggctcgcattcattttctgctgaacgacttttaactttcattgtcttttccgcccgcttcgatcgcctcgcgccggctgctctttccgggattttttatcaagcagaaatgcatcgaacaacgagaatcaagatcactgagctaaatccccacctgatgtgtgtgctttgtggagggtacttcattgatgccacaaccataatagaatgtctacattccttctgtaaaacgtgtattgttcgttacctggagaccagcaagtattgtcctatttgtgatgtccaagttcacaagaccagaccactactgaatataaggtcagataaaactctccaagatattgtatacaaattagttccagggcttttcaaaaatgaaatgaagagaagaagggatttttatgcagctcatccttctgctgatgctgccaatggctctaatgaagatagaggagaggttgcagatgaagataagagaattataactgatgatgagataataagcttatccattgaattctttgaccagaacagattggatcggaaagtaaacaaagacaaagagaaatctaaggaggaggtgaatgataaaagatacttacgatgcccagcagcaatgactgtgatgcacttaagaaagtttctcagaagtaaaatggacatacctaatactttccagattgatgtcatgtatgaggaggaacctttaaaggattattatacactaatggatattgcctacatttatacctggagaaggaatggtccacttccattgaaatacagagttcgacctacttgtaaaagaatgaagatcagtcaccagagagatggactgacaaatgctggagaactggaaagtgactctgggagtgacaaggccaacagcccagcaggaggtattccctccacctcttcttgtttgcctagccccagtactccagtgcagtctcctcatccacagtttcctcacatttccagtactatgaatggaaccagcaacagccccagcggtaaccaccaatcttcttttgccaatagacctcgaaaatcatcagtaaatgggtcatcagcaacttcttctggttgatacctgagactgttaaggaaaaaaattttaaacccctgatttatatagatatcttcatgccattacagctttctagatgctaatacatgtgactatcgtccaatttgctttcttttgtagtgacattaaatttggctataaaagatggactacatgtgatactcctatggacgttaattgaaaagaaagattgttgttataaagaattggtttcttggaaagcaggcaagactttttctctgtgttaggaaagatgggaaatggtttctgtaaccattgtttggatttggaagtactctgcagtggacataagcattgggccatagtttgttaatctcaactaacgcctacattacattctccttgatcgttcttgttattacgctgttttgtgaacctgtagaaaacaagtgctttttatcttgaaattcaaccaacggaaagaatatgcatagaataatgcattctatgtagccatgtcactgtgaataacgatttcttgcatatttagccattttgattcctgtttgatttatacttctctgttgctacgcaaaaccgatcaaagaaaagtgaacttcagttttacaatctgtatgcctaaaagcgggtactaccgtttattttactgacttgtttaaatgattcgcttttgtaagaatcagatggcattatgcttgttgtacaatgccatattggtatatgacataacaggaaacagtattgtatgatatatttataaatgctataaagaaatattgtgtttcatgcattcagaaatgattgttaaaattctcccaactggttcgacctttgcagatacccataacctatgttgagccttgcttaccagcaaagaatatttttaatgtggatatctaattctaaagtctgttccattagaagcaattggcacatctttctatactttatatacttttctccagtaatacatgtttactttaaaaattgttgcagtgaagaaaaacctttaactgagaaatatggaaaccgtcttaattttccattggctatgatggaattaatattgtattttaaaaatgcatattgatcactataattctaaaacaattttttaaataaaccagcaggttgctaaaagaaggcattttatctaaagttattttaataggtggtatagcagtaattttaaatttaagagttgcttttacagttaacaatggaatatgccttctctgctatgtctgaaaatagaagctatttattatgagcttctacaggtatttttaaatagagcaagcatgttgaatttaaaatatgaataaccccacccaacaattttcagtttattttttgctttggtcgaacttggtgtgtgttcatcacccatcagttatttgtgagggtgtttattctatatgaatattgtttcatgtttgtatgggaaaattgtagctaaacatttcattgtccccagtctgcaaaagaagcacaattctattgctttgtcttgcttatagtcattaaatcattacttttacatatattgctgttacttctgctttctttaaaaatatagtaaaggatgttttatgaagtcacaagatacatatatttttattttgacctaaatttgtacagtcccattgtaagtgttgtttctaattatagatgtaaaatgaaatttcatttgtaattggaaaaaatccaataaaaaggatattcatttag

SEQ ID NO: 292646 - DNA, 3499 bp, Homo sapiens
cctcctcccctccccccgctcgcacgacacacacggcgccccccgcccgcccgcctcccccacagcaactatgaaataatcgtagtatgagaggcagagatcggggcgagacaatggggatgtgggcgcgggagccccgttccggcttagcagcacctcccagccccgcagaataaaaccgatcgcgccccctccgcgcgcgccctcccccgagtgcggagcgggaggaggcggcggcggccgaggaggaggaggaggaggccccggaggaggaggcgttggaggtcgaggcggaggcggaggaggaggaggccgaggcgccggaggaggccgaggcgccggagcaggaggaggccggccggaggcggcatgagacgagcgtggcggccgcggctgctcggggccgcgctggttgcccattgacagcggcgtctgcagctcgcttcaagatggccgcttggctcgcattcattttctgctgaacgacttttaactttcattgtcttttccgcccgcttcgatcgcctcgcgccggctgctctttccgggattttttatcaagcagaaatgcatcgaacaacgagaatcaagatcactgagctaaatccccacctgatgtgtgtgctttgtggagggtacttcattgatgccacaaccataatagaatgtctacattccttctgtaaaacgtgtattgttcgttacctggagaccagcaagtattgtcctatttgtgatgtccaagttcacaagaccagaccactactgaatataaggtcagataaaactctccaagatattgtatacaaattagttccagggcttttcaaaaatgaaatgaagagaagaagggatttttatgcagctcatccttctgctgatgctgccaatggctctaatgaagatagaggagaggttgcagatgaagataagagaattataactgatgatgagataataagcttatccattgaattctttgaccagaacagattggatcggaaagtaaacaaagacaaagagaaatctaaggaggaggtgaatgataaaagatacttacgatgcccagcagcaatgactgtgatgcacttaagaaagtttctcagaagtaaaatggacatacctaatactttccagattgatgtcatgtatgaggaggaacctttaaaggattattatacactaatggatattgcctacatttatacctggagaaggaatggtccacttccattgaaatacagagttcgacctacttgtaaaagaatgaagatcagtcaccagagagatggactgacaaatgctggagaactggaaagtgactctgggagtgacaaggccaacagcccagcaggaggtattccctccacctcttcttgtttgcctagccccagtactccagtgcagtctcctcatccacagtttcctcacatttccagtactatgaatggaaccagcaacagccccagcggtaaccaccaatcttcttttgccaatagacctcgaaaatcatcagtaaatgggtcatcagcaacttcttctggttgatacctgagactgttaaggaaaaaaattttaaacccctgatttatatagatatcttcatgccattacagctttctagatgctaatacatgtgactatcgtccaatttgctttcttttgtagtgacattaaatttggctataaaagatggactacatgtgatactcctatggacgttaattgaaaagaaagattgttgttataaagaattggtttcttggaaagcaggcaagactttttctctgtgttaggaaagatgggaaatggtttctgtaaccattgtttggatttggaagtactctgcagtggacataagcattgggccatagtttgttaatctcaactaacgcctacattacattctccttgatcgttcttgttattacgctgttttgtgaacctgtagaaaacaagtgctttttatcttgaaattcaaccaacggaaagaatatgcatagaataatgcattctatgtagccatgtcactgtgaataacgatttcttgcatatttagccattttgattcctgtttgatttatacttctctgttgctacgcaaaaccgatcaaagaaaagtgaacttcagttttacaatctgtatgcctaaaagcgggtactaccgtttattttactgacttgtttaaatgattcgcttttgtaagaatcagatggcattatgcttgttgtacaatgccatattggtatatgacataacaggaaacagtattgtatgatatatttataaatgctataaagaaatattgtgtttcatgcattcagaaatgattgttaaaattctcccaactggttcgacctttgcagatacccataacctatgttgagccttgcttaccagcaaagaatatttttaatgtggatatctaattctaaagtctgttccattagaagcaattggcacatctttctatactttatatacttttctccagtaatacatgtttactttaaaaattgttgcagtgaagaaaaacctttaactgagaaatatggaaaccgtcttaattttccattggctatgatggaattaatattgtattttaaaaatgcatattgatcactataattctaaaacaattttttaaataaaccagcaggttgctaaaagaaggcattttatctaaagttattttaataggtggtatagcagtaattttaaatttaagagttgcttttacagttaacaatggaatatgccttctctgctatgtctgaaaatagaagctatttattatgagcttctacaggtatttttaaatagagcaagcatgttgaatttaaaatatgaataaccccacccaacaattttcagtttattttttgctttggtcgaacttggtgtgtgttcatcacccatcagttatttgtgagggtgtttattctatatgaatattgtttcatgtttgtatgggaaaattgtagctaaacatttcattgtccccagtctgcaaaagaagcacaattctattgctttgtcttgcttatagtcattaaatcattacttttacatatattgctgttacttctgctttctttaaaaatatagtaaaggatgttttatgaagtcacaagatacatatatttttattttgacctaaatttgtacagtcccattgtaagtgttgtttctaattatagatgtaaaatgaaatttcatttgtaattggaaaaaatccaataaaaaggatattcatttagaaaatagctaagatctttaataaaaatttgatatgaaaagcacaatgtgcagaagttatggaaaacctatagaggattacaacaggtaaacgttaaagagaatacattgctgacttatagtgatgtggctaagaagtacatgctttgttgtaaaattgcttgaaagcccattgaaagatgtatctgtttatttacagtctttgaagtaaaagttaccaatgtttgccaaaaaaaagaa

SEQ ID NO: 292647 - DNA, 3074 bp, Homo sapiens
cctcctcccctccccccgctcgcacgacacacacggcgccccccgcccgcccgcctcccccacagcaactatgaaataatcgtagtatgagaggcagagatcggggcgagacaatggggatgtgggcgcgggagccccgttccggcttagcagcacctcccagccccgcagaataaaaccgatcgcgccccctccgcgcgcgccctcccccgagtgcggagcgggaggaggcggcggcggccgaggaggaggaggaggaggccccggaggaggaggcgttggaggtcgaggcggaggcggaggaggaggaggccgaggcgccggaggaggccgaggcgccggagcaggaggaggccggccggaggcggcatgagacgagcgtggcggccgcggctgctcggggccgcgctggttgcccattgacagcggcgtctgcagctcgcttcaagatggccgcttggctcgcattcattttctgctgaacgacttttaactttcattgtcttttccgcccgcttcgatcgcctcgcgccggctgctctttccgggattttttatcaagcagaaatgcatcgaacaacgagaatcaagatcactgagctaaatccccacctgatgtgtgtgctttgtggagggtacttcattgatgccacaaccataatagaatgtctacattccttctgtaaaacgtgtattgttcgttacctggagaccagcaagtattgtcctatttgtgatgtccaagttcacaagaccagaccactactgaatataaggtcagataaaactctccaagatattgtatacaaattagttccagggcttttcaaaaatgaaatgaagagaagaagggatttttatgcagctcatccttctgctgatgctgccaatggctctaatgaagatagaggagaggttgcagatgaagataagagaattataactgatgatgagataataagcttatccattgaattctttgaccagaacagattggatcggaaagtaaacaaagacaaagagaaatctaaggaggaggtgaatgataaaagatacttacgatgcccagcagcaatgactgtgatgcacttaagaaagtttctcagaagtaaaatggacatacctaatactttccagattgatgtcatgtatgaggaggaacctttaaaggattattatacactaatggatattgcctacatttatacctggagaaggaatggtccacttccattgaaatacagagttcgacctacttgtaaaagaatgaagatcagtcaccagagagatggactgacaaatgctggagaactggaaagtgactctgggagtgacaaggccaacagcccagcaggaggtattccctccacctcttcttgtttgcctagccccagtactccagtgcagtctcctcatccacagtttcctcacatttccagtactatgaatggaaccagcaacagccccagcggtaaccaccaatcttcttttgccaatagacctcgaaaatcatcagtaaatgggtcatcagcaacttcttctggttgatacctgagactgttaaggaaaaaaattttaaacccctgatttatatagatatcttcatgccattacagctttctagatgctaatacatgtgactatcgtccaatttgctttcttttgtagtgacattaaatttggctataaaagatggactacatgtgatactcctatggacgttaattgaaaagaaagattgttgttataaagaattggtttcttggaaagcaggcaagactttttctctgtgttaggaaagatgggaaatggtttctgtaaccattgtttggatttggaagtactctgcagtggacataagcattgggccatagtttgttaatctcaactaacgcctacattacattctccttgatcgttcttgttattacgctgttttgtgaacctgtagaaaacaagtgctttttatcttgaaattcaaccaacggaaagaatatgcatagaataatgcattctatgtagccatgtcactgtgaataacgatttcttgcatatttagccattttgattcctgtttgatttatacttctctgttgctacgcaaaaccgatcaaagaaaagtgaacttcagttttacaatctgtatgcctaaaagcgggtactaccgtttattttactgacttgtttaaatgattcgcttttgtaagaatcagatggcattatgcttgttgtacaatgccatattggtatatgacataacaggaaacagtattgtatgatatatttataaatgctataaagaaatattgtgtttcatgcattcagaaatgattgttaaaattctcccaactggttcgacctttgcagatacccataacctatgttgagccttgcttaccagcaaagaatatttttaatgtggatatctaattctaaagtctgttccattagaagcaattggcacatctttctatactttatatacttttctccagtaatacatgtttactttaaaaattgttgcagtgaagaaaaacctttaactgagaaatatggaaaccgtcttaattttccattggctatgatggaattaatattgtattttaaaaatgcatattgatcactataattctaaaacaattttttaaataaaccagcaggttgctaaaagaaggcattttatctaaagttattttaataggtggtatagcagtaattttaaatttaagagttgcttttacagttaacaatggaatatgccttctctgctatgtctgaaaatagaagctatttattatgagcttctacaggtatttttaaatagagcaagcatgttgaatttaaaatatgaataaccccacccaacaattttcagtttattttttgctttggtcgaacttggtgtgtgttcatcacccatcagttatttgtgagggtgtttattctatatgaatattgtttcatgtttgtatgggaaaattgtagctaaacatttcattgtccccagtctgcaaaagaagcacaattctattgctttgtcttgcttatagtcattaaatcattacttttacata

SEQ ID NO: 292648 - DNA, 3445 bp, Homo sapiens
cctcctcccctccccccgctcgcacgacacacacggcgccccccgcccgcccgcctcccccacagcaactatgaaataatcgtagtatgagaggcagagatcggggcgagacaatggggatgtgggcgcgggagccccgttccggcttagcagcacctcccagccccgcagaataaaaccgatcgcgccccctccgcgcgcgccctcccccgagtgcggagcgggaggaggcggcggcggccgaggaggaggaggaggaggccccggaggaggaggcgttggaggtcgaggcggaggcggaggaggaggaggccgaggcgccggaggaggccgaggcgccggagcaggaggaggccggccggaggcggcatgagacgagcgtggcggccgcggctgctcggggccgcgctggttgcccattgacagcggcgtctgcagctcgcttcaagatggccgcttggctcgcattcattttctgctgaacgacttttaactttcattgtcttttccgcccgcttcgatcgcctcgcgccggctgctctttccgggattttttatcaagcagaaatgcatcgaacaacgagaatcaagatcactgagctaaatccccacctgatgtgtgtgctttgtggagggtacttcattgatgccacaaccataatagaatgtctacattccttctgtaaaacgtgtattgttcgttacctggagaccagcaagtattgtcctatttgtgatgtccaagttcacaagaccagaccactactgaatataaggtcagataaaactctccaagatattgtatacaaattagttccagggcttttcaaaaatgaaatgaagagaagaagggatttttatgcagctcatccttctgctgatgctgccaatggctctaatgaagatagaggagaggttgcagatgaagataagagaattataactgatgatgagataataagcttatccattgaattctttgaccagaacagattggatcggaaagtaaacaaagacaaagagaaatctaaggaggaggtgaatgataaaagatacttacgatgcccagcagcaatgactgtgatgcacttaagaaagtttctcagaagtaaaatggacatacctaatactttccagattgatgtcatgtatgaggaggaacctttaaaggattattatacactaatggatattgcctacatttatacctggagaaggaatggtccacttccattgaaatacagagttcgacctacttgtaaaagaatgaagatcagtcaccagagagatggactgacaaatgctggagaactggaaagtgactctgggagtgacaaggccaacagcccagcaggaggtattccctccacctcttcttgtttgcctagccccagtactccagtgcagtctcctcatccacagtttcctcacatttccagtactatgaatggaaccagcaacagccccagcggtaaccaccaatcttcttttgccaatagacctcgaaaatcatcagtaaatgggtcatcagcaacttcttctggttgatacctgagactgttaaggaaaaaaattttaaacccctgatttatatagatatcttcatgccattacagctttctagatgctaatacatgtgactatcgtccaatttgctttcttttgtagtgacattaaatttggctataaaagatggactacatgtgatactcctatggacgttaattgaaaagaaagattgttgttataaagaattggtttcttggaaagcaggcaagactttttctctgtgttaggaaagatgggaaatggtttctgtaaccattgtttggatttggaagtactctgcagtggacataagcattgggccatagtttgttaatctcaactaacgcctacattacattctccttgatcgttcttgttattacgctgttttgtgaacctgtagaaaacaagtgctttttatcttgaaattcaaccaacggaaagaatatgcatagaataatgcattctatgtagccatgtcactgtgaataacgatttcttgcatatttagccattttgattcctgtttgatttatacttctctgttgctacgcaaaaccgatcaaagaaaagtgaacttcagttttacaatctgtatgcctaaaagcgggtactaccgtttattttactgacttgtttaaatgattcgcttttgtaagaatcagatggcattatgcttgttgtacaatgccatattggtatatgacataacaggaaacagtattgtatgatatatttataaatgctataaagaaatattgtgtttcatgcattcagaaatgattgttaaaattctcccaactggttcgacctttgcagatacccataacctatgttgagccttgcttaccagcaaagaatatttttaatgtggatatctaattctaaagtctgttccattagaagcaattggcacatctttctatactttatatacttttctccagtaatacatgtttactttaaaaattgttgcagtgaagaaaaacctttaactgagaaatatggaaaccgtcttaattttccattggctatgatggaattaatattgtattttaaaaatgcatattgatcactataattctaaaacaattttttaaataaaccagcaggttgctaaaagaaggcattttatctaaagttattttaataggtggtatagcagtaattttaaatttaagagttgcttttacagttaacaatggaatatgccttctctgctatgtctgaaaatagaagctatttattatgagcttctacaggtatttttaaatagagcaagcatgttgaatttaattggtgtgtgttcatcacccatcagttatttgtgagggtgtttattctatatgaatattgtttcatgtttgtatgggaaaattgtagctaaacatttcattgtccccagtctgcaaaagaagcacaattctattgctttgtcttgcttatagtcattaaatcattacttttacatatattgctgttacttctgctttctttaaaaatatagtaaaggatgttttatgaagtcacaagatacatatatttttattttgacctaaatttgtacagtcccattgtaagtgttgtttctaattatagatgtaaaatgaaatttcatttgtaattggaaaaaatccaataaaaaggatattcatttagaaaatagctaagatctttaataaaaatttgatatgaaaagcacaatgtgcagaagttatggaaaacctatagaggattacaacaggtaaacgttaaagagaatacattgctgacttatagtgatgtggctaagaagtacatgctttgttgtaaaattgcttgaaagcccattgaaagatgtatctgtttatttacagtctttgaagtaaaagttaccaatgtttgccaaaaaaaagaa

SEQ ID NO: 292649 - DNA, 3060 bp, Homo sapiens
ttccagatgctggcggatccccgctccttcgactccaacgccttcacgcttctcctccgggcggcattccagagtctgctggacgcccaggcggacgaggccgtgttaggattttttatcaagcagaaatgcatcgaacaacgagaatcaagatcactgagctaaatccccacctgatgtgtgtgctttgtggagggtacttcattgatgccacaaccataatagaatgtctacattccttctgtaaaacgtgtattgttcgttacctggagaccagcaagtattgtcctatttgtgatgtccaagttcacaagaccagaccactactgaatataaggtcagataaaactctccaagatattgtatacaaattagttccagggcttttcaaaaatgaaatgaagagaagaagggatttttatgcagctcatccttctgctgatgctgccaatggctctaatgaagatagaggagaggttgcagatgaagataagagaattataactgatgatgagataataagcttatccattgaattctttgaccagaacagattggatcggaaagtaaacaaagacaaagagaaatctaaggaggaggtgaatgataaaagatacttacgatgcccagcagcaatgactgtgatgcacttaagaaagtttctcagaagtaaaatggacatacctaatactttccagattgatgtcatgtatgaggaggaacctttaaaggattattatacactaatggatattgcctacatttatacctggagaaggaatggtccacttccattgaaatacagagttcgacctacttgtaaaagaatgaagatcagtcaccagagagatggactgacaaatgctggagaactggaaagtgactctgggagtgacaaggccaacagcccagcaggaggtattccctccacctcttcttgtttgcctagccccagtactccagtgcagtctcctcatccacagtttcctcacatttccagtactatgaatggaaccagcaacagccccagcggtaaccaccaatcttcttttgccaatagacctcgaaaatcatcagtaaatgggtcatcagcaacttcttctggttgatacctgagactgttaaggaaaaaaattttaaacccctgatttatatagatatcttcatgccattacagctttctagatgctaatacatgtgactatcgtccaatttgctttcttttgtagtgacattaaatttggctataaaagatggactacatgtgatactcctatggacgttaattgaaaagaaagattgttgttataaagaattggtttcttggaaagcaggcaagactttttctctgtgttaggaaagatgggaaatggtttctgtaaccattgtttggatttggaagtactctgcagtggacataagcattgggccatagtttgttaatctcaactaacgcctacattacattctccttgatcgttcttgttattacgctgttttgtgaacctgtagaaaacaagtgctttttatcttgaaattcaaccaacggaaagaatatgcatagaataatgcattctatgtagccatgtcactgtgaataacgatttcttgcatatttagccattttgattcctgtttgatttatacttctctgttgctacgcaaaaccgatcaaagaaaagtgaacttcagttttacaatctgtatgcctaaaagcgggtactaccgtttattttactgacttgtttaaatgattcgcttttgtaagaatcagatggcattatgcttgttgtacaatgccatattggtatatgacataacaggaaacagtattgtatgatatatttataaatgctataaagaaatattgtgtttcatgcattcagaaatgattgttaaaattctcccaactggttcgacctttgcagatacccataacctatgttgagccttgcttaccagcaaagaatatttttaatgtggatatctaattctaaagtctgttccattagaagcaattggcacatctttctatactttatatacttttctccagtaatacatgtttactttaaaaattgttgcagtgaagaaaaacctttaactgagaaatatggaaaccgtcttaattttccattggctatgatggaattaatattgtattttaaaaatgcatattgatcactataattctaaaacaattttttaaataaaccagcaggttgctaaaagaaggcattttatctaaagttattttaataggtggtatagcagtaattttaaatttaagagttgcttttacagttaacaatggaatatgccttctctgctatgtctgaaaatagaagctatttattatgagcttctacaggtatttttaaatagagcaagcatgttgaatttaaaatatgaataaccccacccaacaattttcagtttattttttgctttggtcgaacttggtgtgtgttcatcacccatcagttatttgtgagggtgtttattctatatgaatattgtttcatgtttgtatgggaaaattgtagctaaacatttcattgtccccagtctgcaaaagaagcacaattctattgctttgtcttgcttatagtcattaaatcattacttttacatatattgctgttacttctgctttctttaaaaatatagtaaaggatgttttatgaagtcacaagatacatatatttttattttgacctaaatttgtacagtcccattgtaagtgttgtttctaattatagatgtaaaatgaaatttcatttgtaattggaaaaaatccaataaaaaggatattcatttagaaaatagctaagatctttaataaaaatttgatatgaaaagcacaatgtgcagaagttatggaaaacctatagaggattacaacaggtaaacgttaaagagaatacattgctgacttatagtgatgtggctaagaagtacatgctttgttgtaaaattgcttgaaagcccattgaaagatgtatctgtttatttacagtctttgaagtaaaagttaccaatgtttgccaaaaaaaagaa

SEQ ID NO: 292650 - DNA, 3034 bp, Homo sapiens
tcgatcggaacgcccgccgaggctcggggctcgggccgggctccgcgcggagttgcagcggtggccggatgccaagtgtaagtgattttttatcaagcagaaatgcatcgaacaacgagaatcaagatcactgagctaaatccccacctgatgtgtgtgctttgtggagggtacttcattgatgccacaaccataatagaatgtctacattccttctgtaaaacgtgtattgttcgttacctggagaccagcaagtattgtcctatttgtgatgtccaagttcacaagaccagaccactactgaatataaggtcagataaaactctccaagatattgtatacaaattagttccagggcttttcaaaaatgaaatgaagagaagaagggatttttatgcagctcatccttctgctgatgctgccaatggctctaatgaagatagaggagaggttgcagatgaagataagagaattataactgatgatgagataataagcttatccattgaattctttgaccagaacagattggatcggaaagtaaacaaagacaaagagaaatctaaggaggaggtgaatgataaaagatacttacgatgcccagcagcaatgactgtgatgcacttaagaaagtttctcagaagtaaaatggacatacctaatactttccagattgatgtcatgtatgaggaggaacctttaaaggattattatacactaatggatattgcctacatttatacctggagaaggaatggtccacttccattgaaatacagagttcgacctacttgtaaaagaatgaagatcagtcaccagagagatggactgacaaatgctggagaactggaaagtgactctgggagtgacaaggccaacagcccagcaggaggtattccctccacctcttcttgtttgcctagccccagtactccagtgcagtctcctcatccacagtttcctcacatttccagtactatgaatggaaccagcaacagccccagcggtaaccaccaatcttcttttgccaatagacctcgaaaatcatcagtaaatgggtcatcagcaacttcttctggttgatacctgagactgttaaggaaaaaaattttaaacccctgatttatatagatatcttcatgccattacagctttctagatgctaatacatgtgactatcgtccaatttgctttcttttgtagtgacattaaatttggctataaaagatggactacatgtgatactcctatggacgttaattgaaaagaaagattgttgttataaagaattggtttcttggaaagcaggcaagactttttctctgtgttaggaaagatgggaaatggtttctgtaaccattgtttggatttggaagtactctgcagtggacataagcattgggccatagtttgttaatctcaactaacgcctacattacattctccttgatcgttcttgttattacgctgttttgtgaacctgtagaaaacaagtgctttttatcttgaaattcaaccaacggaaagaatatgcatagaataatgcattctatgtagccatgtcactgtgaataacgatttcttgcatatttagccattttgattcctgtttgatttatacttctctgttgctacgcaaaaccgatcaaagaaaagtgaacttcagttttacaatctgtatgcctaaaagcgggtactaccgtttattttactgacttgtttaaatgattcgcttttgtaagaatcagatggcattatgcttgttgtacaatgccatattggtatatgacataacaggaaacagtattgtatgatatatttataaatgctataaagaaatattgtgtttcatgcattcagaaatgattgttaaaattctcccaactggttcgacctttgcagatacccataacctatgttgagccttgcttaccagcaaagaatatttttaatgtggatatctaattctaaagtctgttccattagaagcaattggcacatctttctatactttatatacttttctccagtaatacatgtttactttaaaaattgttgcagtgaagaaaaacctttaactgagaaatatggaaaccgtcttaattttccattggctatgatggaattaatattgtattttaaaaatgcatattgatcactataattctaaaacaattttttaaataaaccagcaggttgctaaaagaaggcattttatctaaagttattttaataggtggtatagcagtaattttaaatttaagagttgcttttacagttaacaatggaatatgccttctctgctatgtctgaaaatagaagctatttattatgagcttctacaggtatttttaaatagagcaagcatgttgaatttaaaatatgaataaccccacccaacaattttcagtttattttttgctttggtcgaacttggtgtgtgttcatcacccatcagttatttgtgagggtgtttattctatatgaatattgtttcatgtttgtatgggaaaattgtagctaaacatttcattgtccccagtctgcaaaagaagcacaattctattgctttgtcttgcttatagtcattaaatcattacttttacatatattgctgttacttctgctttctttaaaaatatagtaaaggatgttttatgaagtcacaagatacatatatttttattttgacctaaatttgtacagtcccattgtaagtgttgtttctaattatagatgtaaaatgaaatttcatttgtaattggaaaaaatccaataaaaaggatattcatttagaaaatagctaagatctttaataaaaatttgatatgaaaagcacaatgtgcagaagttatggaaaacctatagaggattacaacaggtaaacgttaaagagaatacattgctgacttatagtgatgtggctaagaagtacatgctttgttgtaaaattgcttgaaagcccattgaaagatgtatctgtttatttacagtctttgaagtaaaagttaccaatgtttgccaaaaaaaagaa

SEQ ID NO: 292651 - DNA, 3417 bp, Homo sapiens
cctcctcccctccccccgctcgcacgacacacacggcgccccccgcccgcccgcctcccccacagcaactatgaaataatcgtagtatgagaggcagagatcggggcgagacaatggggatgtgggcgcgggagccccgttccggcttagcagcacctcccagccccgcagaataaaaccgatcgcgccccctccgcgcgcgccctcccccgagtgcggagcgggaggaggcggcggcggccgaggaggaggaggaggaggccccggaggaggaggcgttggaggtcgaggcggaggcggaggaggaggaggccgaggcgccggaggaggccgaggcgccggagcaggaggaggccggccggaggcggcatgagacgagcgtggcggccgcggctgctcggggccgcgctggttgcccattgacagcggcgtctgcagctcgcttcaagatggccgcttggctcgcattcattttctgctgaacgacttttaactttcattgtcttttccgcccgcttcgatcgcctcgcgccggctgctctttccgggattttttatcaagcagaaatgcatcgaacaacgagaatcaagatcactgagctaaatccccacctgatgtgtgtgctttgtggagggtacttcattgatgccacaaccataatagaatgtctacattccttctgtaaaacgtgtattgttcgttacctggagaccagcaagtattgtcctatttgtgatgtccaagttcacaagaccagaccactactgaatataaggtcagataaaactctccaagatattgtatacaaattagttccagggcttttcaaaaatgaaatgaagagaagaagggatttttatgcagctcatccttctgctgatgctgccaatggctctaatgaagatagaggagaggttgcagatgaagataagagaattataactgatgatgagataataagcttatccattgaattctttgaccagaacagattggatcggaaagtaaacaaagacaaagagaaatctaaggaggaggtgaatgataaaagatacttacgatgcccagcagcaatgactgtgatgcacttaagaaagtttctcagaagtaaaatggacatacctaatactttccagattgatgtcatgtatgaggaggaacctttaaaggattattatacactaatggatattgcctacatttatacctggagaaggaatggtccacttccattgaaatacagagttcgacctacttgtaaaagaatgaagatcagtcaccagagagatggactgacaaatgctggagaactggaaagtgactctgggagtgacaaggccaacagcccagcaggagtactatgaatggaaccagcaacagccccagcggtaaccaccaatcttcttttgccaatagacctcgaaaatcatcagtaaatgggtcatcagcaacttcttctggttgatacctgagactgttaaggaaaaaaattttaaacccctgatttatatagatatcttcatgccattacagctttctagatgctaatacatgtgactatcgtccaatttgctttcttttgtagtgacattaaatttggctataaaagatggactacatgtgatactcctatggacgttaattgaaaagaaagattgttgttataaagaattggtttcttggaaagcaggcaagactttttctctgtgttaggaaagatgggaaatggtttctgtaaccattgtttggatttggaagtactctgcagtggacataagcattgggccatagtttgttaatctcaactaacgcctacattacattctccttgatcgttcttgttattacgctgttttgtgaacctgtagaaaacaagtgctttttatcttgaaattcaaccaacggaaagaatatgcatagaataatgcattctatgtagccatgtcactgtgaataacgatttcttgcatatttagccattttgattcctgtttgatttatacttctctgttgctacgcaaaaccgatcaaagaaaagtgaacttcagttttacaatctgtatgcctaaaagcgggtactaccgtttattttactgacttgtttaaatgattcgcttttgtaagaatcagatggcattatgcttgttgtacaatgccatattggtatatgacataacaggaaacagtattgtatgatatatttataaatgctataaagaaatattgtgtttcatgcattcagaaatgattgttaaaattctcccaactggttcgacctttgcagatacccataacctatgttgagccttgcttaccagcaaagaatatttttaatgtggatatctaattctaaagtctgttccattagaagcaattggcacatctttctatactttatatacttttctccagtaatacatgtttactttaaaaattgttgcagtgaagaaaaacctttaactgagaaatatggaaaccgtcttaattttccattggctatgatggaattaatattgtattttaaaaatgcatattgatcactataattctaaaacaattttttaaataaaccagcaggttgctaaaagaaggcattttatctaaagttattttaataggtggtatagcagtaattttaaatttaagagttgcttttacagttaacaatggaatatgccttctctgctatgtctgaaaatagaagctatttattatgagcttctacaggtatttttaaatagagcaagcatgttgaatttaaaatatgaataaccccacccaacaattttcagtttattttttgctttggtcgaacttggtgtgtgttcatcacccatcagttatttgtgagggtgtttattctatatgaatattgtttcatgtttgtatgggaaaattgtagctaaacatttcattgtccccagtctgcaaaagaagcacaattctattgctttgtcttgcttatagtcattaaatcattacttttacatatattgctgttacttctgctttctttaaaaatatagtaaaggatgttttatgaagtcacaagatacatatatttttattttgacctaaatttgtacagtcccattgtaagtgttgtttctaattatagatgtaaaatgaaatttcatttgtaattggaaaaaatccaataaaaaggatattcatttagaaaatagctaagatctttaataaaaatttgatatgaaaagcacaatgtgcagaagttatggaaaacctatagaggattacaacaggtaaacgttaaagagaatacattgctgacttatagtgatgtggctaagaagtacatgctttgttgtaaaattgcttgaaagcccattgaaagatgtatctgtttatttacagtctttgaagtaaaagttaccaatgtttgccaaaaaaaagaa

SEQ ID NO: 292652 - DNA, 3827 bp, Homo sapiens
cctcctcccctccccccgctcgcacgacacacacggcgccccccgcccgcccgcctcccccacagcaactatgaaataatcgtagtatgagaggcagagatcggggcgagacaatggggatgtgggcgcgggagccccgttccggcttagcagcacctcccagccccgcagaataaaaccgatcgcgccccctccgcgcgcgccctcccccgagtgcggagcgggaggaggcggcggcggccgaggaggaggaggaggaggccccggaggaggaggcgttggaggtcgaggcggaggcggaggaggaggaggccgaggcgccggaggaggccgaggcgccggagcaggaggaggccggccggaggcggcatgagacgagcgtggcggccgcggctgctcggggccgcgctggttgcccattgacagcggcgtctgcagctcgcttcaagatggccgcttggctcgcattcattttctgctgaacgacttttaactttcattgtcttttccgcccgcttcgatcgcctcgcgccggctgctctttccgggattttttatcaagcagaaatgcatcgaacaacgagaatcaagatcactgagctaaatccccacctgatgtgtgtgctttgtggagggtacttcattgatgccacaaccataatagaatgtctacattcctgtaagtaccgagctttagctctcttttgtatcatgcgtatttcacagttcgacctggaatttgaaaactgttaatgattcctgcaatctgtggaaatgttggtacaaagtggtgaaggcattttcttctcttgcatctaatgactttttgttaatatgtattgattgtattacaagcatgcaatatatgtgttctcaggatatgaattagcttatttagttggaaatgcctttcaccatcttgttttctactagttctgggtttctaacaccaatgatttatccactcatttctaaacataaaaaaacttcacatgttctacttctagtctgtaaaacgtgtattgttcgttacctggagaccagcaagtattgtcctatttgtgatgtccaagttcacaagaccagaccactactgaatataaggtcagataaaactctccaagatattgtatacaaattagttccagggcttttcaaaaatgaaatgaagagaagaagggatttttatgcagctcatccttctgctgatgctgccaatggctctaatgaagatagaggagaggttgcagatgaagataagagaattataactgatgatgagataataagcttatccattgaattctttgaccagaacagattggatcggaaagtaaacaaagacaaagagaaatctaaggaggaggtgaatgataaaagatacttacgatgcccagcagcaatgactgtgatgcacttaagaaagtttctcagaagtaaaatggacatacctaatactttccagattgatgtcatgtatgaggaggaacctttaaaggattattatacactaatggatattgcctacatttatacctggagaaggaatggtccacttccattgaaatacagagttcgacctacttgtaaaagaatgaagatcagtcaccagagagatggactgacaaatgctggagaactggaaagtgactctgggagtgacaaggccaacagcccagcaggaggtattccctccacctcttcttgtttgcctagccccagtactccagtgcagtctcctcatccacagtttcctcacatttccagtactatgaatggaaccagcaacagccccagcggtaaccaccaatcttcttttgccaatagacctcgaaaatcatcagtaaatgggtcatcagcaacttcttctggttgatacctgagactgttaaggaaaaaaattttaaacccctgatttatatagatatcttcatgccattacagctttctagatgctaatacatgtgactatcgtccaatttgctttcttttgtagtgacattaaatttggctataaaagatggactacatgtgatactcctatggacgttaattgaaaagaaagattgttgttataaagaattggtttcttggaaagcaggcaagactttttctctgtgttaggaaagatgggaaatggtttctgtaaccattgtttggatttggaagtactctgcagtggacataagcattgggccatagtttgttaatctcaactaacgcctacattacattctccttgatcgttcttgttattacgctgttttgtgaacctgtagaaaacaagtgctttttatcttgaaattcaaccaacggaaagaatatgcatagaataatgcattctatgtagccatgtcactgtgaataacgatttcttgcatatttagccattttgattcctgtttgatttatacttctctgttgctacgcaaaaccgatcaaagaaaagtgaacttcagttttacaatctgtatgcctaaaagcgggtactaccgtttattttactgacttgtttaaatgattcgcttttgtaagaatcagatggcattatgcttgttgtacaatgccatattggtatatgacataacaggaaacagtattgtatgatatatttataaatgctataaagaaatattgtgtttcatgcattcagaaatgattgttaaaattctcccaactggttcgacctttgcagatacccataacctatgttgagccttgcttaccagcaaagaatatttttaatgtggatatctaattctaaagtctgttccattagaagcaattggcacatctttctatactttatatacttttctccagtaatacatgtttactttaaaaattgttgcagtgaagaaaaacctttaactgagaaatatggaaaccgtcttaattttccattggctatgatggaattaatattgtattttaaaaatgcatattgatcactataattctaaaacaattttttaaataaaccagcaggttgctaaaagaaggcattttatctaaagttattttaataggtggtatagcagtaattttaaatttaagagttgcttttacagttaacaatggaatatgccttctctgctatgtctgaaaatagaagctatttattatgagcttctacaggtatttttaaatagagcaagcatgttgaatttaaaatatgaataaccccacccaacaattttcagtttattttttgctttggtcgaacttggtgtgtgttcatcacccatcagttatttgtgagggtgtttattctatatgaatattgtttcatgtttgtatgggaaaattgtagctaaacatttcattgtccccagtctgcaaaagaagcacaattctattgctttgtcttgcttatagtcattaaatcattacttttacatatattgctgttacttctgctttctttaaaaatatagtaaaggatgttttatgaagtcacaagatacatatatttttattttgacctaaatttgtacagtcccattgtaagtgttgtttctaattatagatgtaaaatgaaatttcatttgtaattggaaaaaatccaataaaaaggatattcatttagaaaatagctaagatctttaataaaaatttgatatgaaaagcacaatgtgcagaagttatggaaaacctatagaggattacaacaggtaaacgttaaagagaatacattgctgacttatagtgatgtggctaagaagtacatgctttgttgtaaaattgcttgaaagcccattgaaagatgtatctgtttatttacagtctttgaagtaaaagttaccaatgtttgccaaaaaaaagaa

SEQ ID NO: 292653 - DNA, 3520 bp, Homo sapiens
cctcctcccctccccccgctcgcacgacacacacggcgccccccgcccgcccgcctcccccacagcaactatgaaataatcgtagtatgagaggcagagatcggggcgagacaatggggatgtgggcgcgggagccccgttccggcttagcagcacctcccagccccgcagaataaaaccgatcgcgccccctccgcgcgcgccctcccccgagtgcggagcgggaggaggcggcggcggccgaggaggaggaggaggaggccccggaggaggaggcgttggaggtcgaggcggaggcggaggaggaggaggccgaggcgccggaggaggccgaggcgccggagcaggaggaggccggccggaggcggcatgagacgagcgtggcggccgcggctgctcggggccgcgctggttgcccattgacagcggcgtctgcagctcgcttcaagatggccgcttggctcgcattcattttctgctgaacgacttttaactttcattgtcttttccgcccgcttcgatcgcctcgcgccggctgctctttccgggattttttatcaagcagaaatgcatcgaacaacgagaatcaagatcactgagctaaatccccacctgatgtgtgtgctttgtggagggtacttcattgatgccacaaccataatagaatgtctacattccttctgtaaaacgtgtattgttcgttacctggagaccagcaagtattgtcctatttgtgatgtccaagttcacaagaccagaccactactgaatataaggtcagataaaactctccaagatattgtatacaaattagttccagggcttttcaaaaatgaaatgaagagaagaagggatttttatgcagctcatccttctgctgatgctgccaatggctctaatgaagatagaggagaggttgcagatgaagataagagaattataactgatgatgagataataagcttatccattgaattctttgaccagaacaggtaaaatctttaggcaatttattttatgctaatgttttattagattgtttcactaataaattttctctttattagattggatcggaaagtaaacaaagacaaagagaaatctaaggaggaggtgaatgataaaagatacttacgatgcccagcagcaatgactgtgatgcacttaagaaagtttctcagaactttaaaggattattatacactaatggatattgcctacatttatacctggagaaggaatggtccacttccattgaaatacagagttcgacctacttgtaaaagaatgaagatcagtcaccagagagatggactgacaaatgctggagaactggaaagtgactctgggagtgacaaggccaacagcccagcaggaggtattccctccacctcttcttgtttgcctagccccagtactccagtgcagtctcctcatccacagtttcctcacatttccagtactatgaatggaaccagcaacagccccagcggtaaccaccaatcttcttttgccaatagacctcgaaaatcatcagtaaatgggtcatcagcaacttcttctggttgatacctgagactgttaaggaaaaaaattttaaacccctgatttatatagatatcttcatgccattacagctttctagatgctaatacatgtgactatcgtccaatttgctttcttttgtagtgacattaaatttggctataaaagatggactacatgtgatactcctatggacgttaattgaaaagaaagattgttgttataaagaattggtttcttggaaagcaggcaagactttttctctgtgttaggaaagatgggaaatggtttctgtaaccattgtttggatttggaagtactctgcagtggacataagcattgggccatagtttgttaatctcaactaacgcctacattacattctccttgatcgttcttgttattacgctgttttgtgaacctgtagaaaacaagtgctttttatcttgaaattcaaccaacggaaagaatatgcatagaataatgcattctatgtagccatgtcactgtgaataacgatttcttgcatatttagccattttgattcctgtttgatttatacttctctgttgctacgcaaaaccgatcaaagaaaagtgaacttcagttttacaatctgtatgcctaaaagcgggtactaccgtttattttactgacttgtttaaatgattcgcttttgtaagaatcagatggcattatgcttgttgtacaatgccatattggtatatgacataacaggaaacagtattgtatgatatatttataaatgctataaagaaatattgtgtttcatgcattcagaaatgattgttaaaattctcccaactggttcgacctttgcagatacccataacctatgttgagccttgcttaccagcaaagaatatttttaatgtggatatctaattctaaagtctgttccattagaagcaattggcacatctttctatactttatatacttttctccagtaatacatgtttactttaaaaattgttgcagtgaagaaaaacctttaactgagaaatatggaaaccgtcttaattttccattggctatgatggaattaatattgtattttaaaaatgcatattgatcactataattctaaaacaattttttaaataaaccagcaggttgctaaaagaaggcattttatctaaagttattttaataggtggtatagcagtaattttaaatttaagagttgcttttacagttaacaatggaatatgccttctctgctatgtctgaaaatagaagctatttattatgagcttctacaggtatttttaaatagagcaagcatgttgaatttaaaatatgaataaccccacccaacaattttcagtttattttttgctttggtcgaacttggtgtgtgttcatcacccatcagttatttgtgagggtgtttattctatatgaatattgtttcatgtttgtatgggaaaattgtagctaaacatttcattgtccccagtctgcaaaagaagcacaattctattgctttgtcttgcttatagtcattaaatcattacttttacatatattgctgttacttctgctttctttaaaaatatagtaaaggatgttttatgaagtcacaagatacatatatttttattttgacctaaatttgtacagtcccattgtaagtgttgtttctaattatagatgtaaaatgaaatttcatttgtaattggaaaaaatccaataaaaaggatattcatttagaaaatagctaagatctttaataaaaatttgatatgaaaagcacaatgtgcagaagttatggaaaacctatagaggattacaacaggtaaacgttaaagagaatacattgctgacttatagtgatgtggctaagaagtacatgctttgttgtaaaattgcttgaaagcccattgaaagatgtatctgtttatttacagtctttgaagtaaaagttaccaatgtttgccaaaaaaaagaa

SEQ ID NO: 292654 - DNA, 3150 bp, Homo sapiens
gacttcatgacaggcaggaataaatatttaaaagggcttccattcctctttattccctattcatattagctagtttagtaacttgaaaggcacacttcttttgacagagcaaatgtgaagaatttattagtgaatataaaatatttttctactgatttaaaaagtgctatatacagagaacttttattctcatagtttttatcttatcaataatagttatagacagcatcacaatcaagtaaaatattatagcacaaaagaagactatagaaacttatgaacatttttagttcttgccatctgaattcatagttttctattttaattatttttcaggtcagataaaactctccaagatattgtatacaaattagttccagggcttttcaaaagtgagtaacttgcttagaaaatgaatttaaagagattattcattagttctttgtgttatgccaaatgtttacatcttttttccccattcagatgaaatgaagagaagaagggatttttatgcagctcatccttctgctgatgctgccaatggctctaatgaagatagaggagaggttgcagatgaagataagagaattataactgatgatgagataataagcttatccattgaattctttgaccagaacagattggatcggaaagtaaacaaagacaaagagaaatctaaggaggaggtgaatgataaaagatacttacgatgcccagcagcaatgactgtgatgcacttaagaaagtttctcagaagtaaaatggacatacctaatactttccagattgatgtcatgtatgaggaggaacctttaaaggattattatacactaatggatattgcctacatttatacctggagaaggaatggtccacttccattgaaatacagagttcgacctacttgtaaaagaatgaagatcagtcaccagagagatggactgacaaatgctggagaactggaaagtgactctgggagtgacaaggccaacagcccagcaggaggtattccctccacctcttcttgtttgcctagccccagtactccagtgcagtctcctcatccacagtttcctcacatttccagtactatgaatggaaccagcaacagccccagcggtaaccaccaatcttcttttgccaatagacctcgaaaatcatcagtaaatgggtcatcagcaacttcttctggttgatacctgagactgttaaggaaaaaaattttaaacccctgatttatatagatatcttcatgccattacagctttctagatgctaatacatgtgactatcgtccaatttgctttcttttgtagtgacattaaatttggctataaaagatggactacatgtgatactcctatggacgttaattgaaaagaaagattgttgttataaagaattggtttcttggaaagcaggcaagactttttctctgtgttaggaaagatgggaaatggtttctgtaaccattgtttggatttggaagtactctgcagtggacataagcattgggccatagtttgttaatctcaactaacgcctacattacattctccttgatcgttcttgttattacgctgttttgtgaacctgtagaaaacaagtgctttttatcttgaaattcaaccaacggaaagaatatgcatagaataatgcattctatgtagccatgtcactgtgaataacgatttcttgcatatttagccattttgattcctgtttgatttatacttctctgttgctacgcaaaaccgatcaaagaaaagtgaacttcagttttacaatctgtatgcctaaaagcgggtactaccgtttattttactgacttgtttaaatgattcgcttttgtaagaatcagatggcattatgcttgttgtacaatgccatattggtatatgacataacaggaaacagtattgtatgatatatttataaatgctataaagaaatattgtgtttcatgcattcagaaatgattgttaaaattctcccaactggttcgacctttgcagatacccataacctatgttgagccttgcttaccagcaaagaatatttttaatgtggatatctaattctaaagtctgttccattagaagcaattggcacatctttctatactttatatacttttctccagtaatacatgtttactttaaaaattgttgcagtgaagaaaaacctttaactgagaaatatggaaaccgtcttaattttccattggctatgatggaattaatattgtattttaaaaatgcatattgatcactataattctaaaacaattttttaaataaaccagcaggttgctaaaagaaggcattttatctaaagttattttaataggtggtatagcagtaattttaaatttaagagttgcttttacagttaacaatggaatatgccttctctgctatgtctgaaaatagaagctatttattatgagcttctacaggtatttttaaatagagcaagcatgttgaatttaaaatatgaataaccccacccaacaattttcagtttattttttgctttggtcgaacttggtgtgtgttcatcacccatcagttatttgtgagggtgtttattctatatgaatattgtttcatgtttgtatgggaaaattgtagctaaacatttcattgtccccagtctgcaaaagaagcacaattctattgctttgtcttgcttatagtcattaaatcattacttttacatatattgctgttacttctgctttctttaaaaatatagtaaaggatgttttatgaagtcacaagatacatatatttttattttgacctaaatttgtacagtcccattgtaagtgttgtttctaattatagatgtaaaatgaaatttcatttgtaattggaaaaaatccaataaaaaggatattcatttagaaaatagctaagatctttaataaaaatttgatatgaaaagcacaatgtgcagaagttatggaaaacctatagaggattacaacaggtaaacgttaaagagaatacattgctgacttatagtgatgtggctaagaagtacatgctttgttgtaaaattgcttgaaagcccattgaaagatgtatctgtttatttacagtctttgaagtaaaagttaccaatgtttgccaaaaaaaagaa

SEQ ID NO: 292655 - DNA, 2684 bp, Homo sapiens
atcctcttatatataaaatttattaggcatctgatttttaaaaattacatttcactatatcgttatagctgccaatggctctaatgaagatagaggagaggttgcagatgaagataagagaattataactgatgatgagataataagcttatccattgaattctttgaccagaacagattggatcggaaagtaaacaaagacaaagagaaatctaaggaggaggtgaatgataaaagatacttacgatgcccagcagcaatgactgtgatgcacttaagaaagtttctcagaagtaaaatggacatacctaatactttccagattgatgtcatgtatgaggaggaacctttaaaggattattatacactaatggatattgcctacatttatacctggagaaggaatggtccacttccattgaaatacagagttcgacctacttgtaaaagaatgaagatcagtcaccagagagatggactgacaaatgctggagaactggaaagtgactctgggagtgacaaggccaacagcccagcaggaggtattccctccacctcttcttgtttgcctagccccagtactccagtgcagtctcctcatccacagtttcctcacatttccagtactatgaatggaaccagcaacagccccagcggtaaccaccaatcttcttttgccaatagacctcgaaaatcatcagtaaatgggtcatcagcaacttcttctggttgatacctgagactgttaaggaaaaaaattttaaacccctgatttatatagatatcttcatgccattacagctttctagatgctaatacatgtgactatcgtccaatttgctttcttttgtagtgacattaaatttggctataaaagatggactacatgtgatactcctatggacgttaattgaaaagaaagattgttgttataaagaattggtttcttggaaagcaggcaagactttttctctgtgttaggaaagatgggaaatggtttctgtaaccattgtttggatttggaagtactctgcagtggacataagcattgggccatagtttgttaatctcaactaacgcctacattacattctccttgatcgttcttgttattacgctgttttgtgaacctgtagaaaacaagtgctttttatcttgaaattcaaccaacggaaagaatatgcatagaataatgcattctatgtagccatgtcactgtgaataacgatttcttgcatatttagccattttgattcctgtttgatttatacttctctgttgctacgcaaaaccgatcaaagaaaagtgaacttcagttttacaatctgtatgcctaaaagcgggtactaccgtttattttactgacttgtttaaatgattcgcttttgtaagaatcagatggcattatgcttgttgtacaatgccatattggtatatgacataacaggaaacagtattgtatgatatatttataaatgctataaagaaatattgtgtttcatgcattcagaaatgattgttaaaattctcccaactggttcgacctttgcagatacccataacctatgttgagccttgcttaccagcaaagaatatttttaatgtggatatctaattctaaagtctgttccattagaagcaattggcacatctttctatactttatatacttttctccagtaatacatgtttactttaaaaattgttgcagtgaagaaaaacctttaactgagaaatatggaaaccgtcttaattttccattggctatgatggaattaatattgtattttaaaaatgcatattgatcactataattctaaaacaattttttaaataaaccagcaggttgctaaaagaaggcattttatctaaagttattttaataggtggtatagcagtaattttaaatttaagagttgcttttacagttaacaatggaatatgccttctctgctatgtctgaaaatagaagctatttattatgagcttctacaggtatttttaaatagagcaagcatgttgaatttaaaatatgaataaccccacccaacaattttcagtttattttttgctttggtcgaacttggtgtgtgttcatcacccatcagttatttgtgagggtgtttattctatatgaatattgtttcatgtttgtatgggaaaattgtagctaaacatttcattgtccccagtctgcaaaagaagcacaattctattgctttgtcttgcttatagtcattaaatcattacttttacatatattgctgttacttctgctttctttaaaaatatagtaaaggatgttttatgaagtcacaagatacatatatttttattttgacctaaatttgtacagtcccattgtaagtgttgtttctaattatagatgtaaaatgaaatttcatttgtaattggaaaaaatccaataaaaaggatattcatttagaaaatagctaagatctttaataaaaatttgatatgaaaagcacaatgtgcagaagttatggaaaacctatagaggattacaacaggtaaacgttaaagagaatacattgctgacttatagtgatgtggctaagaagtacatgctttgttgtaaaattgcttgaaagcccattgaaagatgtatctgtttatttacagtctttgaagtaaaagttaccaatgtttgccaaaaaaaagaa

SEQ ID NO: 292656 - DNA, 3520 bp, Homo sapiens
cctcctcccctccccccgctcgcacgacacacacggcgccccccgcccgcccgcctcccccacagcaactatgaaataatcgtagtatgagaggcagagatcggggcgagacaatggggatgtgggcgcgggagccccgttccggcttagcagcacctcccagccccgcagaataaaaccgatcgcgccccctccgcgcgcgccctcccccgagtgcggagcgggaggaggcggcggcggccgaggaggaggaggaggaggccccggaggaggaggcgttggaggtcgaggcggaggcggaggaggaggaggccgaggcgccggaggaggccgaggcgccggagcaggaggaggccggccggaggcggcatgagacgagcgtggcggccgcggctgctcggggccgcgctggttgcccattgacagcggcgtctgcagctcgcttcaagatggccgcttggctcgcattcattttctgctgaacgacttttaactttcattgtcttttccgcccgcttcgatcgcctcgcgccggctgctctttccgggattttttatcaagcagaaatgcatcgaacaacgagaatcaagatcactgagctaaatccccacctgatgtgtgtgctttgtggagggtacttcattgatgccacaaccataatagaatgtctacattccttctgtaaaacgtgtattgttcgttacctggagaccagcaagtattgtcctatttgtgatgtccaagttcacaagaccagaccactactgaatataaggtcagataaaactctccaagatattgtatacaaattagttccagggcttttcaaaaatgaaatgaagagaagaagggatttttatgcagctcatccttctgctgatgctgccaatggctctaatgaagatagaggagaggttgcagatgaagataagagaattataactgatgatgagataataagcttatccattgaattctttgaccagaacaggtaaaatctttaggcaatttattttatgctaatgttttattagattgtttcactaataaattttctctttattagattggatcggaaagtaaacaaagacaaagagaaatctaaggaggaggtgaatgataaaagatacttacgatgcccagcagcaatgactgtgatgcacttaagaaagtttctcagaagtaaaatggacatacctaatactttccagattgatgtcatgtatgaggaggaacctttaaaggattattatacactaatggatattgcctacatttatacctggagaaggaatggtccacttccattgaaatacagagttcgacctactttggaaagtgactctgggagtgacaaggccaacagcccagcaggaggtattccctccacctcttcttgtttgcctagccccagtactccagtgcagtctcctcatccacagtttcctcacatttccagtactatgaatggaaccagcaacagccccagcggtaaccaccaatcttcttttgccaatagacctcgaaaatcatcagtaaatgggtcatcagcaacttcttctggttgatacctgagactgttaaggaaaaaaattttaaacccctgatttatatagatatcttcatgccattacagctttctagatgctaatacatgtgactatcgtccaatttgctttcttttgtagtgacattaaatttggctataaaagatggactacatgtgatactcctatggacgttaattgaaaagaaagattgttgttataaagaattggtttcttggaaagcaggcaagactttttctctgtgttaggaaagatgggaaatggtttctgtaaccattgtttggatttggaagtactctgcagtggacataagcattgggccatagtttgttaatctcaactaacgcctacattacattctccttgatcgttcttgttattacgctgttttgtgaacctgtagaaaacaagtgctttttatcttgaaattcaaccaacggaaagaatatgcatagaataatgcattctatgtagccatgtcactgtgaataacgatttcttgcatatttagccattttgattcctgtttgatttatacttctctgttgctacgcaaaaccgatcaaagaaaagtgaacttcagttttacaatctgtatgcctaaaagcgggtactaccgtttattttactgacttgtttaaatgattcgcttttgtaagaatcagatggcattatgcttgttgtacaatgccatattggtatatgacataacaggaaacagtattgtatgatatatttataaatgctataaagaaatattgtgtttcatgcattcagaaatgattgttaaaattctcccaactggttcgacctttgcagatacccataacctatgttgagccttgcttaccagcaaagaatatttttaatgtggatatctaattctaaagtctgttccattagaagcaattggcacatctttctatactttatatacttttctccagtaatacatgtttactttaaaaattgttgcagtgaagaaaaacctttaactgagaaatatggaaaccgtcttaattttccattggctatgatggaattaatattgtattttaaaaatgcatattgatcactataattctaaaacaattttttaaataaaccagcaggttgctaaaagaaggcattttatctaaagttattttaataggtggtatagcagtaattttaaatttaagagttgcttttacagttaacaatggaatatgccttctctgctatgtctgaaaatagaagctatttattatgagcttctacaggtatttttaaatagagcaagcatgttgaatttaaaatatgaataaccccacccaacaattttcagtttattttttgctttggtcgaacttggtgtgtgttcatcacccatcagttatttgtgagggtgtttattctatatgaatattgtttcatgtttgtatgggaaaattgtagctaaacatttcattgtccccagtctgcaaaagaagcacaattctattgctttgtcttgcttatagtcattaaatcattacttttacatatattgctgttacttctgctttctttaaaaatatagtaaaggatgttttatgaagtcacaagatacatatatttttattttgacctaaatttgtacagtcccattgtaagtgttgtttctaattatagatgtaaaatgaaatttcatttgtaattggaaaaaatccaataaaaaggatattcatttagaaaatagctaagatctttaataaaaatttgatatgaaaagcacaatgtgcagaagttatggaaaacctatagaggattacaacaggtaaacgttaaagagaatacattgctgacttatagtgatgtggctaagaagtacatgctttgttgtaaaattgcttgaaagcccattgaaagatgtatctgtttatttacagtctttgaagtaaaagttaccaatgtttgccaaaaaaaagaa

SEQ ID NO: 292657 - DNA, 911 bp, Homo sapiens
cttgaaatctgagctgttttaatatttctaaataatagctttcctattataccaaaagaatggaagttttagtttgtacaggaagaaaaataattggaactgaattgagcagtaggcgtgagaatgtggcaggaggtaaatggatgctacaagcaaaatgactttccctcccattgcttgagttcctagcaaaataaagtgtgcaaaatgatgccacttgatttttcaggttctcaaattaaggtacatttctcaatggattgatacccagccttctaggggaaaatgttttggttttactaacttgacattaagcaaggtggttttagtaaataaaatagctttgaatgataatattttgttttactacacaatatatttttagtcaatcagaacaagaaacattttagtggtaaagttattgcaactaattttttaatacatgcttactcaaagaatagactattgtgatttctaatcacagtgattcttttctcccaaattaagatttggtttgatttacaggtaaacagtgttgacctcagagctgctagtcatgagcaggcagcagctgcattgaaaaatgctggccaggctgtcacaattgttgcacaatatcgacctgaaggtaataacattcttattgtctatagttattgcttattttagtttttaaaattcttcctctttaatatttaataatgtttaacttccaagctaaacttccttttttgtgctttttttctgatttgctaatccagtatttgtttagtctgaacctagttctttttccagatcaaaagttgtttgtttttttggttttttttggtttttgttttttgtttgttgagacggggttccactcttactgcccaggctggagtgcagtggtgcgaactcagctcaccgca

SEQ ID NO: 292658 - DNA, 3046 bp, Homo sapiens
gttggaaacggcactgctgagtgaggttgaggggtgtctcggtatgtgcgccttggatctggtgtaggcgaggtcacgcctctcttcagacagcccgagccttcccggcctggcgcgtttagttcggaactgcgggacgccggtgggctagggcaaggtgtgtgccctcttcctgattctggagaaaaatgccggtccggaagcaagatacccagagagcattgcaccttttggaggaatatcgttcaaaactaagccaaactgaagacagacagctcagaagttccatagaacgggttattaacatatttcagagcaacctctttcaggctttaatagatattcaagaattttatgaagtgaccttactggataatccaaaatgtatagatcgttcaaagccgtctgaaccaattcaacctgtgaatacttgggagatttccagccttccaagctctactgtgacttcagagacactgccaagcagccttagccctagtgtagagaaatacaggtatcaggatgaagatacacctcctcaagagcatatttccccacaaatcacaaatgaagtgataggtccagaattggttcatgtctcagagaagaacttatcagagattgagaatgtccatggatttgtttctcattctcatatttcaccaataaagccaacagaagctgttcttccctctcctcccactgtccctgtgatccctgtcctgccagtccctgctgagaatactgtcatcctacccaccataccacaggcaaatcctcccccagtactggtcaacacagatagcttggaaacaccaacttacgttaatggcacagatgcagattatgaatatgaagaaatcacacttgaaaggggaaattcagggcttggtttcagcattgcaggaggtacggacaacccacacattggagatgactcaagtattttcattaccaaaattatcacagggggagcagccgcccaagatggaagattgcgggtcaatgactgtatattacgagtaaatgaagtagatgttcgtgatgtaacacatagcaaagcagttgaagcgttgaaagaagcagggtctattgtacgcttgtatgtaaaaagaaggaaaccagtgtcagaaaaaataatggaaataaagctcattaaaggtcctaaaggtcttgggtttagcattgctggaggtgttggaaatcagcatattcctggggataatagcatctatgtaaccaaaataattgaaggaggtgcagcacataaggatggcaaacttcagattggagataaacttttagcagtgaataacgtatgtttagaagaagttactcatgaagaagcagtaactgccttaaagaacacatctgattttgtttatttgaaagtggcaaaacccacaagtatgtatatgaatgatggctatgcaccacctgatatcaccaactcttcttctcagcctgttgataaccatgttagcccatcttccttcttgggccagacaccagcatctccagccagatactccccagtttctaaagcagtacttggagatgatgaaattacaagggaacctagaaaagttgttcttcatcgtggctcaacgggccttggtttcaacattgtaggaggagaagatggagaaggaatatttatttcctttatcttagccggaggacctgctgatctaagtggagagctcagaaaaggagatcgtattatatcggtaaacagtgttgacctcagagctgctagtcatgagcaggcagcagctgcattgaaaaatgctggccaggctgtcacaattgttgcacaatatcgacctgaagaatacagtcgttttgaagctaaaatacatgatttacgggagcagatgatgaatagtagtattagttcagggtcaggttctcttcgaactagccagaagcgatccctctatgtcagagccctttttgattatgacaagactaaagacagtgggcttcccagtcagggactgaacttcaaatttggagatatcctccatgttattaatgcttctgatgatgaatggtggcaagccaggcaggttacaccagatggtgagagcgatgaggtcggagtgattcccagtaaacgcagagttgagaagaaagaacgagcccgattaaaaacagtgaaattcaattctaaaacgagagataaagggcagtcattcaatgacaagcgtaaaaagaacctcttttcccgaaaattccccttctacaagaacaaggaccagagtgagcaggaaacaagtgatgctgaccagcatgtaacttctaatgccagcgatagtgaaagtagttaccgtggtcaagaagaatacgtcttatcttatgaaccagtgaatcaacaagaagttaattatactcgaccagtgatcatattgggacctatgaaagacaggataaatgatgacttgatctcagaatttcctgacaaatttggatcctgtgttcctcatacaactagaccaaaacgagattatgaggtagatggaagagattatcattttgtgacttcaagagagcagatggaaaaagatatccaggaacataaattcattgaagctggccagtataacaatcatctatatggaacaagtgttcagtctgtacgagaagtagcaggaaagggcaaacactgtatccttgatgtgtctggaaatgccataaagagattacagattgcacagctttaccctatctccatttttattaaacccaaatccatggaaaatatcatggaaatgaataagcgtctaacagaagaacaagccagaaaaacatttgagagagccatgaaactggaacaggagtttactgaacatttcacagctattgtacagggggatacgctggaagacatttacaaccaagtgaaacagatcatagaagaacaatctggttcttacatctgggttccggcaaaagaaaagctatgaaaactcatgtttctctgtttctcttttccacaattccattttctttggcatctctttgccctttcctctggaaaaaa

SEQ ID NO: 292659 - DNA, 2980 bp, Homo sapiens
gttggaaacggcactgctgagtgaggttgaggggtgtctcggtatgtgcgccttggatctggtgtaggcgaggtcacgcctctcttcagacagcccgagccttcccggcctggcgcgtttagttcggaactgcgggacgccggtgggctagggcaaggtgtgtgccctcttcctgattctggagaaaaatgccggtccggaagcaagatacccagagagcattgcaccttttggaggaatatcgttcaaaactaagccaaactgaagacagacagctcagaagttccatagaacgggttattaacatatttcagagcaacctctttcaggctttaatagatattcaagaattttatgaagtgaccttactggataatccaaaatgtatagatcgttcaaagccgtctgaaccaattcaacctgtgaatacttgggagatttccagccttccaagctctactgtgacttcagagacactgccaagcagccttagccctagtgtagagaaatacaggtatcaggatgaagatacacctcctcaagagcatatttccccacaaatcacaaatgaagtgataggtccagaattggttcatgtctcagagaagaacttatcagagattgagaatgtccatggatttgtttctcattctcatatttcaccaataaagccaacagaagctgttcttccctctcctcccactgtccctgtgatccctgtcctgccagtccctgctgagaatactgtcatcctacccaccataccacaggcaaatcctcccccagtactggtcaacacagatagcttggaaacaccaacttacgttaatggcacagatgcagattatgaatatgaagaaatcacacttgaaaggggaaattcagggcttggtttcagcattgcaggaggtacggacaacccacacattggagatgactcaagtattttcattaccaaaattatcacagggggagcagccgcccaagatggaagattgcgggtcaatgactgtatattacgagtaaatgaagtagatgttcgtgatgtaacacatagcaaagcagttgaagcgttgaaagaagcagggtctattgtacgcttgtatgtaaaaagaaggaaaccagtgtcagaaaaaataatggaaataaagctcattaaaggtcctaaaggtcttgggtttagcattgctggaggtgttggaaatcagcatattcctggggataatagcatctatgtaaccaaaataattgaaggaggtgcagcacataaggatggcaaacttcagattggagataaacttttagcagtgaataacgtatgtttagaagaagttactcatgaagaagcagtaactgccttaaagaacacatctgattttgtttatttgaaagtggcaaaacccacaagtatgtatatgaatgatggctatgcaccacctgatatcaccaactcttcttctcagcctgttgataaccatgttagcccatcttccttcttgggccagacaccagcatctccagccagatactccccagtttctaaagcagtacttggagatgatgaaattacaagggaacctagaaaagttgttcttcatcgtggctcaacgggccttggtttcaacattgtaggaggagaagatggagaaggaatatttatttcctttatcttagccggaggacctgctgatctaagtggagagctcagaaaaggagatcgtattatatcggtaaacagtgttgacctcagagctgctagtcatgagcaggcagcagctgcattgaaaaatgctggccaggctgtcacaattgttgcacaatatcgacctgaagaatacagtcgttttgaagctaaaatacatgatttacgggagcagatgatgaatagtagtattagttcagggtcaggttctcttcgaactagccagaagcgatccctctatgtcagagccctttttgattatgacaagactaaagacagtgggcttcccagtcagggactgaacttcaaatttggagatatcctccatgttattaatgcttctgatgatgaatggtggcaagccaggcaggttacaccagatggtgagagcgatgaggtcggagtgattcccagtaaacgcagagttgagaagaaagaacgagcccgattaaaaacagtgaaattcaattctaaaacgagagataaagggcagtcattcaatgacaagcgtaaaaagaacctctagcatgtaacttctaatgccagcgatagtgaaagtagttaccgtggtcaagaagaatacgtcttatcttatgaaccagtgaatcaacaagaagttaattatactcgaccagtgatcatattgggacctatgaaagacaggataaatgatgacttgatctcagaatttcctgacaaatttggatcctgtgttcctcatacaactagaccaaaacgagattatgaggtagatggaagagattatcattttgtgacttcaagagagcagatggaaaaagatatccaggaacataaattcattgaagctggccagtataacaatcatctatatggaacaagtgttcagtctgtacgagaagtagcaggaaagggcaaacactgtatccttgatgtgtctggaaatgccataaagagattacagattgcacagctttaccctatctccatttttattaaacccaaatccatggaaaatatcatggaaatgaataagcgtctaacagaagaacaagccagaaaaacatttgagagagccatgaaactggaacaggagtttactgaacatttcacagctattgtacagggggatacgctggaagacatttacaaccaagtgaaacagatcatagaagaacaatctggttcttacatctgggttccggcaaaagaaaagctatgaaaactcatgtttctctgtttctcttttccacaattccattttctttggcatctctttgccctttcctctggaaaaaa

SEQ ID NO: 292660 - DNA, 1061 bp, Homo sapiens
gtttctgagctgcttttcttttcccctgtaggttaatggcacagatgcagattatgaatatgaagaaatcacacttgaaaggggaaattcagggcttggtttcagcattgcaggaggtacggacaacccacacattggagatgactcaagtattttcattaccaaaattatcacagggggagcagccgcccaagatggaagattgcgggtcaatgactgtatattacgagtaaatgaagtagatgttcgtgatgtaacacatagcaaagcagttgaagcgttgaaagaagcagggtctattgtacgcttgtatgtaaaaagaaggaaaccagtgtcagaaaaaataatggaaataaagctcattaaaggtcctaaaggtcttgggtttagcattgctggaggtgttggaaatcagcatattcctggggataatagcatctatgtaaccaaaataattgaaggaggtgcagcacataaggatggcaaacttcagattggagataaacttttagcagtaagtataagaaatctattgtcttttaaatcattttgtagtctgtttatttttctgatagatactggaatttctccataccaaaaaggtctaaatgatgtttaaattagcaaatactagccttgctgtatcaaatcctaaaaaatgattcttggtaattctttatttgtcatttctcttttctctgctagctcctcctcccttttccttttattcctttgttgttgttgagggcttgtatgcacagagtgtttcatcataatccttaggtttataaaacaatgtcatcatttgtttatgcatgacccttttttattttacttcacttaatagtataatgaaacctagtaattacccagcccaagaattagaacatcaaccattttgtgtttcttattcctttgcttcttaaaaattgtttaatcaggccgggtgtggtggctcacacctgtctgtaatcttagcactttgggaggctgaggtaggtagattgcttgagcccaggagtttaagaccagcctgggcagcatggcaaaaccctgtctct

SEQ ID NO: 292661 - DNA, 555 bp, Homo sapiens
attacatattacttttgttatacatatagctcatgctcggagagaagtattctttcatgtaggttcgccctaccccacccccccattttagtttcatagttatggagaatttcaaggtgcttattagtactccagaaaacatttttaaatatgtattttataaatgaatgttagtcagtgatgctatctttaagtctaaaaattcccacgatggaaataactattaaatttcaaataccacacactgaaatattttcagacacttgtttttaaatattagttggtatagaaacagtgcatttccagcactttggaaggctgaggtgggtggatcacttgaggtcaagagttcaagacaggcctggccaacatggtgaaatcccatctctactgaaaatacaaaaaaattaaccaggcatgatgacacatgcctgcagtcccagctactcaggaggctgagacaggagaatcacttgagcctgggaggcggaagttgcagtgagcctagattacgccactgcactccagcctgggcgacagcaataactccatttc

SEQ ID NO: 292662 - DNA, 411 bp, Homo sapiens
attacatattacttttgttatacatatagctcatgctcggagagaagtattctttcatgtaggttcgccctaccccacccccccattttagtttcatagttatggagaatttcaaggtgcttattagtactccagaaaacatttttaaatatgtattttataaatgaatgttagtcagtgatgctatctttaagtctaaaaattcccacgatggaaataactattaaatttcaaataccacacactgaaatattttcagacacttgtttttaaatattagttggtatagaaacagtgcatttccagcactttggaaggctgaggtgggtggatcacttgaggttgaattggttcagacggctttgaaagtgactcaggactcaaatttaatagaagaagttggcccgggaa

SEQ ID NO: 292663 - DNA, 611 bp, Homo sapiens
gggagctgctccgagtctggccggggcgcaccccagttccgagcgcacgccgctcaccggaactttgtggcggcgccgcaggtgtgggggcccgcggaggtgtgcatgcggggcgcgagggcgtcgcggagagcggccgctgccctgtccggcccccgctggagcagcccggaggcagcgagcaaggagaaaggtgtgtgccctcttcctgattctggagaaaaatgccggtccggaagcaagatacccagagagcattgcaccttttggaggaatatcgttcaaaactaagccaaactgaagacagacagctcagaagttccatagaacgggttattaacatatttcagagcaacctctttcaggctttaatagatattcaagaattttatgaagtgaccttactggataatccaaaatgtatagatcgttcaaagccgtctgaaccaattcaacctgtgaatacttgggagatttccagccttccaagctctactgtgacttcagagacactgccaagcagccttagccctagtgtagaggtgagataaaaaatgtgttctgaagctgttttttggtgatcaatttatttatgttactatgtttcttta

SEQ ID NO: 292664 - DNA, 643 bp, Homo sapiens
  misc_feature (613)..(613): n is a, c, g, or t
  misc_feature (621)..(621): n is a, c, g, or t
gtccagttttttggctgatgagtaaatcttctctaccaaattctgatatataaaggagtgcatataaattacacattaatcactcataaatggaatactgattggcttgtttcgtgtttgaagtatttttcactttgtttattttgaagcttcttctcagcctgttgataaccatgttagcccatcttccttcttgggccagacaccagcatctccagccagatactccccagtttctaaagcagtacttggagatgatgaaattacaagaaggaagttaacatttatccttcttacataaaatcaactattaaattgaattttaatcagccatgtaagatagccacaatttttaggactaaaaaattttattgacagttagtgagcttaaaggttaatttttttccataggaggattcattgaagagcctgaaatatacatgttttatttttacaaataaattaccactccttttttaaaattaatactgcttttctttgaggcttggtaaattgtccttaggaattagcttagtaaaactaagttaagaaaattcttatgcatattttaaagtaacattttatatgttccttatctaatatataccatagntttaacangaaggtttactctgttgcccaa

SEQ ID NO: 292665 - DNA, 3296 bp, Homo sapiens
  misc_feature (3)..(3): n is a, c, g, or t
  misc_feature (5)..(5): n is a, c, g, or t
ggnangagggaggttccgggggtggggcgtgcggcagcaactgggcgagcgggccggggggccgcggcgagcgaggaggcggcgcggccgagaaggaggacgaggccgcgggggtgcggcggcccaggggagctcctcccccgtcccttcaccccctccgctcggctccgcgggccccgggcggggcgggggtacgtggagcggggccgggctggggagctgctccgagtctggccggggcgcaccccagttccgagcgcacgccgctcaccggaactttgtggcggcgccgcaggtgtgggggcccgcggaggtgtgcatgcggggcgcgagggcgtcgcggagagcggccgctgccctgtccggcccccgctggagcagcccggaggcagcgagcaaggagaaaggtgtgtgccctcttcctgattctggagaaaaatgccggtccggaagcaagatacccagagagcattgcaccttttggaggaatatcgttcaaaactaagccaaactgaagacagacagctcagaagttccatagaacgggttattaacatatttcagagcaacctctttcaggctttaatagatattcaagaattttatgaagtgaccttactggataatccaaaatgtatagatcgttcaaagccgtctgaaccaattcaacctgtgaatacttgggagatttccagccttccaagctctactgtgacttcagagacactgccaagcagccttagccctagtgtagagaaatacaggtatcaggatgaagatacacctcctcaagagcatatttccccacaaatcacaaatgaagtgataggtccagaattggttcatgtctcagagaagaacttatcagagattgagaatgtccatggatttgtttctcattctcatatttcaccaataaagccaacagaagctgttcttccctctcctcccactgtccctgtgatccctgtcctgccagtccctgctgagaatactgtcatcctacccaccataccacaggcaaatcctcccccagtactggtcaacacagatagcttggaaacaccaacttacgttaatggcacagatgcagattatgaatatgaagaaatcacacttgaaaggggaaattcagggcttggtttcagcattgcaggaggtacggacaacccacacattggagatgactcaagtattttcattaccaaaattatcacagggggagcagccgcccaagatggaagattgcgggtcaatgactgtatattacgagtaaatgaagtagatgttcgtgatgtaacacatagcaaagcagttgaagcgttgaaagaagcagggtctattgtacgcttgtatgtaaaaagaaggaaaccagtgtcagaaaaaataatggaaataaagctcattaaaggtcctaaaggtcttgggtttagcattgctggaggtgttggaaatcagcatattcctggggataatagcatctatgtaaccaaaataattgaaggaggtgcagcacataaggatggcaaacttcagattggagataaacttttagcagtgaataacgtatgtttagaagaagttactcatgaagaagcagtaactgccttaaagaacacatctgattttgtttatttgaaagtggcaaaacccacaagtatgtatatgaatgatggctatgcaccacctgatatcaccaactcttcttctcagcctgttgataaccatgttagcccatcttccttcttgggccagacaccagcatctccagccagatactccccagtttctaaagcagtacttggagatgatgaaattacaagggaacctagaaaagttgttcttcatcgtggctcaacgggccttggtttcaacattgtaggaggagaagatggagaaggaatatttatttcctttatcttagccggaggacctgctgatctaagtggagagctcagaaaaggagatcgtattatatcggtaaacagtgttgacctcagagctgctagtcatgagcaggcagcagctgcattgaaaaatgctggccaggctgtcacaattgttgcacaatatcgacctgaagaatacagtcgttttgaagctaaaatacatgatttacgggagcagatgatgaatagtagtattagttcagggtcaggttctcttcgaactagccagaagcgatccctctatgtcagagccctttttgattatgacaagactaaagacagtgggcttcccagtcagggactgaacttcaaatttggagatatcctccatgttattaatgcttctgatgatgaatggtggcaagccaggcaggttacaccagatggtgagagcgatgaggtcggagtgattcccagtaaacgcagagttgagaagaaagaacgagcccgattaaaaacagtgaaattcaattctaaaacgagagataaagggcagtcattcaatgacaagcgtaaaaagaacctcttttcccgaaaattccccttctacaagaacaaggaccagagtgagcaggaaacaagtgatgctgaccagcatgtaacttctaatgccagcgatagtgaaagtagttaccgtggtcaagaagaatacgtcttatcttatgaaccagtgaatcaacaagaagttaattatactcgaccagtgatcatattgggacctatgaaagacaggataaatgatgacttgatctcagaatttcctgacaaatttggatcctgtgttcctcatacaactagaccaaaacgagattatgaggtagatggaagagattatcattttgtgacttcaagagagcagatggaaaaagatatccaggaacataaattcattgaagctggccagtataacaatcatctatatggaacaagtgttcagtctgtacgagaagtagcaggaaagggcaaacactgtatccttgatgtgtctggaaatgccataaagagattacagattgcacagctttaccctatctccatttttattaaacccaaatccatggaaaatatcatggaaatgaataagcgtctaacagaagaacaagccagaaaaacatttgagagagccatgaaactggaacaggagtttactgaacatttcacagctattgtacagggggatacgctggaagacatttacaaccaagtgaaacagatcatagaagaacaatctggttcttacatctgggttccggcaaaagaaaagctatgaaaactcatgtttctctgtttctcttttccacaattccattttctttggcatctctttgccctttcctctggaaaaaa

SEQ ID NO: 292666 - DNA, 2027 bp, Homo sapiens
  misc_feature (3)..(3): n is a, c, g, or t
  misc_feature (5)..(5): n is a, c, g, or t
ggnangagggaggttccgggggtggggcgtgcggcagcaactgggcgagcgggccggggggccgcggcgagcgaggaggcggcgcggccgagaaggaggacgaggccgcgggggtgcggcggcccaggggagctcctcccccgtcccttcaccccctccgctcggctccgcgggccccgggcggggcgggggtacgtggagcggggccgggctggggagctgctccgagtctggccggggcgcaccccagttccgagcgcacgccgctcaccggaactttgtggcggcgccgcaggtgtgggggcccgcggaggtgtgcatgcggggcgcgagggcgtcgcggagagcggccgctgccctgtccggcccccgctggagcagcccggaggcagcgagcaaggagaaaggtgtgtgccctcttcctgattctggagaaaaatgccggtccggaagcaagatacccagagagcattgcaccttttggaggaatatcgttcaaaactaagccaaactgaagacagacagctcagaagttccatagaacgggttattaacatatttcagagcaacctctttcaggctttaatagatattcaagaattttatgaagtgaccttactggataatccaaaatgtatagatcgttcaaagccgtctgaaccaattcaacctgtgaatacttgggagatttccagccttccaagctctactgtgacttcagagacactgccaagcagccttagccctagtgtagagaaatacaggtatcaggatgaagatacacctcctcaagagcatatttccccacaaatcacaaatgaagtgataggtccagaattggttcatgtctcagagaagaacttatcagagattgagaatgtccatggatttgtttctcattctcatatttcaccaataaagccaacagaagctgttcttccctctcctcccactgtccctgtgatccctgtcctgccagtccctgctgagaatactgtcatcctacccaccataccacaggcaaatcctcccccagtactggtcaacacagatagcttggaaacaccaacttacgttaatggcacagatgcagattatgaatatgaagaaatcacacttgaaaggggaaattcagggcttggtttcagcattgcaggaggtacggacaacccacacattggagatgactcaagtattttcattaccaaaattatcacagggggagcagccgcccaagatggaagattgcgggtcaatgactgtatattacgagtaaatgaagtagatgttcgtgatgtaacacatagcaaagcagttgaagcgttgaaagaagcagggtctattgtacgcttgtatgtaaaaagaaggaaaccagtgtcagaaaaaataatggaaataaagctcattaaaggtcctaaaggtcttgggtttagcattgctggaggtgttggaaatcagcatattcctggggataatagcatctatgtaaccaaaataattgaaggaggtgcagcacataaggatggcaaacttcagattggagataaacttttagcagtgaataacgtatgtttagaagaagttactcatgaagaagcagtaactgccttaaagaacacatctgattttgtttatttgaaagtggcaaaacccacaagtatgtatatgaatgatggctatgcaccacctgatatcaccaactcttcttctcagcctgttgataaccatgttagcccatcttccttcttgggccagacaccagcatctccagccagatactccccagtttctaaagcagtacttggagatgatgaaattacaagggaacctagaaaagttgttcttcatcgtggctcaacgggccttggtttcaacattgtaggaggagaagatggagaaggaatatttatttcctttatcttagccggaggacctgctgatctaagtggagagctcagaaaaggagatcgtattatatcgggtaaacagtgttgacctcgagagctggaagacacactggacagcac

SEQ ID NO: 292667 - DNA, 2027 bp, Homo sapiens
  misc_feature (3)..(3): n is a, c, g, or t
  misc_feature (5)..(5): n is a, c, g, or t
ggnangagggaggttccgggggtggggcgtgcggcagcaactgggcgagcgggccggggggccgcggcgagcgaggaggcggcgcggccgagaaggaggacgaggccgcgggggtgcggcggcccaggggagctcctcccccgtcccttcaccccctccgctcggctccgcgggccccgggcggggcgggggtacgtggagcggggccgggctggggagctgctccgagtctggccggggcgcaccccagttccgagcgcacgccgctcaccggaactttgtggcggcgccgcaggtgtgggggcccgcggaggtgtgcatgcggggcgcgagggcgtcgcggagagcggccgctgccctgtccggcccccgctggagcagcccggaggcagcgagcaaggagaaaggtgtgtgccctcttcctgattctggagaaaaatgccggtccggaagcaagatacccagagagcattgcaccttttggaggaatatcgttcaaaactaagccaaactgaagacagacagctcagaagttccatagaacgggttattaacatatttcagagcaacctctttcaggctttaatagatattcaagaattttatgaagtgaccttactggataatccaaaatgtatagatcgttcaaagccgtctgaaccaattcaacctgtgaatacttgggagatttccagccttccaagctctactgtgacttcagagacactgccaagcagccttagccctagtgtagagaaatacaggtatcaggatgaagatacacctcctcaagagcatatttccccacaaatcacaaatgaagtgataggtccagaattggttcatgtctcagagaagaacttatcagagattgagaatgtccatggatttgtttctcattctcatatttcaccaataaagccaacagaagctgttcttccctctcctcccactgtccctgtgatccctgtcctgccagtccctgctgagaatactgtcatcctacccaccataccacaggcaaatcctcccccagtactggtcaacacagatagcttggaaacaccaacttacgttaatggcacagatgcagattatgaatatgaagaaatcacacttgaaaggggaaattcagggcttggtttcagcattgcaggaggtacggacaacccacacattggagatgactcaagtattttcattaccaaaattatcacagggggagcagccgcccaagatggaagattgcgggtcaatgactgtatattacgagtaaatgaagtagatgttcgtgatgtaacacatagcaaagcagttgaagcgttgaaagaagcagggtctattgtacgcttgtatgtaaaaagaaggaaaccagtgtcagaaaaaataatggaaataaagctcattaaaggtcctaaaggtcttgggtttagcattgctggaggtgttggaaatcagcatattcctggggataatagcatctatgtaaccaaaataattgaaggaggtgcagcacataaggatggcaaacttcagattggagataaacttttagcagtgaataacgtatgtttagaagaagttactcatgaagaagcagtaactgccttaaagaacacatctgattttgtttatttgaaagtggcaaaacccacaagtatgtatatgaatgatggctatgcaccacctgatatcaccaactatggagtttcgctcttgttgcccaggctggagtgcagtggcgtgatctcggatcaccacaacctctgcctcccagattcaagccattctcttgcctcagtagctgggattacaggcatgcgccaccacgccctgctaattttgtatttttagtagagacggggtttctccatgtttggtcaggctggtctcgaactcccgacctcagatgatccacccacttcggcctcccaaagcgctgggattataggcatgagccaccgagcccagctgattatgttactttttcccccatctgttattgaactaataaagcattatgaaaa

SEQ ID NO: 292668 - DNA, 1950 bp, Homo sapiens
  misc_feature (3)..(3): n is a, c, g, or t
  misc_feature (5)..(5): n is a, c, g, or t
ggnangagggaggttccgggggtggggcgtgcggcagcaactgggcgagcgggccggggggccgcggcgagcgaggaggcggcgcggccgagaaggaggacgaggccgcgggggtgcggcggcccaggggagctcctcccccgtcccttcaccccctccgctcggctccgcgggccccgggcggggcgggggtacgtggagcggggccgggctggggagctgctccgagtctggccggggcgcaccccagttccgagcgcacgccgctcaccggaactttgtggcggcgccgcaggtgtgggggcccgcggaggtgtgcatgcggggcgcgagggcgtcgcggagagcggccgctgccctgtccggcccccgctggagcagcccggaggcagcgagcaaggagaaaggtgtgtgccctcttcctgattctggagaaaaatgccggtccggaagcaagatacccagagagcattgcaccttttggaggaatatcgttcaaaactaagccaaactgaagacagacagctcagaagttccatagaacgggttattaacatatttcagagcaacctctttcaggctttaatagatattcaagaattttatgaagtgaccttactggataatccaaaatgtatagatcgttcaaagccgtctgaaccaattcaacctgtgaatacttgggagatttccagccttccaagctctactgtgacttcagagacactgccaagcagccttagccctagtgtagagaaatacaggtatcaggatgaagatacacctcctcaagagcatatttccccacaaatcacaaatgaagtgataggtccagaattggttcatgtctcagagaagaacttatcagagattgagaatgtccatggatttgtttctcattctcatatttcaccaataaagccaacagaagctgttcttccctctcctcccactgtccctgtgatccctgtcctgccagtccctgctgagaatactgtcatcctacccaccataccacaggcaaatcctcccccagtactggtcaacacagatagcttggaaacaccaacttacgttaatggcacagatgcagattatgaatatgaagaaatcacacttgaaaggggaaattcagggcttggtttcagcattgcaggaggtacggacaacccacacattggagatgactcaagtattttcattaccaaaattatcacagggggagcagccgcccaagatggaagattgcgggtcaatgactgtatattacgagtaaatgaagtagatgttcgtgatgtaacacatagcaaagcagttgaagcgttgaaagaagcagggtctattgtacgcttgtatgtaaaaagaaggaaaccagtgtcagaaaaaataatggaaataaagctcattaaaggtcctaaaggtcttgggtttagcattgctggaggtgttggaaatcagcatattcctggggataatagcatctatgtaaccaaaataattgaaggaggtgcagcacataaggatggcaaacttcagattggagataaacttttagcagtgaataacgtatgtttagaagaagttactcatgaagaagcagtaactgccttaaagaacacatctgattttgtttatttgaaagtggcaaaacccacaagtatgtatatgaatgatggctatgcaccacctgatatcaccaactcttcttctcagcctgttgataaccatgttagcccatcttccttcttgggccagacaccagcatctccagccagatactccccagtttctaaagcagtacttggagatgatgaaattacaaggagaagatggagaaggaatatttatttcctttatcttagccggaggacctgctgatctaagtggagagctcagaaaaggagatcgtattatatcggtaagacacgttagtcaagatcacgtttttgt

SEQ ID NO: 292669 - DNA, 2104 bp, Homo sapiens
  misc_feature (3)..(3): n is a, c, g, or t
  misc_feature (5)..(5): n is a, c, g, or t
ggnangagggaggttccgggggtggggcgtgcggcagcaactgggcgagcgggccggggggccgcggcgagcgaggaggcggcgcggccgagaaggaggacgaggccgcgggggtgcggcggcccaggggagctcctcccccgtcccttcaccccctccgctcggctccgcgggccccgggcggggcgggggtacgtggagcggggccgggctggggagctgctccgagtctggccggggcgcaccccagttccgagcgcacgccgctcaccggaactttgtggcggcgccgcaggtgtgggggcccgcggaggtgtgcatgcggggcgcgagggcgtcgcggagagcggccgctgccctgtccggcccccgctggagcagcccggaggcagcgagcaaggagaaaggtgtgtgccctcttcctgattctggagaaaaatgccggtccggaagcaagatacccagagagcattgcaccttttggaggaatatcgttcaaaactaagccaaactgaagacagacagctcagaagttccatagaacgggttattaacatatttcagagcaacctctttcaggctttaatagatattcaagaattttatgaagtgaccttactggataatccaaaatgtatagatcgttcaaagccgtctgaaccaattcaacctgtgaatacttgggagatttccagccttccaagctctactgtgacttcagagacactgccaagcagccttagccctagtgtagagaaatacaggtatcaggatgaagatacacctcctcaagagcatatttccccacaaatcacaaatgaagtgataggtccagaattggttcatgtctcagagaagaacttatcagagattgagaatgtccatggatttgtttctcattctcatatttcaccaataaagccaacagaagctgttcttccctctcctcccactgtccctgtgatccctgtcctgccagtccctgctgagaatactgtcatcctacccaccataccacaggcaaatcctcccccagtactggtcaacacagatagcttggaaacaccaacttacgttaatggcacagatgcagattatgaatatgaagaaatcacacttgaaaggggaaattcagggcttggtttcagcattgcaggaggtacggacaacccacacattggagatgactcaagtattttcattaccaaaattatcacagggggagcagccgcccaagatggaagattgcgggtcaatgactgtatattacgagtaaatgaagtagatgttcgtgatgtaacacatagcaaagcagttgaagcgttgaaagaagcagggtctattgtacgcttgtatgtaaaaagaaggaaaccagtgtcagaaaaaataatggaaataaagctcattaaaggtcctaaaggtcttgggtttagcattgctggaggtgttggaaatcagcatattcctggggataatagcatctatgtaaccaaaataattgaaggaggtgcagcacataaggatggcaaacttcagattggagataaacttttagcagtaagtataagaaatctattgtcttttaaatcattttgtagtctgtttatttttctgatagatactggaatttctccataccaaaaaggtctaaatgatgtttaaattagcaaatactagccttgctgtatcaaatcctaaaaaatgattcttggtaattctttatttgtcatttctcttttctctgctagctcctcctcccttttccttttattcctttgttgttgttgagggcttgtatgcacagagtgtttcatcataatccttaggtttataaaacaatgtcatcatttgtttatgcatgacccttttttattttacttcacttaatagtataatgaaacctagtaattacccagcccaagaattagaacatcaaccattttgtgtttcttattcctttgcttcttaaaaattgtttaatcaggccgggtgtggtggctcacacctgtctgtaatcttagcactttgggaggctgaggtaggtagattgcttgagcccaggagtttaagaccagcctgggcagcatggcaaaaccctgtctct

SEQ ID NO: 292670 - DNA, 3199 bp, Homo sapiens
  misc_feature (3)..(3): n is a, c, g, or t
  misc_feature (5)..(5): n is a, c, g, or t
ggnangagggaggttccgggggtggggcgtgcggcagcaactgggcgagcgggccggggggccgcggcgagcgaggaggcggcgcggccgagaaggaggacgaggccgcgggggtgcggcggcccaggggagctcctcccccgtcccttcaccccctccgctcggctccgcgggccccgggcggggcgggggtacgtggagcggggccgggctggggagctgctccgagtctggccggggcgcaccccagttccgagcgcacgccgctcaccggaactttgtggcggcgccgcaggtgtgggggcccgcggaggtgtgcatgcggggcgcgagggcgtcgcggagagcggccgctgccctgtccggcccccgctggagcagcccggaggcagcgagcaaggagaaaggtgtgtgccctcttcctgattctggagaaaaatgccggtccggaagcaagatacccagagagcattgcaccttttggaggaatatcgttcaaaactaagccaaactgaagacagacagctcagaagttccatagaacgggttattaacatatttcagagcaacctctttcaggctttaatagatattcaagaattttatgaagtgaccttactggataatccaaaatgtatagatcgttcaaagccgtctgaaccaattcaacctgtgaatacttgggagatttccagccttccaagctctactgtgacttcagagacactgccaagcagccttagccctagtgtagagaaatacaggtatcaggatgaagatacacctcctcaagagcatatttccccacaaatcacaaatgaagtgataggtccagaattggttcatgtctcagagaagaacttatcagagattgagaatgtccatggatttgtttctcattctcatatttcaccaataaaggcaaatcctccccccagtactggtcaacacagatagcttggaaacacccaacttacgttaatggcacagatgcagattatgaatatgaagaaatcacacttgaaaggggaaattcagggcttggtttcagcattgcaggaggtacggacaacccacacattggagatgactcaagtattttcattaccaaaattatcacagggggagcagccgcccaagatggaagattgcgggtcaatgactgtatattacgagtaaatgaagtagatgttcgtgatgtaacacatagcaaagcagttgaagcgttgaaagaagcagggtctattgtacgcttgtatgtaaaaagaaggaaaccagtgtcagaaaaaataatggaaataaagctcattaaaggtcctaaaggtcttgggtttagcattgctggaggtgttggaaatcagcatattcctggggataatagcatctatgtaaccaaaataattgaaggaggtgcagcacataaggatggcaaacttcagattggagataaacttttagcagtgaataacgtatgtttagaagaagttactcatgaagaagcagtaactgccttaaagaacacatctgattttgtttatttgaaagtggcaaaacccacaagtatgtatatgaatgatggctatgcaccacctgatatcaccaactcttcttctcagcctgttgataaccatgttagcccatcttccttcttgggccagacaccagcatctccagccagatactccccagtttctaaagcagtacttggagatgatgaaattacaagggaacctagaaaagttgttcttcatcgtggctcaacgggccttggtttcaacattgtaggaggagaagatggagaaggaatatttatttcctttatcttagccggaggacctgctgatctaagtggagagctcagaaaaggagatcgtattatatcggtaaacagtgttgacctcagagctgctagtcatgagcaggcagcagctgcattgaaaaatgctggccaggctgtcacaattgttgcacaatatcgacctgaagaatacagtcgttttgaagctaaaatacatgatttacgggagcagatgatgaatagtagtattagttcagggtcaggttctcttcgaactagccagaagcgatccctctatgtcagagccctttttgattatgacaagactaaagacagtgggcttcccagtcagggactgaacttcaaatttggagatatcctccatgttattaatgcttctgatgatgaatggtggcaagccaggcaggttacaccagatggtgagagcgatgaggtcggagtgattcccagtaaacgcagagttgagaagaaagaacgagcccgattaaaaacagtgaaattcaattctaaaacgagagataaagggcagtcattcaatgacaagcgtaaaaagaacctcttttcccgaaaattccccttctacaagaacaaggaccagagtgagcaggaaacaagtgatgctgaccagcatgtaacttctaatgccagcgatagtgaaagtagttaccgtggtcaagaagaatacgtcttatcttatgaaccagtgaatcaacaagaagttaattatactcgaccagtgatcatattgggacctatgaaagacaggataaatgatgacttgatctcagaatttcctgacaaatttggatcctgtgttcctcatacaactagaccaaaacgagattatgaggtagatggaagagattatcattttgtgacttcaagagagcagatggaaaaagatatccaggaacataaattcattgaagctggccagtataacaatcatctatatggaacaagtgttcagtctgtacgagaagtagcaggaaagggcaaacactgtatccttgatgtgtctggaaatgccataaagagattacagattgcacagctttaccctatctccatttttattaaacccaaatccatggaaaatatcatggaaatgaataagcgtctaacagaagaacaagccagaaaaacatttgagagagccatgaaactggaacaggagtttactgaacatttcacagctattgtacagggggatacgctggaagacatttacaaccaagtgaaacagatcatagaagaacaatctggttcttacatctgggttccggcaaaagaaaagctatgaaaactcatgtttctctgtttctcttttccacaattccattttctttggcatctctttgccctttcctctggaaaaaa

SEQ ID NO: 292671 - DNA, 3247 bp, Homo sapiens
ctggctcaggggccaagggtcggagcgcttcacccgcccgtacccagtagcaggtggggagtgtggatacttgtgcgggggaagaggcggcctcaggtctaggctctttggggaggggacgctttcgaggagagtttggaagccgacttctgtctgttcttaatttggaggggtacccactccaaggaaaagctttccacgttgacagacaactgctgcgttttgagactctttctttgacttggtaaaactttggaacgtggggttttcaaataggctgcgagggttttctatttcgataggggaaaatgctagtttaacatgattctatcctttttcctttccgttgtgtgttttagtgtgtgccctcttcctgattctggagaaaaatgccggtccggaagcaagatacccagagagcattgcaccttttggaggaatatcgttcaaaactaagccaaactgaagacagacagctcagaagttccatagaacgggttattaacatatttcagagcaacctctttcaggctttaatagatattcaagaattttatgaagtgaccttactggataatccaaaatgtatagatcgttcaaagccgtctgaaccaattcaacctgtgaatacttgggagatttccagccttccaagctctactgtgacttcagagacactgccaagcagccttagccctagtgtagagaaatacaggtatcaggatgaagatacacctcctcaagagcatatttccccacaaatcacaaatgaagtgataggtccagaattggttcatgtctcagagaagaacttatcagagattgagaatgtccatggatttgtttctcattctcatatttcaccaataaagccaacagaagctgttcttccctctcctcccactgtccctgtgatccctgtcctgccagtccctgctgagaatactgtcatcctacccaccataccacaggcaaatcctcccccagtactggtcaacacagatagcttggaaacaccaacttacgttaatggcacagatgcagattatgaatatgaagaaatcacacttgaaaggggaaattcagggcttggtttcagcattgcaggaggtacggacaacccacacattggagatgactcaagtattttcattaccaaaattatcacagggggagcagccgcccaagatggaagattgcgggtcaatgactgtatattacgagtaaatgaagtagatgttcgtgatgtaacacatagcaaagcagttgaagcgttgaaagaagcagggtctattgtacgcttgtatgtaaaaagaaggaaaccagtgtcagaaaaaataatggaaataaagctcattaaaggtcctaaaggtcttgggtttagcattgctggaggtgttggaaatcagcatattcctggggataatagcatctatgtaaccaaaataattgaaggaggtgcagcacataaggatggcaaacttcagattggagataaacttttagcagtgaataacgtatgtttagaagaagttactcatgaagaagcagtaactgccttaaagaacacatctgattttgtttatttgaaagtggcaaaacccacaagtatgtatatgaatgatggctatgcaccacctgatatcaccaactcttcttctcagcctgttgataaccatgttagcccatcttccttcttgggccagacaccagcatctccagccagatactccccagtttctaaagcagtacttggagatgatgaaattacaagggaacctagaaaagttgttcttcatcgtggctcaacgggccttggtttcaacattgtaggaggagaagatggagaaggaatatttatttcctttatcttagccggaggacctgctgatctaagtggagagctcagaaaaggagatcgtattatatcggtaaacagtgttgacctcagagctgctagtcatgagcaggcagcagctgcattgaaaaatgctggccaggctgtcacaattgttgcacaatatcgacctgaagaatacagtcgttttgaagctaaaatacatgatttacgggagcagatgatgaatagtagtattagttcagggtcaggttctcttcgaactagccagaagcgatccctctatgtcagagccctttttgattatgacaagactaaagacagtgggcttcccagtcagggactgaacttcaaatttggagatatcctccatgttattaatgcttctgatgatgaatggtggcaagccaggcaggttacaccagatggtgagagcgatgaggtcggagtgattcccagtaaacgcagagttgagaagaaagaacgagcccgattaaaaacagtgaaattcaattctaaaacgagagataaagggcagtcattcaatgacaagcgtaaaaagaacctcttttcccgaaaattccccttctacaagaacaaggaccagagtgagcaggaaacaagtgatgctgaccagcatgtaacttctaatgccagcgatagtgaaagtagttaccgtggtcaagaagaatacgtcttatcttatgaaccagtgaatcaacaagaagttaattatactcgaccagtgatcatattgggacctatgaaagacaggataaatgatgacttgatctcagaatttcctgacaaatttggatcctgtgttcctcatacaactagaccaaaacgagattatgaggtagatggaagagattatcattttgtgacttcaagagagcagatggaaaaagatatccaggaacataaattcattgaagctggccagtataacaatcatctatatggaacaagtgttcagtctgtacgagaagtagcaggaaagggcaaacactgtatccttgatgtgtctggaaatgccataaagagattacagattgcacagctttaccctatctccatttttattaaacccaaatccatggaaaatatcatggaaatgaataagcgtctaacagaagaacaagccagaaaaacatttgagagagccatgaaactggaacaggagtttactgaacatttcacagctattgtacagggggatacgctggaagacatttacaaccaagtgaaacagatcatagaagaacaatctggttcttacatctgggttccggcaaaagaaaagctatgaaaactcatgtttctctgtttctcttttccacaattccattttctttggcatctctttgccctttcctctggaaaaaa

SEQ ID NO: 292672 - DNA, 2942 bp, Homo sapiens
ctggctcaggggccaagggtcggagcgcttcacccgcccgtacccagtagcaggtgtgtgccctcttcctgattctggagaaaaatgccggtccggaagcaagatacccagagagcattgcaccttttggaggaatatcgttcaaaactaagccaaactgaagacagacagctcagaagttccatagaacgggttattaacatatttcagagcaacctctttcaggctttaatagatattcaagaattttatgaagtgaccttactggataatccaaaatgtatagatcgttcaaagccgtctgaaccaattcaacctgtgaatacttgggagatttccagccttccaagctctactgtgacttcagagacactgccaagcagccttagccctagtgtagagaaatacaggtatcaggatgaagatacacctcctcaagagcatatttccccacaaatcacaaatgaagtgataggtccagaattggttcatgtctcagagaagaacttatcagagattgagaatgtccatggatttgtttctcattctcatatttcaccaataaagccaacagaagctgttcttccctctcctcccactgtccctgtgatccctgtcctgccagtccctgctgagaatactgtcatcctacccaccataccacaggcaaatcctcccccagtactggtcaacacagatagcttggaaacaccaacttacgttaatggcacagatgcagattatgaatatgaagaaatcacacttgaaaggggaaattcagggcttggtttcagcattgcaggaggtacggacaacccacacattggagatgactcaagtattttcattaccaaaattatcacagggggagcagccgcccaagatggaagattgcgggtcaatgactgtatattacgagtaaatgaagtagatgttcgtgatgtaacacatagcaaagcagttgaagcgttgaaagaagcagggtctattgtacgcttgtatgtaaaaagaaggaaaccagtgtcagaaaaaataatggaaataaagctcattaaaggtcctaaaggtcttgggtttagcattgctggaggtgttggaaatcagcatattcctggggataatagcatctatgtaaccaaaataattgaaggaggtgcagcacataaggatggcaaacttcagattggagataaacttttagcagtgaataacgtatgtttagaagaagttactcatgaagaagcagtaactgccttaaagaacacatctgattttgtttatttgaaagtggcaaaacccacaagtatgtatatgaatgatggctatgcaccacctgatatcaccaactcttcttctcagcctgttgataaccatgttagcccatcttccttcttgggccagacaccagcatctccagccagatactccccagtttctaaagcagtacttggagatgatgaaattacaagggaacctagaaaagttgttcttcatcgtggctcaacgggccttggtttcaacattgtaggaggagaagatggagaaggaatatttatttcctttatcttagccggaggacctgctgatctaagtggagagctcagaaaaggagatcgtattatatcggtaaacagtgttgacctcagagctgctagtcatgagcaggcagcagctgcattgaaaaatgctggccaggctgtcacaattgttgcacaatatcgacctgaagaatacagtcgttttgaagctaaaatacatgatttacgggagcagatgatgaatagtagtattagttcagggtcaggttctcttcgaactagccagaagcgatccctctatgtcagagccctttttgattatgacaagactaaagacagtgggcttcccagtcagggactgaacttcaaatttggagatatcctccatgttattaatgcttctgatgatgaatggtggcaagccaggcaggttacaccagatggtgagagcgatgaggtcggagtgattcccagtaaacgcagagttgagaagaaagaacgagcccgattaaaaacagtgaaattcaattctaaaacgagagataaagggcagtcattcaatgacaagcgtaaaaagaacctcttttcccgaaaattccccttctacaagaacaaggaccagagtgagcaggaaacaagtgatgctgaccagcatgtaacttctaatgccagcgatagtgaaagtagttaccgtggtcaagaagaatacgtcttatcttatgaaccagtgaatcaacaagaagttaattatactcgaccagtgatcatattgggacctatgaaagacaggataaatgatgacttgatctcagaatttcctgacaaatttggatcctgtgttcctcatacaactagaccaaaacgagattatgaggtagatggaagagattatcattttgtgacttcaagagagcagatggaaaaagatatccaggaacataaattcattgaagctggccagtataacaatcatctatatggaacaagtgttcagtctgtacgagaagtagcaggaaagggcaaacactgtatccttgatgtgtctggaaatgccataaagagattacagattgcacagctttaccctatctccatttttattaaacccaaatccatggaaaatatcatggaaatgaataagcgtctaacagaagaacaagccagaaaaacatttgagagagccatgaaactggaacaggagtttactgaacatttcacagctattgtacagggggatacgctggaagacatttacaaccaagtgaaacagatcatagaagaacaatctggttcttacatctgggttccggcaaaagaaaagctatgaaaactcatgtttctctgtttctcttttccacaattccattttctttggcatctctttgccctttcctctggaaaaaa

SEQ ID NO: 292673 - DNA, 2845 bp, Homo sapiens
ctggctcaggggccaagggtcggagcgcttcacccgcccgtacccagtagcaggtgtgtgccctcttcctgattctggagaaaaatgccggtccggaagcaagatacccagagagcattgcaccttttggaggaatatcgttcaaaactaagccaaactgaagacagacagctcagaagttccatagaacgggttattaacatatttcagagcaacctctttcaggctttaatagatattcaagaattttatgaagtgaccttactggataatccaaaatgtatagatcgttcaaagccgtctgaaccaattcaacctgtgaatacttgggagatttccagccttccaagctctactgtgacttcagagacactgccaagcagccttagccctagtgtagagaaatacaggtatcaggatgaagatacacctcctcaagagcatatttccccacaaatcacaaatgaagtgataggtccagaattggttcatgtctcagagaagaacttatcagagattgagaatgtccatggatttgtttctcattctcatatttcaccaataaaggcaaatcctccccccagtactggtcaacacagatagcttggaaacacccaacttacgttaatggcacagatgcagattatgaatatgaagaaatcacacttgaaaggggaaattcagggcttggtttcagcattgcaggaggtacggacaacccacacattggagatgactcaagtattttcattaccaaaattatcacagggggagcagccgcccaagatggaagattgcgggtcaatgactgtatattacgagtaaatgaagtagatgttcgtgatgtaacacatagcaaagcagttgaagcgttgaaagaagcagggtctattgtacgcttgtatgtaaaaagaaggaaaccagtgtcagaaaaaataatggaaataaagctcattaaaggtcctaaaggtcttgggtttagcattgctggaggtgttggaaatcagcatattcctggggataatagcatctatgtaaccaaaataattgaaggaggtgcagcacataaggatggcaaacttcagattggagataaacttttagcagtgaataacgtatgtttagaagaagttactcatgaagaagcagtaactgccttaaagaacacatctgattttgtttatttgaaagtggcaaaacccacaagtatgtatatgaatgatggctatgcaccacctgatatcaccaactcttcttctcagcctgttgataaccatgttagcccatcttccttcttgggccagacaccagcatctccagccagatactccccagtttctaaagcagtacttggagatgatgaaattacaagggaacctagaaaagttgttcttcatcgtggctcaacgggccttggtttcaacattgtaggaggagaagatggagaaggaatatttatttcctttatcttagccggaggacctgctgatctaagtggagagctcagaaaaggagatcgtattatatcggtaaacagtgttgacctcagagctgctagtcatgagcaggcagcagctgcattgaaaaatgctggccaggctgtcacaattgttgcacaatatcgacctgaagaatacagtcgttttgaagctaaaatacatgatttacgggagcagatgatgaatagtagtattagttcagggtcaggttctcttcgaactagccagaagcgatccctctatgtcagagccctttttgattatgacaagactaaagacagtgggcttcccagtcagggactgaacttcaaatttggagatatcctccatgttattaatgcttctgatgatgaatggtggcaagccaggcaggttacaccagatggtgagagcgatgaggtcggagtgattcccagtaaacgcagagttgagaagaaagaacgagcccgattaaaaacagtgaaattcaattctaaaacgagagataaagggcagtcattcaatgacaagcgtaaaaagaacctcttttcccgaaaattccccttctacaagaacaaggaccagagtgagcaggaaacaagtgatgctgaccagcatgtaacttctaatgccagcgatagtgaaagtagttaccgtggtcaagaagaatacgtcttatcttatgaaccagtgaatcaacaagaagttaattatactcgaccagtgatcatattgggacctatgaaagacaggataaatgatgacttgatctcagaatttcctgacaaatttggatcctgtgttcctcatacaactagaccaaaacgagattatgaggtagatggaagagattatcattttgtgacttcaagagagcagatggaaaaagatatccaggaacataaattcattgaagctggccagtataacaatcatctatatggaacaagtgttcagtctgtacgagaagtagcaggaaagggcaaacactgtatccttgatgtgtctggaaatgccataaagagattacagattgcacagctttaccctatctccatttttattaaacccaaatccatggaaaatatcatggaaatgaataagcgtctaacagaagaacaagccagaaaaacatttgagagagccatgaaactggaacaggagtttactgaacatttcacagctattgtacagggggatacgctggaagacatttacaaccaagtgaaacagatcatagaagaacaatctggttcttacatctgggttccggcaaaagaaaagctatgaaaactcatgtttctctgtttctcttttccacaattccattttctttggcatctctttgccctttcctctggaaaaaa

SEQ ID NO: 292674 - DNA, 3082 bp, Homo sapiens
gggagctgctccgagtctggccggggcgcaccccagttccgagcgcacgccgctcaccggaactttgtggcggcgccgcaggtgtgggggcccgcggaggtgtgcatgcggggcgcgagggcgtcgcggagagcggccgctgccctgtccggcccccgctggagcagcccggaggcagcgagcaaggagaaaggtgtgtgccctcttcctgattctggagaaaaatgccggtccggaagcaagatacccagagagcattgcaccttttggaggaatatcgttcaaaactaagccaaactgaagacagacagctcagaagttccatagaacgggttattaacatatttcagagcaacctctttcaggctttaatagatattcaagaattttatgaagtgaccttactggataatccaaaatgtatagatcgttcaaagccgtctgaaccaattcaacctgtgaatacttgggagatttccagccttccaagctctactgtgacttcagagacactgccaagcagccttagccctagtgtagagaaatacaggtatcaggatgaagatacacctcctcaagagcatatttccccacaaatcacaaatgaagtgataggtccagaattggttcatgtctcagagaagaacttatcagagattgagaatgtccatggatttgtttctcattctcatatttcaccaataaagccaacagaagctgttcttccctctcctcccactgtccctgtgatccctgtcctgccagtccctgctgagaatactgtcatcctacccaccataccacaggcaaatcctcccccagtactggtcaacacagatagcttggaaacaccaacttacgttaatggcacagatgcagattatgaatatgaagaaatcacacttgaaaggggaaattcagggcttggtttcagcattgcaggaggtacggacaacccacacattggagatgactcaagtattttcattaccaaaattatcacagggggagcagccgcccaagatggaagattgcgggtcaatgactgtatattacgagtaaatgaagtagatgttcgtgatgtaacacatagcaaagcagttgaagcgttgaaagaagcagggtctattgtacgcttgtatgtaaaaagaaggaaaccagtgtcagaaaaaataatggaaataaagctcattaaaggtcctaaaggtcttgggtttagcattgctggaggtgttggaaatcagcatattcctggggataatagcatctatgtaaccaaaataattgaaggaggtgcagcacataaggatggcaaacttcagattggagataaacttttagcagtgaataacgtatgtttagaagaagttactcatgaagaagcagtaactgccttaaagaacacatctgattttgtttatttgaaagtggcaaaacccacaagtatgtatatgaatgatggctatgcaccacctgatatcaccaactcttcttctcagcctgttgataaccatgttagcccatcttccttcttgggccagacaccagcatctccagccagatactccccagtttctaaagcagtacttggagatgatgaaattacaagggaacctagaaaagttgttcttcatcgtggctcaacgggccttggtttcaacattgtaggaggagaagatggagaaggaatatttatttcctttatcttagccggaggacctgctgatctaagtggagagctcagaaaaggagatcgtattatatcggtaaacagtgttgacctcagagctgctagtcatgagcaggcagcagctgcattgaaaaatgctggccaggctgtcacaattgttgcacaatatcgacctgaagaatacagtcgttttgaagctaaaatacatgatttacgggagcagatgatgaatagtagtattagttcagggtcaggttctcttcgaactagccagaagcgatccctctatgtcagagccctttttgattatgacaagactaaagacagtgggcttcccagtcagggactgaacttcaaatttggagatatcctccatgttattaatgcttctgatgatgaatggtggcaagccaggcaggttacaccagatggtgagagcgatgaggtcggagtgattcccagtaaacgcagagttgagaagaaagaacgagcccgattaaaaacagtgaaattcaattctaaaacgagagataaagggcagtcattcaatgacaagcgtaaaaagaacctcttttcccgaaaattccccttctacaagaacaaggaccagagtgagcaggaaacaagtgatgctgaccagcatgtaacttctaatgccagcgatagtgaaagtagttaccgtggtcaagaagaatacgtcttatcttatgaaccagtgaatcaacaagaagttaattatactcgaccagtgatcatattgggacctatgaaagacaggataaatgatgacttgatctcagaatttcctgacaaatttggatcctgtgttcctcatacaactagaccaaaacgagattatgaggtagatggaagagattatcattttgtgacttcaagagagcagatggaaaaagatatccaggaacataaattcattgaagctggccagtataacaatcatctatatggaacaagtgttcagtctgtacgagaagtagcaggaaagggcaaacactgtatccttgatgtgtctggaaatgccataaagagattacagattgcacagctttaccctatctccatttttattaaacccaaatccatggaaaatatcatggaaatgaataagcgtctaacagaagaacaagccagaaaaacatttgagagagccatgaaactggaacaggagtttactgaacatttcacagctattgtacagggggatacgctggaagacatttacaaccaagtgaaacagatcatagaagaacaatctggttcttacatctgggttccggcaaaagaaaagctatgaaaactcatgtttctctgtttctcttttccacaattccattttctttggcatctctttgccctttcctctggaaaaaa

SEQ ID NO: 292675 - DNA, 3133 bp, Homo sapiens
ctggctcaggggccaagggtcggagcgcttcacccgcccgtacccagtagcaggtggggagtgtggatacttgtgcgggggaagaggcggcctcaggtctaggctctttggggaggggacgctttcgaggagagtttggaagccgacttctgtctgttcttaatttggaggggtacccactccaaggaaaagctttccacgttgacagacaactgctgcgttttgagactctttctttgacttggtgtgtgccctcttcctgattctggagaaaaatgccggtccggaagcaagatacccagagagcattgcaccttttggaggaatatcgttcaaaactaagccaaactgaagacagacagctcagaagttccatagaacgggttattaacatatttcagagcaacctctttcaggctttaatagatattcaagaattttatgaagtgaccttactggataatccaaaatgtatagatcgttcaaagccgtctgaaccaattcaacctgtgaatacttgggagatttccagccttccaagctctactgtgacttcagagacactgccaagcagccttagccctagtgtagagaaatacaggtatcaggatgaagatacacctcctcaagagcatatttccccacaaatcacaaatgaagtgataggtccagaattggttcatgtctcagagaagaacttatcagagattgagaatgtccatggatttgtttctcattctcatatttcaccaataaagccaacagaagctgttcttccctctcctcccactgtccctgtgatccctgtcctgccagtccctgctgagaatactgtcatcctacccaccataccacaggcaaatcctcccccagtactggtcaacacagatagcttggaaacaccaacttacgttaatggcacagatgcagattatgaatatgaagaaatcacacttgaaaggggaaattcagggcttggtttcagcattgcaggaggtacggacaacccacacattggagatgactcaagtattttcattaccaaaattatcacagggggagcagccgcccaagatggaagattgcgggtcaatgactgtatattacgagtaaatgaagtagatgttcgtgatgtaacacatagcaaagcagttgaagcgttgaaagaagcagggtctattgtacgcttgtatgtaaaaagaaggaaaccagtgtcagaaaaaataatggaaataaagctcattaaaggtcctaaaggtcttgggtttagcattgctggaggtgttggaaatcagcatattcctggggataatagcatctatgtaaccaaaataattgaaggaggtgcagcacataaggatggcaaacttcagattggagataaacttttagcagtgaataacgtatgtttagaagaagttactcatgaagaagcagtaactgccttaaagaacacatctgattttgtttatttgaaagtggcaaaacccacaagtatgtatatgaatgatggctatgcaccacctgatatcaccaactcttcttctcagcctgttgataaccatgttagcccatcttccttcttgggccagacaccagcatctccagccagatactccccagtttctaaagcagtacttggagatgatgaaattacaagggaacctagaaaagttgttcttcatcgtggctcaacgggccttggtttcaacattgtaggaggagaagatggagaaggaatatttatttcctttatcttagccggaggacctgctgatctaagtggagagctcagaaaaggagatcgtattatatcggtaaacagtgttgacctcagagctgctagtcatgagcaggcagcagctgcattgaaaaatgctggccaggctgtcacaattgttgcacaatatcgacctgaagaatacagtcgttttgaagctaaaatacatgatttacgggagcagatgatgaatagtagtattagttcagggtcaggttctcttcgaactagccagaagcgatccctctatgtcagagccctttttgattatgacaagactaaagacagtgggcttcccagtcagggactgaacttcaaatttggagatatcctccatgttattaatgcttctgatgatgaatggtggcaagccaggcaggttacaccagatggtgagagcgatgaggtcggagtgattcccagtaaacgcagagttgagaagaaagaacgagcccgattaaaaacagtgaaattcaattctaaaacgagagataaagggcagtcattcaatgacaagcgtaaaaagaacctcttttcccgaaaattccccttctacaagaacaaggaccagagtgagcaggaaacaagtgatgctgaccagcatgtaacttctaatgccagcgatagtgaaagtagttaccgtggtcaagaagaatacgtcttatcttatgaaccagtgaatcaacaagaagttaattatactcgaccagtgatcatattgggacctatgaaagacaggataaatgatgacttgatctcagaatttcctgacaaatttggatcctgtgttcctcatacaactagaccaaaacgagattatgaggtagatggaagagattatcattttgtgacttcaagagagcagatggaaaaagatatccaggaacataaattcattgaagctggccagtataacaatcatctatatggaacaagtgttcagtctgtacgagaagtagcaggaaagggcaaacactgtatccttgatgtgtctggaaatgccataaagagattacagattgcacagctttaccctatctccatttttattaaacccaaatccatggaaaatatcatggaaatgaataagcgtctaacagaagaacaagccagaaaaacatttgagagagccatgaaactggaacaggagtttactgaacatttcacagctattgtacagggggatacgctggaagacatttacaaccaagtgaaacagatcatagaagaacaatctggttcttacatctgggttccggcaaaagaaaagctatgaaaactcatgtttctctgtttctcttttccacaattccattttctttggcatctctttgccctttcctctggaaaaaa

SEQ ID NO: 292676 - DNA, 2876 bp, Homo sapiens
cgctctttggatccccctcatgtaggccggaagcaagatacccagagagcattgcaccttttggaggaatatcgttcaaaactaagccaaactgaagacagacagctcagaagttccatagaacgggttattaacatatttcagagcaacctctttcaggctttaatagatattcaagaattttatgaagtgaccttactggataatccaaaatgtatagatcgttcaaagccgtctgaaccaattcaacctgtgaatacttgggagatttccagccttccaagctctactgtgacttcagagacactgccaagcagccttagccctagtgtagagaaatacaggtatcaggatgaagatacacctcctcaagagcatatttccccacaaatcacaaatgaagtgataggtccagaattggttcatgtctcagagaagaacttatcagagattgagaatgtccatggatttgtttctcattctcatatttcaccaataaagccaacagaagctgttcttccctctcctcccactgtccctgtgatccctgtcctgccagtccctgctgagaatactgtcatcctacccaccataccacaggcaaatcctcccccagtactggtcaacacagatagcttggaaacaccaacttacgttaatggcacagatgcagattatgaatatgaagaaatcacacttgaaaggggaaattcagggcttggtttcagcattgcaggaggtacggacaacccacacattggagatgactcaagtattttcattaccaaaattatcacagggggagcagccgcccaagatggaagattgcgggtcaatgactgtatattacgagtaaatgaagtagatgttcgtgatgtaacacatagcaaagcagttgaagcgttgaaagaagcagggtctattgtacgcttgtatgtaaaaagaaggaaaccagtgtcagaaaaaataatggaaataaagctcattaaaggtcctaaaggtcttgggtttagcattgctggaggtgttggaaatcagcatattcctggggataatagcatctatgtaaccaaaataattgaaggaggtgcagcacataaggatggcaaacttcagattggagataaacttttagcagtgaataacgtatgtttagaagaagttactcatgaagaagcagtaactgccttaaagaacacatctgattttgtttatttgaaagtggcaaaacccacaagtatgtatatgaatgatggctatgcaccacctgatatcaccaactcttcttctcagcctgttgataaccatgttagcccatcttccttcttgggccagacaccagcatctccagccagatactccccagtttctaaagcagtacttggagatgatgaaattacaagggaacctagaaaagttgttcttcatcgtggctcaacgggccttggtttcaacattgtaggaggagaagatggagaaggaatatttatttcctttatcttagccggaggacctgctgatctaagtggagagctcagaaaaggagatcgtattatatcggtaaacagtgttgacctcagagctgctagtcatgagcaggcagcagctgcattgaaaaatgctggccaggctgtcacaattgttgcacaatatcgacctgaagaatacagtcgttttgaagctaaaatacatgatttacgggagcagatgatgaatagtagtattagttcagggtcaggttctcttcgaactagccagaagcgatccctctatgtcagagccctttttgattatgacaagactaaagacagtgggcttcccagtcagggactgaacttcaaatttggagatatcctccatgttattaatgcttctgatgatgaatggtggcaagccaggcaggttacaccagatggtgagagcgatgaggtcggagtgattcccagtaaacgcagagttgagaagaaagaacgagcccgattaaaaacagtgaaattcaattctaaaacgagagataaagggcagtcattcaatgacaagcgtaaaaagaacctcttttcccgaaaattccccttctacaagaacaaggaccagagtgagcaggaaacaagtgatgctgaccagcatgtaacttctaatgccagcgatagtgaaagtagttaccgtggtcaagaagaatacgtcttatcttatgaaccagtgaatcaacaagaagttaattatactcgaccagtgatcatattgggacctatgaaagacaggataaatgatgacttgatctcagaatttcctgacaaatttggatcctgtgttcctcatacaactagaccaaaacgagattatgaggtagatggaagagattatcattttgtgacttcaagagagcagatggaaaaagatatccaggaacataaattcattgaagctggccagtataacaatcatctatatggaacaagtgttcagtctgtacgagaagtagcaggaaagggcaaacactgtatccttgatgtgtctggaaatgccataaagagattacagattgcacagctttaccctatctccatttttattaaacccaaatccatggaaaatatcatggaaatgaataagcgtctaacagaagaacaagccagaaaaacatttgagagagccatgaaactggaacaggagtttactgaacatttcacagctattgtacagggggatacgctggaagacatttacaaccaagtgaaacagatcatagaagaacaatctggttcttacatctgggttccggcaaaagaaaagctatgaaaactcatgtttctctgtttctcttttccacaattccattttctttggcatctctttgccctttcctctggaaaaaa

SEQ ID NO: 292677 - DNA, 3028 bp, Homo sapiens
gggagctgctccgagtctggccggggcgcaccccagttccgagcgcacgccgctcaccggaactttgtggcggcgccgcaggtgtgggggcccgcggaggtgtgcatgcggggcgcgagggcgtcgcggagagcggccgctgccctgtccggcccccgctggagcagcccggaggcagcgagcaaggagaaaggtgtgtgccctcttcctgattctggagaaaaatgccggtccggaagcaagatacccagagagcattgcaccttttggaggaatatcgttcaaaactaagccaaactgaagacagacagctcagaagttccatagaacgggttattaacatatttcagagcaacctctttcaggctttaatagatattcaagaattttatgaagtgaccttactggataatccggagatttccagccttccaagctctactgtgacttcagagacactgccaagcagccttagccctagtgtagagaaatacaggtatcaggatgaagatacacctcctcaagagcatatttccccacaaatcacaaatgaagtgataggtccagaattggttcatgtctcagagaagaacttatcagagattgagaatgtccatggatttgtttctcattctcatatttcaccaataaagccaacagaagctgttcttccctctcctcccactgtccctgtgatccctgtcctgccagtccctgctgagaatactgtcatcctacccaccataccacaggcaaatcctcccccagtactggtcaacacagatagcttggaaacaccaacttacgttaatggcacagatgcagattatgaatatgaagaaatcacacttgaaaggggaaattcagggcttggtttcagcattgcaggaggtacggacaacccacacattggagatgactcaagtattttcattaccaaaattatcacagggggagcagccgcccaagatggaagattgcgggtcaatgactgtatattacgagtaaatgaagtagatgttcgtgatgtaacacatagcaaagcagttgaagcgttgaaagaagcagggtctattgtacgcttgtatgtaaaaagaaggaaaccagtgtcagaaaaaataatggaaataaagctcattaaaggtcctaaaggtcttgggtttagcattgctggaggtgttggaaatcagcatattcctggggataatagcatctatgtaaccaaaataattgaaggaggtgcagcacataaggatggcaaacttcagattggagataaacttttagcagtgaataacgtatgtttagaagaagttactcatgaagaagcagtaactgccttaaagaacacatctgattttgtttatttgaaagtggcaaaacccacaagtatgtatatgaatgatggctatgcaccacctgatatcaccaactcttcttctcagcctgttgataaccatgttagcccatcttccttcttgggccagacaccagcatctccagccagatactccccagtttctaaagcagtacttggagatgatgaaattacaagggaacctagaaaagttgttcttcatcgtggctcaacgggccttggtttcaacattgtaggaggagaagatggagaaggaatatttatttcctttatcttagccggaggacctgctgatctaagtggagagctcagaaaaggagatcgtattatatcggtaaacagtgttgacctcagagctgctagtcatgagcaggcagcagctgcattgaaaaatgctggccaggctgtcacaattgttgcacaatatcgacctgaagaatacagtcgttttgaagctaaaatacatgatttacgggagcagatgatgaatagtagtattagttcagggtcaggttctcttcgaactagccagaagcgatccctctatgtcagagccctttttgattatgacaagactaaagacagtgggcttcccagtcagggactgaacttcaaatttggagatatcctccatgttattaatgcttctgatgatgaatggtggcaagccaggcaggttacaccagatggtgagagcgatgaggtcggagtgattcccagtaaacgcagagttgagaagaaagaacgagcccgattaaaaacagtgaaattcaattctaaaacgagagataaagggcagtcattcaatgacaagcgtaaaaagaacctcttttcccgaaaattccccttctacaagaacaaggaccagagtgagcaggaaacaagtgatgctgaccagcatgtaacttctaatgccagcgatagtgaaagtagttaccgtggtcaagaagaatacgtcttatcttatgaaccagtgaatcaacaagaagttaattatactcgaccagtgatcatattgggacctatgaaagacaggataaatgatgacttgatctcagaatttcctgacaaatttggatcctgtgttcctcatacaactagaccaaaacgagattatgaggtagatggaagagattatcattttgtgacttcaagagagcagatggaaaaagatatccaggaacataaattcattgaagctggccagtataacaatcatctatatggaacaagtgttcagtctgtacgagaagtagcaggaaagggcaaacactgtatccttgatgtgtctggaaatgccataaagagattacagattgcacagctttaccctatctccatttttattaaacccaaatccatggaaaatatcatggaaatgaataagcgtctaacagaagaacaagccagaaaaacatttgagagagccatgaaactggaacaggagtttactgaacatttcacagctattgtacagggggatacgctggaagacatttacaaccaagtgaaacagatcatagaagaacaatctggttcttacatctgggttccggcaaaagaaaagctatgaaaactcatgtttctctgtttctcttttccacaattccattttctttggcatctctttgccctttcctctggaaaaaa

SEQ ID NO: 292678 - DNA, 624 bp, Homo sapiens
ctggctcaggggccaagggtcggagcgcttcacccgcccgtacccagtagcaggtggggagtgtggatacttgtgcgggggaagaggcggcctcaggtctaggctctttggggaggggacgctttcgaggagagtttggaagccgacttctgtctgttcttaatttggaggggtacccactccaaggaaaagctttccacgttgacagacaactgctgcgttttgagactctttctttgacttggtaaaactttggaacgtggggttttcaaataggctgcgagggttttctatttcgataggggaaaatgctagtttaacatgattctatcctttttcctttccgttgtgtgttttagtgtgtgccctcttcctgattctggagaaaaatgccggtccggaagcaaggtgagagtttattccgtaactctgttgtcgatgtcacttgcttttctgtgtgtcagttttttgattgccgttttagaatcgtttgtgtaacttttgatgagacagcacggtcctagctttattgcttagggaatctaagcctcatatcatttcagaagatggaaacacgaaaatgtttgttaaactttcttaacatttctctagtgattaagagag

SEQ ID NO: 292679 - DNA, 314 bp, Homo sapiens
cagtaatgcctctgaaaggactttcctccagaacaagtccatttaatttagaatctttatattactcacccatatacctttatttgttgtgttccttatgttagtacagtttctgcgtcctttaatgacaggaacctgtccataaagataaatcatattcagtctcaattttttttcttctatcctcagggaaattcagggcttggtttcagcattgcaggaggtacggacaacccacacattggagatgactcaagtattttcattaccaaaattatcacagggggagcagccgcccaagatggaagattgcg

SEQ ID NO: 292680 - DNA, 592 bp, Homo sapiens
atattcagtcttctctgtcacctagcttgaattatttctaatgtttaaattaaataattttattattggcattatttttaaagtaaaatcctatttcctctgagatctgatgtattaaaccataaatatactttttatattgctaaatattgagtatttggctagttatgaaaaccatgatttgaattaaactcatgttgcttatcagggcttcttcatgtttattttctttacagaaatacaggtatcaggatgaagatacacctcctcaagagcatatttccccacaaatcacaaatgaagtgataggtccagaattggttcatgtctcagagaagaacttatcagagattgagaatgtccatggatttgtttctcattctcatatttcaccaataaaggtaggatagtatctatttattattgttatgaattacatattacttttgttatacatatagctcatgctcggagagaagtattctttcatgtaggttcgccctaccccacccccccattttagtttcatagttatggagaatttcaaggtgcttattagtactccagaaaacatttttaaatatgtatttta

SEQ ID NO: 292681 - DNA, 2602 bp, Homo sapiens
ttcttgtgcttcttgcccatggcggcgccggcggcgggcccgaggcgggggctgggaacagctggcacccggtcggaccttggccgccaccgccccctggccctggctggccgcccgcgctcgctgcgccgaggttgccgagctcgctgggccgcgccggaaacggggcgaggcggggccgcggcaggaagtggccctgccgggcccgagcgcttccgggtcaggaggtggtgcgcctcgcgcggcagattcgaagctagggcggggcccgcgggctgaggcagcggctgtggcggcgacgctgggcgtgaggtggcggcggccgcgccctggttgggtccccactgctctcgggggcgccatggacgaggccgtgggcgacctgaagcaggcgcttccctgtgtggccgagtcgccaacggtccacgtggaggtgcatcagcgcggcagcagcactgcaaagaaagaagacataaacctgagtgttagaaagctactcaacagacataatattgtgtttggtgattacacatggactgagtttgatgaaccttttttgaccagaaatgtgcagtctgtgtctattattgacacagaattaaaggttaaagactcacagcccatcgatttgagtgcatgcactgttgcacttcacattttccagctgaatgaagatggccccagcagtgaaaatctggaggaagagacagaaaacataattgcagcaaatcactgggttctacctgcagctgaattccatgggctttgggacagcttggtatacgatgtggaagtcaaatcccatctcctcgattatgtgatgacaactttactgttttcagacaagaacgtcaacagcaacctcatcacctggaaccgggtggtgctgctccacggtcctcctggcactggaaaaacatccctgtgtaaagcgttagcccagaaattgacaattagactttcaagcaggtaccgatatggccaattaattgaaataaacagccacagcctcttttctaagtggttttcggaaagtggcaagctggtaaccaagatgtttcagaagattcaggatttgattgatgataaagacgccctggtgttcgtgctgattgatgaggtggagagtctcacagccgcccgaaatgcctgcagggcgggcaccgagccatcagatgccatccgcgtggtcaatgctgtcttgacccaaattgatcagattaaaaggcattccaatgttgtgattctgaccacttctaacatcaccgagaagatcgacgtggccttcgtggacagggctgacatcaagcagtacattgggccaccctctgcagcagccatcttcaaaatctacctctcttgtttggaagaactgatgaagtgtcagatcatataccctcgccagcagctgctgaccctccgagagctagagatgattggcttcattgaaaacaacgtgtcaaaattgagccttcttttgaatgacatttcaaggaagagcgagggcctcagcggccgggtcctgagaaaactcccctttctggctcatgcgctgtatgtccaggcccccaccgtcaccatagaggggttcctccaggccctgtctctggcagtggacaagcagtttgaagagagaaagaagcttgcagcttacatctgatcctgggcttccccatctggtgcttttcccatggagaacacacaaccagtaagtgaggttgccccacacagccgtctcccagggaatcccttctgcaaaccaaacgttacttagactgcaagctagaaagccaccaaggccaggctttgttaaaagaagtgtattctatttatgttgttttaaaatgcatactgagagacaaacatcttgtcattttcactgtttgtaaaagataattcagattgtttgtctccttgtgaagaaccatcgaaacctgtttgttcccagcccacccccagtggatgggatgcataatgccagcaagttttgtttaacagcaaaaaaggaagattaatgcaggtgttatagaagccagaagagaaactgtgtcaccctaaagaagcatataatcatagcattaaaaatgcacacattactccaggtggaaggtggcaattgctttctgatatcagctcgtttgatttagtgcaaaaatgttttcaagactatttaatggatgtaaaaaagcctatttctacattataccaactgagaaaaaaatggtcggtaaagtgttctttcataataaataatcagacatggtcccatttgcaggaaaagtgcagactctgagtgttccagggaaacacatgctggacatcccttgtaacccggtatgggcgcccctgcattgctgggatgtttctgcccacggttttgtttgtgcaataacgttatcacatttctaatgaggattcacattaatataatataaaataaataggtcagttactggtctctttctccgaatgttatgttttgcttttatctcacagtaaaataaatataattaatggtttgcatgtgaaattcacttttgaaagaacatgttaccttaccttttgttttagaagttttcaagtattaaaatattttttagaa

SEQ ID NO: 292682 - DNA, 2370 bp, Homo sapiens
  misc_feature (7)..(7): n is a, c, g, or t
agggaanacagattacggctaggtacgagtgctggtgtcggggctgaggcagcggctgtggcggcgacgctgggcgtgaggtggcggcggccgcgccctggttgggtccccactgctctcgggggcgccatggacgaggccgtgggcgacctgaagcaggcgcttccctgtgtggccgagtcgccaacggtccacgtggaggtgcatcagcgcggcagcagcactgcaaagaaagaagacataaacctgagtgttagaaagctactcaacagacataatattgtgtttggtgattacacatggactgagtttgatgaaccttttttgaccagaaatgtgcagtctgtgtctattattgacacagaattaaaggttaaagactcacagcccatcgatttgagtgcatgcactgttgcacttcacattttccagctgaatgaagatggccccagcagtgaaaatctggaggaagagacagaaaacataattgcagcaaatcactgggttctacctgcagctgaattccatgggctttgggacagcttggtatacgatgtggaagtcaaatcccatctcctcgattatgtgatgacaactttactgttttcagacaagaacgtcaacagcaacctcatcacctggaaccgggtggtgctgctccacggtcctcctggcactggaaaaacatccctgtgtaaagcgttagcccagaaattgacaattagactttcaagcaggtaccgatatggccaattaattgaaataaacagccacagcctcttttctaagtggttttcggaaagtggcaagctggtaaccaagatgtttcagaagattcaggatttgattgatgataaagacgccctggtgttcgtgctgattgatgaggtggagagtctcacagccgcccgaaatgcctgcagggcgggcaccgagccatcagatgccatccgcgtggtcaatgctgtcttgacccaaattgatcagattaaaaggcattccaatgttgtgattctgaccacttctaacatcaccgagaagatcgacgtggccttcgtggacagggctgacatcaagcagtacattgggccaccctctgcagcagccatcttcaaaatctacctctcttgtttggaagaactgatgaagtgtcagatcatataccctcgccagcagctgctgaccctccgagagctagagatgattggcttcattgaaaacaacgtgtcaaaattgagccttcttttgaatgacatttcaaggaagagcgagggcctcagcggccgggtcctgagaaaactcccctttctggctcatgcgctgtatgtccaggcccccaccgtcaccatagaggggttcctccaggccctgtctctggcagtggacaagcagtttgaagagagaaagaagcttgcagcttacatctgatcctgggcttccccatctggtgcttttcccatggagaacacacaaccagtaagtgaggttgccccacacagccgtctcccagggaatcccttctgcaaaccaaacgttacttagactgcaagctagaaagccaccaaggccaggctttgttaaaagaagtgtattctatttatgttgttttaaaatgcatactgagagacaaacatcttgtcattttcactgtttgtaaaagataattcagattgtttgtctccttgtgaagaaccatcgaaacctgtttgttcccagcccacccccagtggatgggatgcataatgccagcaagttttgtttaacagcaaaaaaggaagattaatgcaggtgttatagaagccagaagagaaactgtgtcaccctaaagaagcatataatcatagcattaaaaatgcacacattactccaggtggaaggtggcaattgctttctgatatcagctcgtttgatttagtgcaaaaatgttttcaagactatttaatggatgtaaaaaagcctatttctacattataccaactgagaaaaaaatggtcggtaaagtgttctttcataataaataatcagacatggtcccatttgcaggaaaagtgcagactctgagtgttccagggaaacacatgctggacatcccttgtaacccggtatgggcgcccctgcattgctgggatgtttctgcccacggttttgtttgtgcaataacgttatcacatttctaatgaggattcacattaatataatataaaataaataggtcagttactggtctctttctccgaatgttatgttttgcttttatctcacagtaaaataaatataattaatggtttgcatgtgaaattcacttttgaaagaacatgttaccttaccttttgttttagaagttttcaagtattaaaatattttttagaa

SEQ ID NO: 292683 - DNA, 2240 bp, Homo sapiens
ctgtgctgctccctggagtggggggaactcagcggcggggccagaccttcacagaccctccttatgtccacggagggtggattgaggtcagcactgcaaagaaagaagacataaacctgagtgttagaaagctactcaacagacataatattgtgtttggtgattacacatggactgagtttgatgaaccttttttgaccagaaatgtgcagtctgtgtctattattgacacagaattaaaggttaaagactcacagcccatcgatttgagtgcatgcactgttgcacttcacattttccagctgaatgaagatggccccagcagtgaaaatctggaggaagagacagaaaacataattgcagcaaatcactgggttctacctgcagctgaattccatgggctttgggacagcttggtatacgatgtggaagtcaaatcccatctcctcgattatgtgatgacaactttactgttttcagacaagaacgtcaacagcaacctcatcacctggaaccgggtggtgctgctccacggtcctcctggcactggaaaaacatccctgtgtaaagcgttagcccagaaattgacaattagactttcaagcaggtaccgatatggccaattaattgaaataaacagccacagcctcttttctaagtggttttcggaaagtggcaagctggtaaccaagatgtttcagaagattcaggatttgattgatgataaagacgccctggtgttcgtgctgattgatgaggtggagagtctcacagccgcccgaaatgcctgcagggcgggcaccgagccatcagatgccatccgcgtggtcaatgctgtcttgacccaaattgatcagattaaaaggcattccaatgttgtgattctgaccacttctaacatcaccgagaagatcgacgtggccttcgtggacagggctgacatcaagcagtacattgggccaccctctgcagcagccatcttcaaaatctacctctcttgtttggaagaactgatgaagtgtcagatcatataccctcgccagcagctgctgaccctccgagagctagagatgattggcttcattgaaaacaacgtgtcaaaattgagccttcttttgaatgacatttcaaggaagagcgagggcctcagcggccgggtcctgagaaaactcccctttctggctcatgcgctgtatgtccaggcccccaccgtcaccatagaggggttcctccaggccctgtctctggcagtggacaagcagtttgaagagagaaagaagcttgcagcttacatctgatcctgggcttccccatctggtgcttttcccatggagaacacacaaccagtaagtgaggttgccccacacagccgtctcccagggaatcccttctgcaaaccaaacgttacttagactgcaagctagaaagccaccaaggccaggctttgttaaaagaagtgtattctatttatgttgttttaaaatgcatactgagagacaaacatcttgtcattttcactgtttgtaaaagataattcagattgtttgtctccttgtgaagaaccatcgaaacctgtttgttcccagcccacccccagtggatgggatgcataatgccagcaagttttgtttaacagcaaaaaaggaagattaatgcaggtgttatagaagccagaagagaaactgtgtcaccctaaagaagcatataatcatagcattaaaaatgcacacattactccaggtggaaggtggcaattgctttctgatatcagctcgtttgatttagtgcaaaaatgttttcaagactatttaatggatgtaaaaaagcctatttctacattataccaactgagaaaaaaatggtcggtaaagtgttctttcataataaataatcagacatggtcccatttgcaggaaaagtgcagactctgagtgttccagggaaacacatgctggacatcccttgtaacccggtatgggcgcccctgcattgctgggatgtttctgcccacggttttgtttgtgcaataacgttatcacatttctaatgaggattcacattaatataatataaaataaataggtcagttactggtctctttctccgaatgttatgttttgcttttatctcacagtaaaataaatataattaatggtttgcatgtgaaattcacttttgaaagaacatgttaccttaccttttgttttagaagttttcaagtattaaaatattttttagaa

SEQ ID NO: 292684 - DNA, 2538 bp, Homo sapiens
ttcttgtgcttcttgcccatggcggcgccggcggcgggcccgaggcgggggctgggaacagctggcacccggtcggaccttggccgccaccgccccctggccctggctggccgcccgcgctcgctgcgccgaggttgccgagctcgctgggccgcgccggaaacggggcgaggcggggccgcggcaggaagtggccctgccgggcccgagcgcttccgggtcaggaggtggtgcgcctcgcgcggcagattcgaagctagggcggggcccgcgggctgaggcagcggctgtggcggcgacgctgggcgtgaggtggcggcggccgcgccctggttgggtccccactgctctcgggggcgccatggacgaggccgtgggcgacctgaagcaggcgcttccctgtgtggccgagtcgccaacggtccacgtggaggtgcatcagcgcggcagcagcactgcaaagaaagaagacataaacctgagtgttagaaagctactcaacagacataatattgtgtttggtgattacacatggactgagtttgatgaaccttttttgaccagaaatgtgcagtctgtgtctattattgacacagaattaaaggttaaagactcacagcccatcgatttgagtgcatgcactgttgcacttcacattttccagctgaatgaagatggccccagcagtgaaaatctggaggaagagacagcttggtatacgatgtggaagtcaaatcccatctcctcgattatgtgatgacaactttactgttttcagacaagaacgtcaacagcaacctcatcacctggaaccgggtggtgctgctccacggtcctcctggcactggaaaaacatccctgtgtaaagcgttagcccagaaattgacaattagactttcaagcaggtaccgatatggccaattaattgaaataaacagccacagcctcttttctaagtggttttcggaaagtggcaagctggtaaccaagatgtttcagaagattcaggatttgattgatgataaagacgccctggtgttcgtgctgattgatgaggtggagagtctcacagccgcccgaaatgcctgcagggcgggcaccgagccatcagatgccatccgcgtggtcaatgctgtcttgacccaaattgatcagattaaaaggcattccaatgttgtgattctgaccacttctaacatcaccgagaagatcgacgtggccttcgtggacagggctgacatcaagcagtacattgggccaccctctgcagcagccatcttcaaaatctacctctcttgtttggaagaactgatgaagtgtcagatcatataccctcgccagcagctgctgaccctccgagagctagagatgattggcttcattgaaaacaacgtgtcaaaattgagccttcttttgaatgacatttcaaggaagagcgagggcctcagcggccgggtcctgagaaaactcccctttctggctcatgcgctgtatgtccaggcccccaccgtcaccatagaggggttcctccaggccctgtctctggcagtggacaagcagtttgaagagagaaagaagcttgcagcttacatctgatcctgggcttccccatctggtgcttttcccatggagaacacacaaccagtaagtgaggttgccccacacagccgtctcccagggaatcccttctgcaaaccaaacgttacttagactgcaagctagaaagccaccaaggccaggctttgttaaaagaagtgtattctatttatgttgttttaaaatgcatactgagagacaaacatcttgtcattttcactgtttgtaaaagataattcagattgtttgtctccttgtgaagaaccatcgaaacctgtttgttcccagcccacccccagtggatgggatgcataatgccagcaagttttgtttaacagcaaaaaaggaagattaatgcaggtgttatagaagccagaagagaaactgtgtcaccctaaagaagcatataatcatagcattaaaaatgcacacattactccaggtggaaggtggcaattgctttctgatatcagctcgtttgatttagtgcaaaaatgttttcaagactatttaatggatgtaaaaaagcctatttctacattataccaactgagaaaaaaatggtcggtaaagtgttctttcataataaataatcagacatggtcccatttgcaggaaaagtgcagactctgagtgttccagggaaacacatgctggacatcccttgtaacccggtatgggcgcccctgcattgctgggatgtttctgcccacggttttgtttgtgcaataacgttatcacatttctaatgaggattcacattaatataatataaaataaataggtcagttactggtctctttctccgaatgttatgttttgcttttatctcacagtaaaataaatataattaatggtttgcatgtgaaattcacttttgaaagaacatgttaccttaccttttgttttagaagttttcaagtattaaaatattttttagaa

SEQ ID NO: 292685 - DNA, 2325 bp, Homo sapiens
  misc_feature (7)..(7): n is a, c, g, or t
agggaanacagattacggctaggtacgagtgctggtgtcggggctgaggcagcggctgtggcggcgacgctgggcgtgaggtggcggcggccgcgccctggttgggtccccactgctctcgggggcgccatggacgaggccgtgggcgacctgaagcaggcgcttccctgtgtggccgagtcgccaacggtccacgtggaggtgcatcagcgcggcagcagcactgcaaagaaagaagacataaacctgagtgttagaaagctactcaacagacataatattgtgtttggtgattacacatggactgagtttgatgaaccttttttgaccagaaatgtgcagtctgtgtctattattgacacagaattaaaggttaaagactcacagctgaatgaagatggccccagcagtgaaaatctggaggaagagacagaaaacataattgcagcaaatcactgggttctacctgcagctgaattccatgggctttgggacagcttggtatacgatgtggaagtcaaatcccatctcctcgattatgtgatgacaactttactgttttcagacaagaacgtcaacagcaacctcatcacctggaaccgggtggtgctgctccacggtcctcctggcactggaaaaacatccctgtgtaaagcgttagcccagaaattgacaattagactttcaagcaggtaccgatatggccaattaattgaaataaacagccacagcctcttttctaagtggttttcggaaagtggcaagctggtaaccaagatgtttcagaagattcaggatttgattgatgataaagacgccctggtgttcgtgctgattgatgaggtggagagtctcacagccgcccgaaatgcctgcagggcgggcaccgagccatcagatgccatccgcgtggtcaatgctgtcttgacccaaattgatcagattaaaaggcattccaatgttgtgattctgaccacttctaacatcaccgagaagatcgacgtggccttcgtggacagggctgacatcaagcagtacattgggccaccctctgcagcagccatcttcaaaatctacctctcttgtttggaagaactgatgaagtgtcagatcatataccctcgccagcagctgctgaccctccgagagctagagatgattggcttcattgaaaacaacgtgtcaaaattgagccttcttttgaatgacatttcaaggaagagcgagggcctcagcggccgggtcctgagaaaactcccctttctggctcatgcgctgtatgtccaggcccccaccgtcaccatagaggggttcctccaggccctgtctctggcagtggacaagcagtttgaagagagaaagaagcttgcagcttacatctgatcctgggcttccccatctggtgcttttcccatggagaacacacaaccagtaagtgaggttgccccacacagccgtctcccagggaatcccttctgcaaaccaaacgttacttagactgcaagctagaaagccaccaaggccaggctttgttaaaagaagtgtattctatttatgttgttttaaaatgcatactgagagacaaacatcttgtcattttcactgtttgtaaaagataattcagattgtttgtctccttgtgaagaaccatcgaaacctgtttgttcccagcccacccccagtggatgggatgcataatgccagcaagttttgtttaacagcaaaaaaggaagattaatgcaggtgttatagaagccagaagagaaactgtgtcaccctaaagaagcatataatcatagcattaaaaatgcacacattactccaggtggaaggtggcaattgctttctgatatcagctcgtttgatttagtgcaaaaatgttttcaagactatttaatggatgtaaaaaagcctatttctacattataccaactgagaaaaaaatggtcggtaaagtgttctttcataataaataatcagacatggtcccatttgcaggaaaagtgcagactctgagtgttccagggaaacacatgctggacatcccttgtaacccggtatgggcgcccctgcattgctgggatgtttctgcccacggttttgtttgtgcaataacgttatcacatttctaatgaggattcacattaatataatataaaataaataggtcagttactggtctctttctccgaatgttatgttttgcttttatctcacagtaaaataaatataattaatggtttgcatgtgaaattcacttttgaaagaacatgttaccttaccttttgttttagaagttttcaagtattaaaatattttttagaa

SEQ ID NO: 292686 - DNA, 1908 bp, Homo sapiens
ttcttgtgcttcttgcccatggcggcgccggcggcgggcccgaggcgggggctgggaacagctggcacccggtcggaccttggccgccaccgccccctggccctggctggccgcccgcgctcgctgcgccgaggttgccgagctcgctgggccgcgccggaaacggggcgaggcggggccgcggcaggaagtggccctgccgggcccgagcgcttccgggtcaggaggtggtgcgcctcgcgcggcagattcgaagctagggcggggcccgcgggctgaggcagcggctgtggcggcgacgctgggcgtgaggtggcggcggccgcgccctggttgggtccccactgctctcgggggcgccatggacgaggccgtgggcgacctgaagcaggcgcttccctgtgtggccgagtcgccaacggtccacgtggaggtgcatcagcgcggcagcagcactgcaaagaaagaagacataaacctgagtgttagaaagctactcaacagacataatattgtgtttggtgattacacatggactgagtttgatgaaccttttttgaccagaaatgtgcagtctgtgtctattattgacacagaattaaaggttaaagactcacagcccatcgatttgagtgcatgcactgttgcacttcacattttccagctgaatgaagatggccccagcagtgaaaatctggaggaagagacagaaaacataattgcagcaaatcactgggttctacctgcagctgaattccatgggctttgggacagcttggtatacgatgtggaagtcaaatcccatctcctcgattatgtgatgacaactttactgttttcagacaagaacgtcaacagcaacctcatcacgcccccaccgtcaccatagaggggttcctccaggccctgtctctggcagtggacaagcagtttgaagagagaaagaagcttgcagcttacatctgatcctgggcttccccatctggtgcttttcccatggagaacacacaaccagtaagtgaggttgccccacacagccgtctcccagggaatcccttctgcaaaccaaacgttacttagactgcaagctagaaagccaccaaggccaggctttgttaaaagaagtgtattctatttatgttgttttaaaatgcatactgagagacaaacatcttgtcattttcactgtttgtaaaagataattcagattgtttgtctccttgtgaagaaccatcgaaacctgtttgttcccagcccacccccagtggatgggatgcataatgccagcaagttttgtttaacagcaaaaaaggaagattaatgcaggtgttatagaagccagaagagaaactgtgtcaccctaaagaagcatataatcatagcattaaaaatgcacacattactccaggtggaaggtggcaattgctttctgatatcagctcgtttgatttagtgcaaaaatgttttcaagactatttaatggatgtaaaaaagcctatttctacattataccaactgagaaaaaaatggtcggtaaagtgttctttcataataaataatcagacatggtcccatttgcaggaaaagtgcagactctgagtgttccagggaaacacatgctggacatcccttgtaacccggtatgggcgcccctgcattgctgggatgtttctgcccacggttttgtttgtgcaataacgttatcacatttctaatgaggattcacattaatataatataaaataaataggtcagttactggtctctttctccgaatgttatgttttgcttttatctcacagtaaaataaatataattaatggtttgcatgtgaaattcacttttgaaagaacatgttaccttaccttttgttttagaagttttcaagtattaaaatattttttagaa

SEQ ID NO: 292687 - DNA, 1319 bp, Homo sapiens
gtgtgtgagtcaggaaggccgtcgccacgggcagagcgacgcgtgcggggagcgtgtgtgagtcaggagggccgtcgccacgggcacagtgacgtgcgtgtcagatcatataccctcgccagcagctgctgaccctccgagagctagagatgattggcttcattgaaaacaacgtgtcaaaattgagccttcttttgaatgacatttcaaggaagagcgagggcctcagcggccgggtcctgagaaaactcccctttctggctcatgcgctgtatgtccaggcccccaccgtcaccatagaggggttcctccaggccctgtctctggcagtggacaagcagtttgaagagagaaagaagcttgcagcttacatctgatcctgggcttccccatctggtgcttttcccatggagaacacacaaccagtaagtgaggttgccccacacagccgtctcccagggaatcccttctgcaaaccaaacgttacttagactgcaagctagaaagccaccaaggccaggctttgttaaaagaagtgtattctatttatgttgttttaaaatgcatactgagagacaaacatcttgtcattttcactgtttgtaaaagataattcagattgtttgtctccttgtgaagaaccatcgaaacctgtttgttcccagcccacccccagtggatgggatgcataatgccagcaagttttgtttaacagcaaaaaaggaagattaatgcaggtgttatagaagccagaagagaaactgtgtcaccctaaagaagcatataatcatagcattaaaaatgcacacattactccaggtggaaggtggcaattgctttctgatatcagctcgtttgatttagtgcaaaaatgttttcaagactatttaatggatgtaaaaaagcctatttctacattataccaactgagaaaaaaatggtcggtaaagtgttctttcataataaataatcagacatggtcccatttgcaggaaaagtgcagactctgagtgttccagggaaacacatgctggacatcccttgtaacccggtatgggcgcccctgcattgctgggatgtttctgcccacggttttgtttgtgcaataacgttatcacatttctaatgaggattcacattaatataatataaaataaataggtcagttactggtctctttctccgaatgttatgttttgcttttatctcacagtaaaataaatataattaatggtttgcatgtgaaattcacttttgaaagaacatgttaccttaccttttgttttagaagttttcaagtattaaaatattttttagaa

SEQ ID NO: 292688 - DNA, 2035 bp, Homo sapiens
ttcttgtgcttcttgcccatggcggcgccggcggcgggcccgaggcgggggctgggaacagctggcacccggtcggaccttggccgccaccgccccctggccctggctggccgcccgcgctcgctgcgccgaggttgccgagctcgctgggccgcgccggaaacggggcgaggcggggccgcggcaggaagtggccctgccgggcccgagcgcttccgggtcaggaggtggtgcgcctcgcgcggcagattcgaagctagggcggggcccgcgggctgaggcagcggctgtggcggcgacgctgggcgtgaggtggcggcggccgcgccctggttgggtccccactgctctcgggggcgccatggacgaggccgtgggcgacctgaagcaggcgcttccctgtgtggccgagtcgccaacggtccacgtggaggtgcatcagcgcggcagcagcactgcaaagaaagaagacataaacctgagtgttagaaagctactcaacagacataatattgtgtttggtgattacacatggactgagtttgatgaaccttttttgaccagaaatgtgcagtctgtgtctattattgacacagaattaaaggttaaagactcacagcccatcgatttgagtgcatgcactgttgcacttcacattttccagctgaatgaagatggccccagcagtgaaaatctggaggaagagacagaaaacataattgcagcaaatcactgggttctacctgcagctgaattccatgggctttgggacagcttggtatacgatgtggaagtcaaatcccatctcctcgattatgtgatgacaactttactgttttcagacaagaacgtcaacagcaacctcatcacctggaaccgggtggtgctgctccacggtcctcctggcactggaaaaacatccctgtgtaaagcgttagcccagaaattgacaattagactttcaagcaggtaccgatatggccaattaattgaaataaacagccacagcctcttttctaagtggttttcggaaagtggcaagctggtaaccaagatgtttcagaagattcaggatttgattgatgataaagacgccctggtgttcgtgctgattgatgaggtggagagtctcacagccgcccgaaatgcctgcagggcgggcaccgagccatcagatgccatccgcgtggtcaatgctgtcttgacccaaattgatcagattaaaaggcattccaatgttgtgattctgaccacttctaacatcaccgagaagatcgacgtggccttcgtggacagggctgacatcaagcagtacattgggccaccctctgcagcagccatcttcaaaatctacctctcttgtttggaagaactgatgaagtgtcagatcatataccctcgccagcagctgctgaccctccgagagctagagatgattggcttcattgaaaacaacgtgtcaaaattgagccttcttttgaatgacatttcaaggaagagcgagggcctcagcggccgggtcctgagaaaactcccctttctggctcatgcgctgtatgtccaggcccccaccgtcaccatagaggggttcctccaggccctgtctctggcagtggacaagcagtttgaagagagaaagaagcttgcagcttacatctgatcctgggcttccccatctggtgcttttcccatggagaacacacaaccagaaaagtgcagactctgagtgttccagggaaacacatgctggacatcccttgtaacccggtatgggcgcccctgcattgctgggatgtttctgcccacggttttgtttgtgcaataacgttatcacatttctaatgaggattcacattaatataatataaaataaataggtcagttactggtctctttctccgaatgttatgttttgcttttatctcacagtaaaataaatataattaatggtttgcatgtgaaattcacttttgaaagaacatgttaccttaccttttgttttagaagttttcaagtattaaaatattttttagaa

SEQ ID NO: 292689 - DNA, 2046 bp, Homo sapiens
ttcttgtgcttcttgcccatggcggcgccggcggcgggcccgaggcgggggctgggaacagctggcacccggtcggaccttggccgccaccgccccctggccctggctggccgcccgcgctcgctgcgccgaggttgccgagctcgctgggccgcgccggaaacggggcgaggcggggccgcggcaggaagtggccctgccgggcccgagcgcttccgggtcaggaggtggtgcgcctcgcgcggcagattcgaagctagggcggggcccgcgggctgaggcagcggctgtggcggcgacgctgggcgtgaggtggcggcggccgcgccctggttgggtccccactgctctcgggggcgccatggacgaggccgtgggcgacctgaagcaggcgcttccctgtgtggccgagtcgccaacggtccacgtggaggtgcatcagcgcggcagcagcactgcaaagaaagaagacataaacctgagtgttagaaagctactcaacagacataatattgtgtttggtgattacacatggactgagtttgatgaaccttttttgaccagaaatgtgcagtctgtgtctattattgacacagaattaaaggttaaagactcacagcccatcgatttgagtgcatgcactgttgcacttcacattttccagctgaatgaagatggccccagcagtgaaaatctggaggaagagacagaaaacataattgcagcaaatcactgggttctacctgcagctgaattccatgggctttgggacagcttggtatacgatgtggaagtcaaatcccatctcctcgattatgtgatgacaactttactgttttcagacaagaacgtcaacagcaacctcatcacctggaaccgggtggtgctgctccacggtcctcctggcactggaaaaacatccctgtgtaaagcgttagcccagaaattgacaattagactttcaagcaggtaccgatatggccaattaattgaaataaacagccacagcctcttttctaagtggttttcggaaagtggcaagctggtaaccaagatgtttcagaagattcaggatttgattgatgataaagacgccctggtgttcgtgctgattgatgaggtggagagtctcacagccgcccgaaatgcctgcagggcgggcaccgagccatcagatgccatccgcgtggtcaatgctgtcttgacccaaattgatcagattaaaaggcattccaatgttgtgattctgaccacttctaacatcaccgagaagatcgacgtggccttcgtggacagggctgacatcaagcagtacattgggccaccctctgcagcagccatcttcaaaatctacctctcttgtttggaagaactgatgaagtgtcagatcatataccctcgccagcagctgctgaccctccgagagctagagatgattggcttcattgaaaacaacgtgtcaaaattgagccttcttttgaatgacatttcaaggaagagcgagggcctcagcggccgggtcctgagaaaactcccctttctggctcatgcgctgtatgtccaggcccccaccgtcaccatagaggggttcctccaggccctgtctctggcagtggacaagcagtttgaagagagaaagaagcttgcagcttacatctgatcctgggcttccccatctggtgcttttcccatggagaacacacaaccagcagacgcatgtctagaagacaaaaggtacaatattcttgctgccgaagaaaagaaaaaattgccaaacctgaattgctgtgaaggacatagcttggaaggcatgacagaaggttccctgcagttatggaggatgagtatgggtgaggtgctgtggaccccagctccagtatcactgggcaagtcttgacaggacaccaaggtcatggaggtcagccttgtggagcccatgctgcactcagatgagatctgtgggtccaaacagctcaggccatctgagtttgtcctgtttgatttgcttgttatataaaatcaatcaatcaaaagatagatgagtga

SEQ ID NO: 292690 - DNA, 874 bp, Homo sapiens
aggatactcgaagtcccgttctgaacacctatcgatacttaaactgcgagcgacaaagtcacgaagggcaccgactgttgttcagcgaagtgtcttctatcctatgttgtaatacgatgtcttgtgcataactgtcatcttgtcattttcactgtttgtaaaagataattcagattgtttgtctccttgtgaagaaccatcgaaacctgtttgttcccagcccacccccagtggatgggatgcataatgccagcaagttttgtttaacagcaaaaaaggaagattaatgcaggtgttatagaagccagaagagaaactgtgtcaccctaaagaagcatataatcatagcattaaaaatgcacacattactccaggtggaaggtggcaattgctttctgatatcagctcgtttgatttagtgcaaaaatgttttcaagactatttaatggatgtaaaaaagcctatttctacattataccaactgagaaaaaaatggtcggtaaagtgttctttcataataaataatcagacatggtcccatttgcaggaaaagtgcagactctgagtgttccagggaaacacatgctggacatcccttgtaacccggtatgggcgcccctgcattgctgggatgtttctgcccacggttttgtttgtgcaataacgttatcacatttctaatgaggattcacattaatataatataaaataaataggtcagttactggtctctttctccgaatgttatgttttgcttttatctcacagtaaaataaatataattaatggtttgcatgtgaaattcacttttgaaagaacatgttaccttaccttttgttttagaagttttcaagtattaaaatattttttagaa

SEQ ID NO: 292691 - DNA, 404 bp, Homo sapiens
agtatggtccactgaaggagctgaaagaggtgatagaactacataggagaaaggaggaaagtgctgcaggatgaaaacctgcgttaacaaattggatagatcatgtctggagttaatacactgagacatagcaataggaggctaattaaaggtaagaggtaagtatgaaaaggatgagctaagtagtgacctcagacacatggaggtagaggtgtagtggggaaaagaagagattttattctaagcaggagattttattctaagcctttctgattgatttcctttttaccatgcatagattctactttgataattactcttaacatatttcctgtgattctgatatgcacacatcacacttacattctctgcccaaataatcattgcccaagaaatctatactt

SEQ ID NO: 292692 - DNA, 830 bp, Homo sapiens
gcggccgcggcaccctcgtcaggcgccgccgctgagggcaggcagcccggcagccactacacacggacccgtgacgtcgggcgtagcgcggcgcacgtcacggccgctcgctcgtgcgcgcgcacccctccgcccggcggtagcggaacccgccgcgggcgcgcgcccggcccaggggagtgggtcggcgcctgcgcagaggcccgccacgcccacacacaggccaccgcccccaccggccggacggcgcggggattcccagtcctggctccgccccggcctcggccccgcccctgcccctgccccggggcagcctgtgctgttccgtgtgcgcggcgcatacgcacctgggttgtctcgagcctgcggtagtggccagatcccagacatccgagtagatcccgtgaaaagcttctacttggtttcttcgtacattctggatccacccctttcatgcatattccagaccacatttccactggagcagttgaaatgagagagatgggaatgggactcacccgaaccagaggaatttttattacagacccattaacagaggtgtcaaagtcacaggaacaaggatgtgcacctcagaaacacagagctcagtggaaaatcagtttgcttctatttgtttaaaaaatgggggacttatgcataaatctaagaccttcttgaatctaacattctaagacctgtatgccacagaaaggagggtctcagaacgccggaggatagtatttaaatcttaaatatctatattgttctccacagttactgggtcaccacatagcaggcattcaataaaaacgtgtttgtttactaagtaa

SEQ ID NO: 292693 - DNA, 510 bp, Homo sapiens
gcagggacgtagagagccgcaggcccaaggaggggccgcccccgccgagcccgcccctccgccccagcgcggcctgtcaccgcggccccagcttctacttggtttcttcgtacattctggatccacccctttcatgcatattccagaccacatttccactggagcagttgaaatgagagagatgggaatgggactcacccgaaccagaggaatttttattacagacccattaacagaggtgtcaaagtcacaggaacaaggatgtgcacctcagaaacacagagctcagtggaaaatcagtttgcttctatttgtttaaaaaatgggggacttatgcataaatctaagaccttcttgaatctaacattctaagacctgtatgccacagaaaggagggtctcagaacgccggaggatagtatttaaatcttaaatatctatattgttctccacagttactgggtcaccacatagcaggcattcaataaaaacgtgtttgtttactaagtaa

SEQ ID NO: 292694 - DNA, 1399 bp, Homo sapiens
gcggccgcggcaccctcgtcaggcgccgccgctgagggcaggcagcccggcagccactacacacggacccgtgacgtcgggcgtagcgcggcgcacgtcacggccgctcgctcgtgcgcgcgcacccctccgcccggcggtagcggaacccgccgcgggcgcgcgcccggcccaggggagtgggtcggcgcctgcgcagaggcccgccacgcccacacacaggccaccgcccccaccggccggacggcgcggggattcccagtcctggctccgccccggcctcggccccgcccctgcccctgccccggggcagcctgtgctgttccgtgtgcgcggcgcatacgcacctgggttgtctcgagcctgcggtagtggccagatcccagacatccgagtagatcccgtgaaaaggtctcccacgtgggctgtggacagggcccaagggtagcagagctagcagaggcagtgacggactgtgtggcaggtcatttgcaaggagaaaagccgtctgcctcttaatttgtggctcaagtttcagaatttttttcctgagggactttagaaattacttcaggcttgccacctaaccttaaaccacccccttggagactggctaagtgttatttgtgttttctgtttagttcttatcaccatcgatacttggttatgactggttgtgtacattggttagcccagcaagtattacttctccagcttaacagatgtggaaacttaagcccagagacatgagttgacaccccacccccaaagctagagtctaaaaccctttctttcgctcctcatctcccacaggataaaatgcaaattaatcagactagtggtgaggccctccgtggtgtgactaacctgcatcccgacgttttcaccctactttgatccagaaagcacctttccgccccatctcttctcctttccttaaataccccttacaacttcctgtaccattcttccctgttcagcttctacttggtttcttcgtacattctggatccacccctttcatgcatattccagaccacatttccactggagcagttgaaatgagagagatgggaatgggactcacccgaaccagaggaatttttattacagacccattaacagaggtgtcaaagtcacaggaacaaggatgtgcacctcagaaacacagagctcagtggaaaatcagtttgcttctatttgtttaaaaaatgggggacttatgcataaatctaagaccttcttgaatctaacattctaagacctgtatgccacagaaaggagggtctcagaacgccggaggatagtatttaaatcttaaatatctatattgttctccacagttactgggtcaccacatagcaggcattcaataaaaacgtgtttgtttactaagtaa

SEQ ID NO: 292695 - DNA, 1058 bp, Homo sapiens
ggcacgagggagacggactcttgctatgttgcccaggctggtcttgaactcctggcctcaagcaatcctcctgcctcagcctcccaaagcacggggattacaaaccctgctgagggatgcccaagaagttccagggtgagaacaccaagtcggcagcggcccgggcacgtagggcagaggccaaggcggccgctgatgccaagaagcagaaggagctggaggatgcctactggaaggacgacgacaaacacgtcatgaggaaggagcagcgcaaggaggagaaggagaagcggcgcctcgaccagctggaacgtaagaaggagacgcagcgcctactggaggaggaggactccaagctcaagggcggcaaggcgccgcgggtggccacgtccagcaaggtcacccgggcccagatcgaggacacgctgcgccgagaccatcagctcagggaggccccggacacagccgagaaagccaagagccatctggaggtgccgctggaggagaacgtgaaccgccgcgtgctggaggagggcagcgtggaggcgcgcaccatcgaggacgccattgcagtgctcagcgtggcggaggaggcggccgaccggcacccagaaagacgcatgcgggcagccttcacagcctttgaggaagcccagctgccgcggctcaaacaagagaaccccaacatgcggctgtcgcagctgaaacagctgctcaagaaggagtggctccgctctcctgacaaccccatgaaccagcgggccgtgcccttcaatgcccccaagtgagcccagaacttggggagccagttcacccacgggtggtccaggtcacgactctgcacgcccttaggccaggtcagctgcgagggtcacagagcgttccgggggccaaggcgccgggccccggggccatgctcttatcaccagccacccgtcctcccgccagagggtccctgccccgagtgacaccccatcccctcccatcccccggcgcgtgtgtgtagagcctcagggctgagtgcccaataaaggtggcggcaaggctgcggtgaggca

SEQ ID NO: 292696 - DNA, 994 bp, Homo sapiens
ccccccaggcggcgcgaccgggccggcgctggggtaagaagcctgctgagggatgcccaagaagttccagggtgagaacaccaagtcggcagcggcccgggcacgtagggcagaggccaaggcggccgctgatgccaagaagcagaaggagctggaggatgcctactggaaggacgacgacaaacacgtcatgaggaaggagcagcgcaaggaggagaaggagaagcggcgcctcgaccagctggaacgtaagaaggagacgcagcgcctactggaggaggaggactccaagctcaagggcggcaaggcgccgcgggtggccacgtccagcaaggtcacccgggcccagatcgaggacacgctgcgccgagaccatcagctcagggaggccccggacacagccgagaaagccaagagccatctggaggtgccgctggaggagaacgtgaaccgccgcgtgctggaggagggcagcgtggaggcgcgcaccatcgaggacgccattgcagtgctcagcgtggcggaggaggcggccgaccggcacccagaaagacgcatgcgggcagccttcacagcctttgaggaagcccagctgccgcggctcaaacaagagaaccccaacatgcggctgtcgcagctgaaacagctgctcaagaaggagtggctccgctctcctgacaaccccatgaaccagcgggccgtgcccttcaatgcccccaagtgagcccagaacttggggagccagttcacccacgggtggtccaggtcacgactctgcacgcccttaggccaggtcagctgcgagggtcacagagcgttccgggggccaaggcgccgggccccggggccatgctcttatcaccagccacccgtcctcccgccagagggtccctgccccgagtgacaccccatcccctcccatcccccggcgcgtgtgtgtagagcctcagggctgagtgcccaataaaggtggcggcaaggctgcggtgaggca

SEQ ID NO: 292697 - DNA, 1229 bp, Homo sapiens
  misc_feature (1229)..(1229): n is a, c, g, or t
ccccccaggcggcgcgaccgggccggcgctggggtaagaagcctgctgagggatgcccaagaagttccagggtgagaacaccaagtcggcagcggcccgggcacgtagggcagaggccaaggcggccgctgatgccaagaagcagaaggagctggaggatgcctactggaaggacgacgacaaacacgtcatgaggaaggagcagcgcaaggaggagaaggagaagcggcgcctcgaccagctggaacgtaagaaggagacgcagcgcctactggaggaggaggactccaagctcaagggcggcaaggcgccgcgggtggccacgtccagcaaggtcacccgggcccagatcgaggacacgctgcgccgagaccatcagctcagggaggccccggacacagccgagaaagccaagagccatctggaggtgccgctggaggagaacgtgaaccgccgcgtgctggaggagggcagcgtggaggcgcgcaccatcgaggacgccattgcagtgctcagcgtggcggaggaggcggccgaccggcacccagaaagacgcatgcgggcagccttcacagcctttgaggaagcccagctgccgcggctcaaacaagagaaccccaacatgcggctgtcgcagctgaaacagctgctcaagaaggagtggctccgctctcctgacaaccccatgaaccagcgggccgtgcccttcaatgcccccaagtgagcccagaacttggggagccagttcacccacgggtggtccaggtcacgactctgcacgcccttaggccaggtcagctgcgagggtcacagagcgttccgggggccaaggcgccgggccccggggccatgctcttatcaccagccacccgtcctcccgccagagggtccctgccccgagtgacaccccatcccctcccatcccccggcgcgtgtgtgtagagcctcagggctgagtgcccaataaaggtggcggcaaggctgcggtgaggcaaaaaaaaaaaaaaaaaaaaaaaaaaaccccggggacaataaaagacggggtgggggaaaagaggggcaaggaagtggcgccctggtgccaataagcggtgcttccggagaaccccaagtttctttggttcacaacgcggggaaaaaccgcgcgggactcccccctatatagggaaggaccgcatataaatcccgaatagccccgggttaacccggataatggcgacagcgacaan

SEQ ID NO: 292698 - DNA, 987 bp, Homo sapiens
ccgggctaggtagcgaggcctgggtggctggaagcctgctgagggatgcccaagaagttccagggtgagaacaccaagtcggcagcggcccgggcacgtagggcagaggccaaggcggccgctgatgccaagaagcagaaggagctggaggatgcctactggaaggacgacgacaaacacgtcatgaggaaggagcagcgcaaggaggagaaggagaagcggcgcctcgaccagctggaacgtaagaaggagacgcagcgcctactggaggaggaggactccaagctcaagggcggcaaggcgccgcgggtggccacgtccagcaaggtcacccgggcccagatcgaggacacgctgcgccgagaccatcagctcagggaggccccggacacagccgagaaagccaagagccatctggaggtgccgctggaggagaacgtgaaccgccgcgtgctggaggagggcagcgtggaggcgcgcaccatcgaggacgccattgcagtgctcagcgtggcggaggaggcggccgaccggcacccagaaagacgcatgcgggcagccttcacagcctttgaggaagcccagctgccgcggctcaaacaagagaaccccaacatgcggctgtcgcagctgaaacagctgctcaagaaggagtggctccgctctcctgacaaccccatgaaccagcgggccgtgcccttcaatgcccccaagtgagcccagaacttggggagccagttcacccacgggtggtccaggtcacgactctgcacgcccttaggccaggtcagctgcgagggtcacagagcgttccgggggccaaggcgccgggccccggggccatgctcttatcaccagccacccgtcctcccgccagagggtccctgccccgagtgacaccccatcccctcccatcccccggcgcgtgtgtgtagagcctcagggctgagtgcccaataaaggtggcggcaaggctgcggtgaggca

SEQ ID NO: 292699 - DNA, 1315 bp, Homo sapiens
tgggtggcttaaacagcagaaattgccaggcactgtggctcacacctgtaatccaggcactttgagaggctagtctcgaacttctgaccgcaagtgatccgcccgcctcggcctcccaaagtgctgggattacgggtgtgagccaccagacctggcctaaatgagctcatttggtgtcatgatgtgaattttgccttaataaacttttacaaggagagcgctaagtccaaagcccttgttttatacagagaaggccacagaggccccaagagggtcatggctgcccaagtgtgattctgggggtgctgagtgccgatgtcccctccggcccctgctcccccatccccatcctcttcccgcagcctgctgagggatgcccaagaagttccagggtgagaacaccaagtcggcagcggcccgggcacgtagggcagaggccaaggcggccgctgatgccaagaagcagaaggagctggaggatgcctactggaaggacgacgacaaacacgtcatgaggaaggagcagcgcaaggaggagaaggagaagcggcgcctcgaccagctggaacgtaagaaggagacgcagcgcctactggaggaggaggactccaagctcaagggcggcaaggcgccgcgggtggccacgtccagcaaggtcacccgggcccagatcgaggacacgctgcgccgagaccatcagctcagggaggccccggacacagccgagaaagccaagagccatctggaggtgccgctggaggagaacgtgaaccgccgcgtgctggaggagggcagcgtggaggcgcgcaccatcgaggacgccattgcagtgctcagcgtggcggaggaggcggccgaccggcacccagaaagacgcatgcgggcagccttcacagcctttgaggaagcccagctgccgcggctcaaacaagagaaccccaacatgcggctgtcgcagctgaaacagctgctcaagaaggagtggctccgctctcctgacaaccccatgaaccagcgggccgtgcccttcaatgcccccaagtgagcccagaacttggggagccagttcacccacgggtggtccaggtcacgactctgcacgcccttaggccaggtcagctgcgagggtcacagagcgttccgggggccaaggcgccgggccccggggccatgctcttatcaccagccacccgtcctcccgccagagggtccctgccccgagtgacaccccatcccctcccatcccccggcgcgtgtgtgtagagcctcagggctgagtgcccaataaaggtggcggcaaggctgcggtgaggca

SEQ ID NO: 292700 - DNA, 985 bp, Homo sapiens
tgggtggcttaaacagcagaaattgccaggcactgtggctcacacctgtaatccaggcactttgagaggctagtctcgaacttctgaccgcaagtgatccgcccgcctcggcctcccaaagtgctgggattacgggtgtgagccaccagacctggcctaaatgagctcatttggtgtcatgatgtgaattttgccttaataaacttttacaaggagagcgctaagtccaaagcccttgttttatacagagaaggccacagaggccccaagagggtcatggctgcccaagtgtgattctgggggtgctgagtgccgatgtcccctccggcccctgctcccccatccccatcctcttcccgcagcctgctgagggatgcccaagaagttccagggtgagaacaccaagtcggcagcggcccgggcacgtagggcagaggccaaggcggccgctgatgccaagaagcagaaggagctggaggatgcctactggaaggacgacgacaaacacgtcatgaggaaggagcagcgcaaggaggagaaggagaagcggcgcctcgaccagctggaacgtaagaaggagacgcagcgcctactggaacaagagaaccccaacatgcggctgtcgcagctgaaacagctgctcaagaaggagtggctccgctctcctgacaaccccatgaaccagcgggccgtgcccttcaatgcccccaagtgagcccagaacttggggagccagttcacccacgggtggtccaggtcacgactctgcacgcccttaggccaggtcagctgcgagggtcacagagcgttccgggggccaaggcgccgggccccggggccatgctcttatcaccagccacccgtcctcccgccagagggtccctgccccgagtgacaccccatcccctcccatcccccggcgcgtgtgtgtagagcctcagggctgagtgcccaataaaggtggcggcaaggctgcggtgaggca

SEQ ID NO: 292701 - DNA, 750 bp, Homo sapiens
cagtttactccagagaagaaactgtgtctcataatttcttttgcatcatctggtcctccaccaaggctatgagaacagaaataaaattaagcacagtagataccagatgctcagagcagagcagccatggagctgctgggaccaaaccttgcctgacctagccaccaccacaccccagacatataaatttaaattttactgatataaagaatgcaaaacacaaaatttacaaagatcataaaacatacaatgttgtgtattgtaaattagtcacctgattctcacagaaaacttgttaatttctgctgtactccaaagccactaatggatgaaacttacgattagttccaacatgaatattggttgacatttttgtttatgttaaagtcaaagctgaaagtgatacaatggagacttcagaacttcacttgtcagttatttgtgtaggtttctttcccaggagactgcaaactcctttgaaggcaagatcagtgctggattatccaaaaggcattctaagcttgtgcttggggaaccagagaagcaaaagcaccaaaacacgtttctgaaaagcatttaatattttcaagcatgcgtcaacatagtctgcatgagaaacatcaaagctccatggcattttcttacacttatgttgtagtttatttcaatactgttttcatttgaattgtacttgagatgggagttggagtggagaatcataatcattttgtaaataaaatgttttaatcc

SEQ ID NO: 292702 - DNA, 464 bp, Homo sapiens
tctctaaatgaactataccccagagatggcacttttaggtttgatcataatagtgctgttcgatgtttgcatttggaattttcagactggtagttctgtgttcagtgagagctcagcatttcagaccctgccctctttttcattctatttcagttgtgtaggtttctttcccaggagactgcaaactcctttgaaggcaagatcagtgctggattatccaaaaggcattctaagcttgtgcttggggaaccagagaagcaaaagcaccaaaacacgtttctgaaaagcatttaatattttcaagcatgcgtcaacatagtctgcatgagaaacatcaaagctccatggcattttcttacacttatgttgtagtttatttcaatactgttttcatttgaattgtacttgagatgggagttggagtggagaatcataatcattttgtaaataaaatgttttaatcc

SEQ ID NO: 292703 - DNA, 608 bp, Homo sapiens
cagtttactccagagaagaaactgtgtctcataatttcttttgcatcatctggtcctccaccaaggctatgagaacagaaataaaattaagcacagtagataccagatgctcagagcagagcagccatggagctgctgggaccaaaccttgcctgacctagccaccaccacaccccagacatataaatttaaattttactgatataaagaatgcaaaacacaaaatttacaaagatcataaaacatacaatgttgtgtattgtaaattagtcacctgattctcacagaaaacttgttaatttctgctgtactccaaagccactaatggatgaaacttacgattagttccaacatgaatattggttgacatttttgtttatgttaaagtcaaagctgaaagtgatacaatggagacttcagaacttcacttgtcagttatgtgagtgatttctttgctaaatgtttagtaactttgggatggtggaagaagattcattttttggtgctatttacaatgtaatgaatctgcattattaatattttctcttaagtctaaacagtcaacaaaacagtaagcgcagccccaactcatagtatttgccaattct

SEQ ID NO: 292704 - DNA, 708 bp, Homo sapiens
atttcttttaaaacaaggatttgtataaatgaatctgaagtgttcactttaaaattaaagacataagggcaaattaaaaaattttaactagttttcttaaagaaaaattaacacttggtatctttattaaaattaaagaaataatgagaggcaaacaaattattatgggaaaaaaatagaaaaattctgtgatcatgttgagcaaaatctcaagaggcatttggggagtcaaaatcatgagtaaaattttgtgcacagaagttcaataatcacttaaatgtcggtaaaatggaaagtatcattacatcattaacttttattcacttaaaatatttttgctataaattcattttagcagtgcagccaaaatatatacacactatgccataaagaaatcttacctttttatcatatacatcttgccagtttactccagagaagaaactgtgtctcataatttcttttgcatcatctggtcctccaccaaggctatgagaacagaaataaaattaagtaagtataaaacatttacataagctcaaagcataacaaaaaatattttgtgaaagtgtaattttctgtgtaataaacagttcttgggataaatagctctaaaagtaaaaagcttttgctataagatctatttttcctaatatgcttgtaagaactagcttcagaacagtatggtatttggaaaagagcagaggc

SEQ ID NO: 292705 - DNA, 1877 bp, Homo sapiens
gtttgggtgtggccgcatggcgtgctgtggtgcaggtggccgaagggggcgttactgttgcgactggcatccgcatccggcagatgtagatggaaccaaagtccagaagttacgcgtcacccttgctctacagccaaacatgcaggactctagtaacccgcgaaatgatgggatagcgttgcaaatccttaaaagagtcttaacgaaatcctggctgacattgacttctccactgcaaccatcgagttcattgtctcctaaaccttgccatggaggcctgtggcacctgagccagccattatcatcaccagcacttccatgagctacaagctggacccactgcagtcctcctgacacactgaaatcagagcctgcacacagagcagcagatgcttcaatgtaaaggtcatttccaggtccttgacaggcgtgcatctgggccagatccatggcaataaccttcaggttgaggctagagggcttcagatgggcagcttcgaatgacaggagcaaggcacaagaggccggaaagggagggtgacattttcagcatctataagatcaactttagaaacatttgggggttgacaaattcccatcaagctctgtggatcttgtacaactgctcaccaccggcttctcatcagcacatgattggtgcagggttctgaggatgattttgagatgttccctgatgtggtcttgtgaggagatttcatgacagatggcaggaagcttcgtggagagatttctgaagacactcctgagctcccaacaccgggcaactctcttccagaggatagtggggtggagggtagaagaagggcaaagtcagctatgtgttccaagattactgaagcaggattctggccttcctgataagaacatgaccagatccagctggtttgcaacaagatgaacttcagtgctgagctttcaccaagtttttctcactacaatctcattgtaatactaaaatctccacccaagatggaggttatctgccattttctgtacatgtgttaccagaaaggggtcctgatccagaccccaaaagagggttcttggatctcacgcaacaaagagttcggggcgagtccatagagtaaagtgaaagcaagttcatcaagaaagcaaaggaataaagaatgcctactccataggcagagcagtggctttggctgctcagctgcttgtacttgttacttcttgagtatatgctaaacaagggattgattactccttgtttagcagttttctgggaaaggagtgggcaattcccagaactgagggttcctcccctttttagaccatatagggtgacttcctgatgttgccatggcatttgtaaactgtcatggcgctagtgggagtgtcttttagcatgctaatgcatgagcagtgaggatgacccgaggtcatttttgttaccatcttggttttggtgggttttggctggttttggccggcttctttaccacttctttttatcagcaaggtctttgtgacctgtacttagtgccgacttcctgtctcatcctgtgagtaagaatgcctaatctctcaggaatgcagcccagtaggtctcaaccttattttacccagcccccattcaagatggagtgactctggttcaaatgcctctgacacatgtgcctcatgtttgggcatgagacctcactgtgtaggtgcagagaagaccctgcctaaacattgcctacacgttgctcctttttcctgcctcaacttccttaaaatgacaagagcagagcccttttgggagctaacatcaggactccttttctgtactctgctccgttgtgctgctagagccacaagcctattaaactttgcctgaaataaattcctatttgcgc

SEQ ID NO: 292706 - DNA, 2303 bp, Homo sapiens
gtttgggtgtggccgcatggcgtgctgtggtgcaggtggccgaagggggcgttactgttgcgactggcatccgcatccggcagatgtagatggaaccaaagtccagaagttacgcgtcacccttgctctacagccaaacatgcaggactctagtaacccgcgaaatgatgggatagcgttgcaaatccttaaaagagtcttaacgaaatcctggctgacattgacttctccactgcaaccatcgagttcattgtctcctaaaccttgccatggaggcctgtggcacctgagccagccattatcatcaccagcacttccatgagctacaagctggacccactgcagtcctcctgacacactgaaatcagagcctgcacacagagcagcagatgcttcaatgtaaaggtcatttccaggtccttgacaggcgtgcatctgggccagatccatggcaataaccttcaggttgaggctagagggcttcagatgggcagcttcgaatgacaggagcaaggcacaagaggccggaaagggagggtgacattttcagcatctataagatcaactttagaaacatttgggggttgacaaattcccatcaagctctgtggatcttgtacaactgctcaccaccggcttctcatcagcacatgattggtgcagggttctgaggatgattttgagatgttccctgatgtggtcttgtgaggagatttcatgacagatggcaggaagcttcgtggagagatttctgaagacactcctgagctcccaacaccgggcaactctcttccagaggatagtggggtggagggtagaagaagggcaaagtcaggtttgtccttcggatcccccttcattctccttttgccaccgtaaaccaacttttgcttacagttagacaccagttttcggcagatgaaatccctctgatttcaggcattttgtcaattaagctgctcagcaacaataggataaacttatgaaaagaaaggagtagcagtcccacagacaaagcatccagcccctgcactgagacagtatagggaagggacttggtcctggcagacaggacagataatcaacatcctagtgggccttacacatgtgggcatattcttttccataccttcttgtctgttttaacaagctaaccccagtcacagtagcagagagagggtccatcctaacttagctgaccaggctggattcctaatcataaaaccaaaaaaggaagaacctaaccatttctctctttcagctatgtgttccaagattactgaagcaggattctggccttcctgataagaacatgaccagatccagctggtttgcaacaagatgaacttcagtgctgagctttcaccaagtttttctcactacaatctcattgtaatactaaaatctccacccaagatggaggttatctgccattttctgtacatgtgttaccagaaaggggtcctgatccagaccccaaaagagggttcttggatctcacgcaacaaagagttcggggcgagtccatagagtaaagtgaaagcaagttcatcaagaaagcaaaggaataaagaatgcctactccataggcagagcagtggctttggctgctcagctgcttgtacttgttacttcttgagtatatgctaaacaagggattgattactccttgtttagcagttttctgggaaaggagtgggcaattcccagaactgagggttcctcccctttttagaccatatagggtgacttcctgatgttgccatggcatttgtaaactgtcatggcgctagtgggagtgtcttttagcatgctaatgcatgagcagtgaggatgacccgaggtcatttttgttaccatcttggttttggtgggttttggctggttttggccggcttctttaccacttctttttatcagcaaggtctttgtgacctgtacttagtgccgacttcctgtctcatcctgtgagtaagaatgcctaatctctcaggaatgcagcccagtaggtctcaaccttattttacccagcccccattcaagatggagtgactctggttcaaatgcctctgacacatgtgcctcatgtttgggcatgagacctcactgtgtaggtgcagagaagaccctgcctaaacattgcctacacgttgctcctttttcctgcctcaacttccttaaaatgacaagagcagagcccttttgggagctaacatcaggactccttttctgtactctgctccgttgtgctgctagagccacaagcctattaaactttgcctgaaataaattcctatttgcgc

SEQ ID NO: 292707 - DNA, 1458 bp, Homo sapiens
gtttgggtgtggccgcatggcgtgctgtggtgcaggtggccgaagggggcgttactgttgcgactggcatccgcatccggcagatgtagatggaaccaaagtccagaagttacgcgtcacccttgctctacagccaaacatgcaggactctagtaacccgcgaaatgatgggatagcgttgcaaatccttaaaagagtcttaacgaaatcctggctgacattgacttctccactgcaaccatcgagttcattgtctcctaaaccttgccatggaggcctgtggcacctgagccagccattatcatcaccagcacttccatgagctacaagctggacccactgcagtcctcctgacacactgaaatcagagcctgcacacagagcagcagatgcttcaatgtaaaggtcatttccagctatgtgttccaagattactgaagcaggattctggccttcctgataagaacatgaccagatccagctggtttgcaacaagatgaacttcagtgctgagctttcaccaagtttttctcactacaatctcattgtaatactaaaatctccacccaagatggaggttatctgccattttctgtacatgtgttaccagaaaggggtcctgatccagaccccaaaagagggttcttggatctcacgcaacaaagagttcggggcgagtccatagagtaaagtgaaagcaagttcatcaagaaagcaaaggaataaagaatgcctactccataggcagagcagtggctttggctgctcagctgcttgtacttgttacttcttgagtatatgctaaacaagggattgattactccttgtttagcagttttctgggaaaggagtgggcaattcccagaactgagggttcctcccctttttagaccatatagggtgacttcctgatgttgccatggcatttgtaaactgtcatggcgctagtgggagtgtcttttagcatgctaatgcatgagcagtgaggatgacccgaggtcatttttgttaccatcttggttttggtgggttttggctggttttggccggcttctttaccacttctttttatcagcaaggtctttgtgacctgtacttagtgccgacttcctgtctcatcctgtgagtaagaatgcctaatctctcaggaatgcagcccagtaggtctcaaccttattttacccagcccccattcaagatggagtgactctggttcaaatgcctctgacacatgtgcctcatgtttgggcatgagacctcactgtgtaggtgcagagaagaccctgcctaaacattgcctacacgttgctcctttttcctgcctcaacttccttaaaatgacaagagcagagcccttttgggagctaacatcaggactccttttctgtactctgctccgttgtgctgctagagccacaagcctattaaactttgcctgaaataaattcctatttgcgc

SEQ ID NO: 292708 - DNA, 1943 bp, Homo sapiens
  misc_feature (1919)..(1919): n is a, c, g, or t
gtttgggtgtggccgcatggcgtgctgtggtgcaggtggccgaagggggcgttactgttgcgactggcatccgcatccggcagatgtagatggaaccaaagtccagaagttacgcgtcacccttgctctacagccaaacatgcaggactctagtaacccgcgaaatgatgggatagcgttgcaaatccttaaaagagtcttaacgaaatcctggctgacattgacttctccactgcaaccatcgagttcattgtctcctaaaccttgccatggaggcctgtggcacctgagccagccattatcatcaccagcacttccatgagctacaagctggacccactgcagtcctcctgacacactgaaatcagagcctgcacacagagcagcagatgcttcaatgtaaaggtcatttccaggtccttgacaggcgtgcatctgggccagatccatggcaataaccttcaggttgaggctagagggcttcagatgggcagcttcgaatgacaggagcaaggcacaagaggccggaaagggagggtgacattttcagcatctataagatcaactttagaaacatttgggggttgacaaattcccatcaagctctgtggatcttgtacaactgctcaccaccggcttctcatcagcacatgattggtgcagggttctgaggatgattttgagatgttccctgatgtggtcttgtgaggagatttcatgacagatggcaggaagcttcgtggagagatttctgaagacactcctgagctcccaacaccgggcaactctcttccagaggatagtggggtggagggtagaagaagggcaaagtcagctatgtgttccaagattactgaagcaggattctggccttcctgataagaacatgaccagatccagctggtttgcaacaagatgaacttcagtgctgagctttcaccaagtttttctcactacaatctcattgtaatactaaaatctccacccaagatggaggttatctgccattttctgtacatgtgttaccagaaaggggtcctgatccagaccccaaaagagggttcttggatctcacgcaacaaagagttcggggcgagtccatagagtaaagtgaaagcaagttcatcaagaaagcaaaggaataaagaatgcctactccataggcagagcagtggctttggctgctcagctgcttgtacttgttacttcttgagtatatgctaaacaagggattgattactccttgtttagcagttttctgggaaaggagtgggcaattcccagaactgagggttcctcccctttttagaccatatagggtgacttcctgatgttgccatggcatttgtaaactgtcatggcgctagtgggagtgtcttttagcatgctaatgcatgagcagtgaggatgacccgaggtcatttttgttaccatcttggttttggtgggttttggctggttttggccggcttctttaccacttctttttatcagcaaggtctttgtgacctgtacttagtgccgacttcctgtctcatcctgtgagtaagaatgcctaatctctcaggaatgcagcccagtaggtctcaaccttattttacccagcccccattcaagatggagtgactctggttcaaatgcctctgacacatgtgcctcatgtttgggcatgagacctcactgtgtaggtgcagagaagaccctgcctaaacattgcctacacgttgctcctttttcctgcctcaacttccttaaaatgacaagagcagagcccttttgggagctaacatcaggactccttttctgtactctgctccgttgtgctgctagagccacaagcctattaaactttgcctgaaataaattcctatttgcgcaaaaaaaaaaacactggccgcggtttcaacgtctggactggnccctggcgtacccctttcgccttg

SEQ ID NO: 292709 - DNA, 948 bp, Homo sapiens
gtttgggtgtggccgcatggcgtgctgtggtgcaggtggccgaagggggcgttactgttgcgactggcatccgcatccggcagatgtagatggaaccaaagtccagaagttacgcgtcacccttgctctacagccaaacatgcaggactctagtaacccgcgaaatgatgggatagcgttgcaaatccttaaaagagtcttaacggagaagggaaaatgttacattgtcaaagtcccaaagcctttcagcctgaagccaggaacaattgttcaaagtttctttggaacatcaaggaaggaaatccagattttactttaagtgcaatggggagtcattaaggattttgtgtagatacagcaaaaagacaacaatcttcaagccacaatggccctcaccagaacccagccatgtggtcagcctgatctcggacttcacagccagcagaactgtttgtcaaagatcagatggtttccttaagctgataagcaacttcaacaaagtctcaggatacaaaatcaatgtgcaaaaatcataagcattcttatacaccaataacagacaaacagccaaatcatgagtgaacttccattcataattgcacaaagagaatcaaatacctaggaatccagcttacaagggatgtgaaggacctcttcaaggagaactacaaaccactgctcaatgaaataaaaggggacacaaacaaatggaagaacattccatgctcatggttaggaagaatcaatatcgtgaaaatggccatactgcccaagataatttatagattcaatgccatccccatcaagctaccaatgactttcttcacagaattggaagaaactacgttaaagttcatatggaaccagaaaagagcctgcactgccaagacaaccctaagcaaaaagaacaaagctggaggcatcatgccacctgacttcaaactatac

SEQ ID NO: 292710 - DNA, 616 bp, Homo sapiens
ttatcagcaaggtctttgtgacctgtacttagtgccgacttcctgtctcatcctgtgagtaagaatgcctaatctctcaggaatgcagcccagtaggtctcaaccttattttacccagcccccattcaagatggagtgactctggttcaaatgcctctgacacatgtgcctcatgtttgggcatgagacctcactgtgtaggtgcagagaagaccctgcctaaacattgcctacacgttgctcctttttcctgcctcaacttccttaaaatgacaagagcagagcccttttgggagctaacatcaggactccttttctgtactctgctccgttgtgctgctagagccacaagcctattaaactttgcctgaaataaattcctatttgcgctggtgttaatttttacttatgagtgagccaagaactcaggccagagttgcggtaacaccaccagaagaggtctccgcttgtcagacttgagggatatcatcaatgagcctctgagctaatggtgtaaaccaaaaataaaattctaagccccccgccagccaaaccatctgaatggacttcctcctcagccagggtgctcttaaaatttaacctgagagactggttc

SEQ ID NO: 292711 - DNA, 1961 bp, Homo sapiens
actggacgcataacgcatgggcgggctgggctgatgctcgcgggggtgacgtcacagcccgacgcgccacccagctgtttttgtgctcccagctctagcgaaaagccgccggtatttctccatctggctctcctctacctccaggcaggctcacccgagatccccgccccgaaccccccctgcacactcggcccagcgctgttgcccccggagcggacgtttctgcagctattctgagcacaccttgacgtcggctgagggagcgggacagggtcagcggcgaaggaggcaggccccgcgcggggatctcggaagccctgcggtgcatcatgaagttccagtacaaggaggaccatccctttgagtatcggaaaaaggaaggagaaaagatccggaagaaatatccggacagggtccccgtgattgtagagaaggctccaaaagccagggtgcctgatctggacaagaggaagtacctagtgccctctgaccttactgttggccagttctacttcttaatccggaagagaatccacctgagacctgaggacgccttattcttctttgtcaacaacaccatccctcccaccagtgctaccatgggccaactgtatgaggacaatcatgaggaagactattttctgtatgtggcctacagtgatgagagtgtctatgggaaatgagtggttggaagcccagcagatgggagcacctggacttgggggtaggggaggggtgtgtgtgcgcgacatggggaaagagggtggctcccaccgcaaggagacagaaggtgaagacatctagaaacattacaccacacacaccgtcatcacattttcacatgctcaattgatattttttgctgcttcctcggcccagggagaaagcatgtcaggacagagctgttggattggctttgatagaggaatggggatgatgtaagtttacagtattcctggggtttaattgttgtgcagtttcatagatgggtcaggaggtggacaagttggggccagagatgatggcagtccagcagcaactccctgtgctcccttctctttgggcagagattctatttttgacatttgcacaagacaggtagggaaaggggacttgtggtagtggaccatacctggggaccaaaagagacccactgtaattgatgcattgtggcccctgatcttccctgtctcacacttcttttctcccatcccggttgcaatctcactcagacatcacagtaccaccccaggggtggcagtagacaacaacccagaaatttagacagggatctcttacctttggaaaataggggttaggcatgaaggtggttgtgattaagaagatggttttgttattaaatagcattaaactggaattgacaagagtgttgagcatccctgtctaacctgctctttctctttggtgccccttatctcaccccttccttggaatttaataagtctcaggcatttccaattgtagactaaaaccactcttagcatctcctctagtattttccatgtatcaggaaagaggtgtcttatgtagggagggggcaagtatgaagtaaggtaattatatactactctcattcaggattcttgctcccatgctgctgtcccttcaggctcacatgcacaggaatgctacatgatggccagctgcttccctccttggttatcatccactgcagctgctagttagaaaggtttggagggatgacttttagtaaatcatggggattttattgatttattttcacttttgggattttgtggggtgggagtggggagcaggaattgcactcagacatgacatttcaattcatctctgctaatgaaaagggttctttctcttgggggaaatgtgtgtgtcagttctgtcagctgcaagttcttgtataatgaagtcaatgccatcaggccaaggaaataaaataattgcttaccttaaaaatc

SEQ ID NO: 292712 - DNA, 1318 bp, Homo sapiens
tattcaaggcacaaagaaatgcagtaacttcctaaaggtttcacattgctgatctgtggttgagctggaattccaaccctgtctgaaggactgtggagctctcgggtgattgtagagaaggctccaaaagccagggtgcctgatctggacaagaggaagtacctagtgccctctgaccttactgttggccagttctacttcttaatccggaagagaatccacctgagacctgaggacgccttattcttctttgtcaacaacaccatccctcccaccagtgctaccatgggccaactgtatgaggtaatggttctggttgcacaatactggatgccgtccagtgcagtctggcatcctctagcccttgttctagatgcgttgataacacatctgagaagtggggcagaaggtgttatttatccggatcctcttacatatggcagtgtaaggctctgagagattagataccacttgttttttagggattagccactctactagatttaatccttctgaaatcttgtctgactatagtcttgtctgactatagtgttttaatgctggactgtttattgaaacagcaggaagtgattcctgatagcaaaagttccaaagcgtcagcccatcgcagttcctgctattctggttggtagcatgtaatttgtaatgcattcagaatccagttcattattttactcccatttagcaacagattgagaaagcacgtaatagtaaagccagctccttctaactctgaggccagcctctgccaactgaaggattctccccacagtcagcttcttctatgaactctgaagttttggcttaagacaaccacattgatactaaacaaggggaaacttttcttagaacaaaactaaaactgtgaaacagattccacattatctgggcacaatgaatcagataaaatgaaatataaaattaaggcaaagtctgtaaatggattcatgtcttaacagataaactcaggaggaataatttttatgtgatgtggtttaattggaagtgtcagaatctgaggaaactatagtgaaggactttattattactgaaaatataacctgggattataactattgttttttgcagtattttgcataagatgtttccttctcattgtgctccgttaatgaattacgtaaacttctaataatcctgaatctttttttgcatagcatatattccctgttagtatatgtcccattatatatccatctgtggtatctatgttccccttgctaggagtgagctctttaagagtgaggactgtgccctagtcatcttcatatccctgata

SEQ ID NO: 292713 - DNA, 1015 bp, Homo sapiens
cgcgggaggggcagcggaacgcgcagagggcacggtgcaagcacgggacagctctgcattggccaaagggatcccaggaggcctggccctcttttctcctgaggctggatcccaaccagcaggaaaaggctggattttcgccttttgtatttgttttggggcccaaccaagaaaaacagtggagggggaataaaacatgtttaaatcttttttttgtcttaaaaccatctttaatttcacagtcacaaaatggacttaactcgaatgttagatgtttgcagtgacatcgatgtaaaagggcaggctcacccgagatccccgccccgaaccccccctgcacactcggcccagcgctgttgcccccggagcggacgtttctgcagctattctgagcacaccttgacgtcggctgagggagcgggacagggtcagcggcgaaggaggcaggccccgcgcggggatctcggaagccctgcggtgcatcatgaagttccagtacaaggaggaccatccctttgagtatcggaaaaaggaaggagaaaagatccggaagaaatatccggacagggtccccgctccggggcttgtgtggggacagccagcctcctcgtgttgatttctgatcacctggtacctggtcgcgataaggcaggactgagacgttttttctccgttttggacaccggcttaagtagttaaaactaccgcaggcagctgcgcagccgaattggagggcagaatatggcttaagtggtagggggaccagcagctgttggattttggaaatggaggagcggagattttaaaattgtgctctttatcttcaggtaggaacattagtattacgtgtcacataatggtaaaataattgctgttatctgatgtcttttcttgactcacagccactctgggtttcttctctaatccttacctaacgttcgtggttttatagctaccagaagccaccagggccttagcccagcagtagaaacctcttgtaaccccttttccttta

SEQ ID NO: 292714 - DNA, 378 bp, Homo sapiens
ttttataaggggtggggggataagaaatgaaacaggtgtcctgggcctagacagattcatttccagtagtaactaggcaactctagggtgtagaaggaaaaatactagattgccttctgtagttttcattcctactctcctcctcttcttccagggtgattgtagagaaggctccaaaagccagggtgcctgatctggacaagaggaagtacctagtgccctctgaccttactggtaatgctctttgccttccctgacccttcctccggtgaaaaaactctctagatcctcattacatgcatgagattgtgagattgagaggcagtacatacttgaaggaagtgagtgggattataggcgtgaccgctgcacccagcc

SEQ ID NO: 292715 - DNA, 1880 bp, Homo sapiens
  misc_feature (85)..(85): n is a, c, g, or t
aaaagaaaaaagaacaagaaagaacaaaaaaacaggcaggtacggaccggaaaacccgggaaggcaaacacacccgaaaaaaccnccccgaaccccccctgcacactcggcccagcgctgttgcccccggagcggacgtttctgcagctattctgagcacaccttgacgtcggctgagggagcgggacagggtcagcggcgaaggaggcaggccccgcgcggggatctcggaagccctgcggtgcatcatgaagttccagtacaaggaggaccatccctttgagtatcggaaaaaggaaggagaaaagatccggaagaaatatccggacagggtccccgtgattgtagagaaggctccaaaagccagggtgcctgatctggacaagaggaagtacctagtgccctctgaccttactgttggccagttctacttcttaatccggaagagaatccacctgagacctgaggacgccttattcttctttgtcaacaacaccatccctcccaccagtgctaccatgggccaactgtatgaggacaatcatgaggaagactattttctgtatgtggcctacagtgatgagagtgtctatgggaaatgagtggttggaagcccagcagatgggagcacctggacttgggggtaggggaggggtgtgtgtgcgcgacatggggaaagagggtggctcccaccgcaaggagacagaaggtgaagacatctagaaacattacaccacacacaccgtcatcacattttcacatgctcaattgatattttttgctgcttcctcggcccagggagaaagcatgtcaggacagagctgttggattggctttgatagaggaatggggatgatgtaagtttacagtattcctggggtttaattgttgtgcagtttcatagatgggtcaggaggtggacaagttggggccagagatgatggcagtccagcagcaactccctgtgctcccttctctttgggcagagattctatttttgacatttgcacaagacaggtagggaaaggggacttgtggtagtggaccatacctggggaccaaaagagacccactgtaattgatgcattgtggcccctgatcttccctgtctcacacttcttttctcccatcccggttgcaatctcactcagacatcacagtaccaccccaggggtggcagtagacaacaacccagaaatttagacagggatctcttacctttggaaaataggggttaggcatgaaggtggttgtgattaagaagatggttttgttattaaatagcattaaactggaattgacaagagtgttgagcatccctgtctaacctgctctttctctttggtgccccttatctcaccccttccttggaatttaataagtctcaggcatttccaattgtagactaaaaccactcttagcatctcctctagtattttccatgtatcaggaaagaggtgtcttatgtagggagggggcaagtatgaagtaaggtaattatatactactctcattcaggattcttgctcccatgctgctgtcccttcaggctcacatgcacaggaatgctacatgatggccagctgcttccctccttggttatcatccactgcagctgctagttagaaaggtttggagggatgacttttagtaaatcatggggattttattgatttattttcacttttgggattttgtggggtgggagtggggagcaggaattgcactcagacatgacatttcaattcatctctgctaatgaaaagggttctttctcttgggggaaatgtgtgtgtcagttctgtcagctgcaagttcttgtataatgaagtcaatgccatcaggccaaggaaataaaataattgcttaccttaaaaatc

SEQ ID NO: 292716 - DNA, 2100 bp, Homo sapiens
actggacgcataacgcatgggcgggctgggctgatgctcgcgggggtgacgtcacagcccgacgcgccacccagctgtttttgtgctcccagctctagcgaaaagccgccggtatttctccatctggctctcctctacctccaggcaggctcacccgagatccccgccccgaaccccccctgcacactcggcccagcgctgttgcccccggagcggacgtttctgcagctattctgagcacaccttgacgtcggctgagggagcgggacagggtcagcggcgaaggaggcaggccccgcgcggggatctcggaagccctgcggtgcatcatgaagttccagtacaaggaggaccatccctttgagtatcggaaaaaggaaggagaaaagatccggaagaaatatccggacagggtccccgctccggggcttgtgtggggacagccagcctcctcgtgttgatttctgatcacctggtacctggtcgcgataaggcaggactgagacgttttttctccgttttggacaccggcttaagtagttaaaactaccgcaggcagtgattgtagagaaggctccaaaagccagggtgcctgatctggacaagaggaagtacctagtgccctctgaccttactgttggccagttctacttcttaatccggaagagaatccacctgagacctgaggacgccttattcttctttgtcaacaacaccatccctcccaccagtgctaccatgggccaactgtatgaggacaatcatgaggaagactattttctgtatgtggcctacagtgatgagagtgtctatgggaaatgagtggttggaagcccagcagatgggagcacctggacttgggggtaggggaggggtgtgtgtgcgcgacatggggaaagagggtggctcccaccgcaaggagacagaaggtgaagacatctagaaacattacaccacacacaccgtcatcacattttcacatgctcaattgatattttttgctgcttcctcggcccagggagaaagcatgtcaggacagagctgttggattggctttgatagaggaatggggatgatgtaagtttacagtattcctggggtttaattgttgtgcagtttcatagatgggtcaggaggtggacaagttggggccagagatgatggcagtccagcagcaactccctgtgctcccttctctttgggcagagattctatttttgacatttgcacaagacaggtagggaaaggggacttgtggtagtggaccatacctggggaccaaaagagacccactgtaattgatgcattgtggcccctgatcttccctgtctcacacttcttttctcccatcccggttgcaatctcactcagacatcacagtaccaccccaggggtggcagtagacaacaacccagaaatttagacagggatctcttacctttggaaaataggggttaggcatgaaggtggttgtgattaagaagatggttttgttattaaatagcattaaactggaattgacaagagtgttgagcatccctgtctaacctgctctttctctttggtgccccttatctcaccccttccttggaatttaataagtctcaggcatttccaattgtagactaaaaccactcttagcatctcctctagtattttccatgtatcaggaaagaggtgtcttatgtagggagggggcaagtatgaagtaaggtaattatatactactctcattcaggattcttgctcccatgctgctgtcccttcaggctcacatgcacaggaatgctacatgatggccagctgcttccctccttggttatcatccactgcagctgctagttagaaaggtttggagggatgacttttagtaaatcatggggattttattgatttattttcacttttgggattttgtggggtgggagtggggagcaggaattgcactcagacatgacatttcaattcatctctgctaatgaaaagggttctttctcttgggggaaatgtgtgtgtcagttctgtcagctgcaagttcttgtataatgaagtcaatgccatcaggccaaggaaataaaataattgcttaccttaaaaatc

SEQ ID NO: 292717 - DNA, 1572 bp, Homo sapiens
ggttccccccaggtggaattttgggttaaggtgattgtagagaaggctccaaaagccagggtgcctgatctggacaagaggaagtacctagtgccctctgaccttactgttggccagttctacttcttaatccggaagagaatccacctgagacctgaggacgccttattcttctttgtcaacaacaccatccctcccaccagtgctaccatgggccaactgtatgaggacaatcatgaggaagactattttctgtatgtggcctacagtgatgagagtgtctatgggaaatgagtggttggaagcccagcagatgggagcacctggacttgggggtaggggaggggtgtgtgtgcgcgacatggggaaagagggtggctcccaccgcaaggagacagaaggtgaagacatctagaaacattacaccacacacaccgtcatcacattttcacatgctcaattgatattttttgctgcttcctcggcccagggagaaagcatgtcaggacagagctgttggattggctttgatagaggaatggggatgatgtaagtttacagtattcctggggtttaattgttgtgcagtttcatagatgggtcaggaggtggacaagttggggccagagatgatggcagtccagcagcaactccctgtgctcccttctctttgggcagagattctatttttgacatttgcacaagacaggtagggaaaggggacttgtggtagtggaccatacctggggaccaaaagagacccactgtaattgatgcattgtggcccctgatcttccctgtctcacacttcttttctcccatcccggttgcaatctcactcagacatcacagtaccaccccaggggtggcagtagacaacaacccagaaatttagacagggatctcttacctttggaaaataggggttaggcatgaaggtggttgtgattaagaagatggttttgttattaaatagcattaaactggaattgacaagagtgttgagcatccctgtctaacctgctctttctctttggtgccccttatctcaccccttccttggaatttaataagtctcaggcatttccaattgtagactaaaaccactcttagcatctcctctagtattttccatgtatcaggaaagaggtgtcttatgtagggagggggcaagtatgaagtaaggtaattatatactactctcattcaggattcttgctcccatgctgctgtcccttcaggctcacatgcacaggaatgctacatgatggccagctgcttccctccttggttatcatccactgcagctgctagttagaaaggtttggagggatgacttttagtaaatcatggggattttattgatttattttcacttttgggattttgtggggtgggagtggggagcaggaattgcactcagacatgacatttcaattcatctctgctaatgaaaagggttctttctcttgggggaaatgtgtgtgtcagttctgtcagctgcaagttcttgtataatgaagtcaatgccatcaggccaaggaaataaaataattgcttaccttaaaaatc

SEQ ID NO: 292718 - DNA, 1566 bp, Homo sapiens
aacgcagggacattgggctgtgcggtgattgtagagaaggctccaaaagccagggtgcctgatctggacaagaggaagtacctagtgccctctgaccttactgttggccagttctacttcttaatccggaagagaatccacctgagacctgaggacgccttattcttctttgtcaacaacaccatccctcccaccagtgctaccatgggccaactgtatgaggacaatcatgaggaagactattttctgtatgtggcctacagtgatgagagtgtctatgggaaatgagtggttggaagcccagcagatgggagcacctggacttgggggtaggggaggggtgtgtgtgcgcgacatggggaaagagggtggctcccaccgcaaggagacagaaggtgaagacatctagaaacattacaccacacacaccgtcatcacattttcacatgctcaattgatattttttgctgcttcctcggcccagggagaaagcatgtcaggacagagctgttggattggctttgatagaggaatggggatgatgtaagtttacagtattcctggggtttaattgttgtgcagtttcatagatgggtcaggaggtggacaagttggggccagagatgatggcagtccagcagcaactccctgtgctcccttctctttgggcagagattctatttttgacatttgcacaagacaggtagggaaaggggacttgtggtagtggaccatacctggggaccaaaagagacccactgtaattgatgcattgtggcccctgatcttccctgtctcacacttcttttctcccatcccggttgcaatctcactcagacatcacagtaccaccccaggggtggcagtagacaacaacccagaaatttagacagggatctcttacctttggaaaataggggttaggcatgaaggtggttgtgattaagaagatggttttgttattaaatagcattaaactggaattgacaagagtgttgagcatccctgtctaacctgctctttctctttggtgccccttatctcaccccttccttggaatttaataagtctcaggcatttccaattgtagactaaaaccactcttagcatctcctctagtattttccatgtatcaggaaagaggtgtcttatgtagggagggggcaagtatgaagtaaggtaattatatactactctcattcaggattcttgctcccatgctgctgtcccttcaggctcacatgcacaggaatgctacatgatggccagctgcttccctccttggttatcatccactgcagctgctagttagaaaggtttggagggatgacttttagtaaatcatggggattttattgatttattttcacttttgggattttgtggggtgggagtggggagcaggaattgcactcagacatgacatttcaattcatctctgctaatgaaaagggttctttctcttgggggaaatgtgtgtgtcagttctgtcagctgcaagttcttgtataatgaagtcaatgccatcaggccaaggaaataaaataattgcttaccttaaaaatc

SEQ ID NO: 292719 - DNA, 1952 bp, Homo sapiens
actggacgcataacgcatgggcgggctgggctgatgctcgcgggggtgacgtcacagcccgacgcgccacccagctgtttttgtgctcccagctctagcgaaaagccgccggtatttctccatctggctctcctctacctccaggcaggctcacccgagatccccgccccgaaccccccctgcacactcggcccagcgctgttgcccccggagcggacgtttctgcagctattctgagcacaccttgacgtcggctgagggagcgggacagggtcagcggcgaaggaggcaggccccgcgcggggatctcggaagccctgcggtgcatcatgaagttccagtacaaggaggaccatccctttgagtatcggaaaaaggaaggagaaaagatccggaagaaatatccggacagggtccccgtgattgtagagaaggctccaaaagccagggtgcctgatctggacaagaggaagtacctagtgccctctgaccttactgttggccagttctacttcttaatccggaagagaatccacctgagacctgaggacgccttattcttctttgtcaacaacaccatccctcccaccagtgctaccatgggccaactgtatgaggacaatcatgaggaagactattttctgtatgtggcctacagtgatgagagtgtctatgggaaatgagtggttggaagcccagcagatgggagcacctggacttgggggtaggggaggggtgtgtgtgcgcgacatggggaaagagggtggctcccaccgcaaggagacagaaggtgaagacatctagaaacattacaccacacacaccgtcatcacattttcacatgctcaattgatattttttgctgcttcctcggcccagggagaaagcatgtcaggacagagctgttggattggctttgatagaggaatggggatgatgtaagtttacagtattcctggggtttaattgttgtgcagtttcatagatgggtcaggaggtggacaagttggggccagagatgatggcagtccagcagcaactccctgtgctcccttctctttgggcagagattctatttttgacatttgcacaagacaggtagggaaaggggacttgtggtagtggaccatacctggggaccaaaagagacccactgtaattgatgcattgtggcccctgatcttccctgtctcacacttcttttctcccatcccggttgcaatctcactcagacatcacagtaccaccccaggggtggcagtagacaacaacccagaaatttagacagggatctcttacctttggaaaataggggttaggcatgaaggtggttgtgattaagaagatggttttgttattaaatagcattaaactggaattgacaagagtgttgagcatccctgtctaacctgctctttctctttggtgccccttatctcaccccttccttggaatttaataagtctcaggcatttccaattgtagactaaaaccactcttagcatctcctctagtattttccatgtatcaggaaagaggtgtcttatgtagggagggggcaagtatgaagtaaggtaattatatactactctcattcaggattcttgctcccatgctgctgtcccttcaggctcacatgcacaggaatgctacatgatggccagctgcttccctccttggttatcatccactgcagctgctagttagaaaggtttggagggatgacttttagtaaatcatggggattttattgatttattttcacttttgggattttgtggggtgggacccgcctcaagtccctgcgtgtataaaagacatgttggttaatgtttgtaaaccccaagggttcattatagcggggggaatgtgtttgtcagctccggtaacctaaagttagggaataagggtggaatcaccctaggaccattcagatatgtcaggtggttaca

SEQ ID NO: 292720 - DNA, 1821 bp, Homo sapiens
actggacgcataacgcatgggcgggctgggctgatgctcgcgggggtgacgtcacagcccgacgcgccacccagctgtttttgtgctcccagctctagcgaaaagccgccggtatttctccatctggctctcctctacctccaggcaggctcacccgagatccccgccccgaaccccccctgcacactcggcccagcgctgttgcccccggagcggacgtttctgcagctattctgagcacaccttgacgtcggctgagggagcgggacagggtcagcggcgaaggaggcaggccccgcgcggggatctcggaagccctgcggtgcatcatgaagttccagtacaaggaggaccatccctttgagtatcggaaaaaggaaggagaaaagatccggaagaaatatccggacagggtccccgtgattgtagagaaggctccaaaagccagggtgcctgatctggacaagaggaagtacctagtgccctctgaccttactgttggccagttctacttcttaatccggaagagaatccacctgagacctgaggacgccttattcttctttgtcaacaacaccatccctcccaccagtgctaccatgggccaactgtatgaggacaatcatgaggaagactattttctgtatgtggcctacagtgatgagagtgtctatgggaaatgagtggttggaagcccagcagatgggagcacctggacttgggggtaggggaggggtgtgtgtgcgcgacatggggaaagagggtggctcccaccgcaaggagacagaaggtgaagacatctagaaacattacaccacacacaccgtcatcacattttcacatgctcaattgatattttttgctgcttcctcggcccagggagaaagcatgtcaggacagagctgttggattggctttgatagaggaatggggatgatgtaagtttacagtattcctggggtttaattgttgtgcagtttcatagatgggtcaggaggtggacaagttggggccagagatgatggcagtccagcagcaactccctgtgctcccttctctttgggcagagattctatttttgacatttgcacaagacaggtagggaaaggggacttgtggtagtggaccatacctggggaccaaaagagacccactgtaattgatgcattgtggcccctgatcttccctgtctcacacttcttttctcccatcccggttgcaatctcactcagacatcacagtaccaccccaggggtggcagtagacaacaacccagaaatttagacagggatctcttacctttggaaaataggggttaggcatgaaggtggttgtgattaagaagatggttttgttattaaatagctcctctagtattttccatgtatcaggaaagaggtgtcttatgtagggagggggcaagtatgaagtaaggtaattatatactactctcattcaggattcttgctcccatgctgctgtcccttcaggctcacatgcacaggaatgctacatgatggccagctgcttccctccttggttatcatccactgcagctgctagttagaaaggtttggagggatgacttttagtaaatcatggggattttattgatttattttcacttttgggattttgtggggtgggagtggggagcaggaattgcactcagacatgacatttcaattcatctctgctaatgaaaagggttctttctcttgggggaaatgtgtgtgtcagttctgtcagctgcaagttcttgtataatgaagtcaatgccatcaggccaaggaaataaaataattgcttaccttaaaaatc

SEQ ID NO: 292721 - DNA, 1740 bp, Homo sapiens
actggacgcataacgcatgggcgggctgggctgatgctcgcgggggtgacgtcacagcccgacgcgccacccagctgtttttgtgctcccagctctagcgaaaagccgccggtatttctccatctggctctcctctacctccaggcaggctcacccgagatccccgccccgaaccccccctgcacactcggcccagcgctgttgcccccggagcggacgtttctgcagctattctgagcacaccttgacgtcggctgagggagcgggacagggtcagcggcgaaggaggcaggccccgcgcggggatctcggaagccctgcggtgcatcatgaagttccagtacaaggaggaccatccctttgagtatcggaaaaaggaaggagaaaagatccggaagaaatatccggacagggtccccgtgattgtagagaaggctccaaaagccagggtgcctgatctggacaagaggaagtacctagtgccctctgaccttactgttggccagttctacttcttaatccggaagagaatccacctgagacctgaggacgccttattcttctttgtcaacaacaccatccctcccaccagtgctaccatgggccaactgtatgaggacaatcatgaggaagactattttctgtatgtggcctacagtgatgagagtgtctatgggaaatgagtggttggaagcccagcagatgggagcacctggacttgggggtaggggaggggtgtgtgtgcgcgacatggggaaagagggtggctcccaccgcaaggagacagaaggtgaagacatctagaaacattacaccacacacaccgtcatcacattttcacatgctcaattgatattttttgctgcttcctcggcccagggagaaagcatgtcaggacagagctgttggattggctttgatagaggaatggggatgatgtaagtttacagtattcctggggtttaattgttgtgcagtttcatagatgggtcaggaggtggacaagttggggccagagatgatggcagtccagcagcaactccctgtgctcccttctctttgggcagagattctatttttgacatttgcacaagacaggtagggaaaggggacttgtggtagtggaccatacctggggaccaaaagagacccactgtaattgatgcattgtggcccctgatcttccctgtctcacacttcttttctcccatcccggttgcaatctcactcagacatcacagtaccaccccaggggtggcagtagacaacaacccagaaatttagctcctctagtattttccatgtatcaggaaagaggtgtcttatgtagggagggggcaagtatgaagtaaggtaattatatactactctcattcaggattcttgctcccatgctgctgtcccttcaggctcacatgcacaggaatgctacatgatggccagctgcttccctccttggttatcatccactgcagctgctagttagaaaggtttggagggatgacttttagtaaatcatggggattttattgatttattttcacttttgggattttgtggggtgggagtggggagcaggaattgcactcagacatgacatttcaattcatctctgctaatgaaaagggttctttctcttgggggaaatgtgtgtgtcagttctgtcagctgcaagttcttgtataatgaagtcaatgccatcaggccaaggaaataaaataattgcttaccttaaaaatc

SEQ ID NO: 292722 - DNA, 1671 bp, Homo sapiens
actggacgcataacgcatgggcgggctgggctgatgctcgcgggggtgacgtcacagcccgacgcgccacccagctgtttttgtgctcccagctctagcgaaaagccgccggtatttctccatctggctctcctctacctccaggcaggctcacccgagatccccgccccgaaccccccctgcacactcggcccagcgctgttgcccccggagcggacgtttctgcagctattctgagcacaccttgacgtcggctgagggagcgggacagggtcagcggcgaaggaggcaggccccgcgcggggatctcggaagccctgcggtgcatcatgaagttccagtacaaggaggaccatccctttgagtatcggaaaaaggaaggagaaaagatccggaagaaatatccggacagggtccccgtgattgtagagaaggctccaaaagccagggtgcctgatctggacaagaggaagtacctagtgccctctgaccttactgttggccagttctacttcttaatccggaagagaatccacctgagacctgaggacgccttattcttctttgtcaacaacaccatccctcccaccagtgctaccatgggccaactgtatgaggacaatcatgaggaagactattttctgtatgtggcctacagtgatgagagtgtctatgggaaatgagtggttggaagcccagcagatgggagcacctggacttgggggtaggggaggggtgtgtgtgcgcgacatggggaaagagggtggctcccaccgcaaggagacagaaggtgaagacatctagaaacattacaccacacacaccgtcatcacattttcacatgctcaattgatattttttgctgcttcctcggcccagggagaaagcatgtcaggacagagctgttggattggctttgatagaggaatggggatgatgtaagtttacagtattcctggggtttaattgttgtgcagtttcatagatgggtcaggaggtggacaagttggggccagagatgatggcagtccagcagcaactccctgtgctcccttctctttgggcagagattctatttttgacatttgcacaagacaggtagggaaaggggacttgtggtagtggaccatacctggggaccaaaagagacccactgtaattgatgcattgtggcccctgatcttccctgtctcacacttcttttctcccatcccggttgcaatctcactcagacatcacagtaccaccccaggggtggcagtagacaacaacccagaaatttagacagggatctcttacctttggaaaataggggttaggcatgaaggtggttgtgattaagaagatggttttgttattaaatagcattaaactggaattgacaagagtgttgagcatccctgtctaacctgctctttctctttggtgccccttatctcaccccttccttggaatttaataagtctcaggcatttccaattgtagactaaaaccactcttagcatctcctctagtattttccatgtatcaggaaagaggtgtcttatgtagggagggggcaagtatgaagtaaggtaattatatactactctcattcaggattccactctcgggggtgatactctaggaactaggctcatcacgatatacacggatgcactcgccgtcgtc

SEQ ID NO: 292723 - DNA, 896 bp, Homo sapiens
gctcggtacccatccgacagctctgtcctgacatgctgtctccctgggccgaggaagcagcaaataatatcaattgagcatgtgaaaatgtgatgacggtgtgtgtggtgtaatgtttctagatgtcttcaccttctgtctcccatcccggttgcaatctcactcagacatcacagtaccaccccaggggtggcagtagacaacaacccagaaatttagacagggatctcttacctttggaaaataggggttaggcatgaaggtggttgtgattaagaagatggttttgttattaaatagcattaaactggaattgacaagagtgttgagcatccctgtctaacctgctctttctctttggtgccccttatctcaccccttccttggaatttaataagtctcaggcatttccaattgtagactaaaaccactcttagcatctcctctagtattttccatgtatcaggaaagaggtgtcttatgtagggagggggcaagtatgaagtaaggtaattatatactactctcattcaggattcttgctcccatgctgctgtcccttcaggctcacatgcacaggaatgctacatgatggccagctgcttccctccttggttatcatccactgcagctgctagttagaaaggtttggagggatgacttttagtaaatcatggggattttattgatttattttcacttttgggattttgtggggtgggagtggggagcaggaattgcactcagacatgacatttcaattcatctctgctaatgaaaagggttctttctcttgggggaaatgtgtgtgtcagttctgtcagctgcaagttcttgtataatgaagtcaatgccatcaggccaaggaaataaaataattgcttaccttaaaaatc

SEQ ID NO: 292724 - DNA, 710 bp, Homo sapiens
cacctagaggatcctagggtctagggagacaacacagggatctcttacctttggaaaataggggttaggcatgaaggtggttgtgattaagaagatggttttgttattaaatagcattaaactggaattgacaagagtgttgagcatccctgtctaacctgctctttctctttggtgccccttatctcaccccttccttggaatttaataagtctcaggcatttccaattgtagactaaaaccactcttagcatctcctctagtattttccatgtatcaggaaagaggtgtcttatgtagggagggggcaagtatgaagtaaggtaattatatactactctcattcaggattcttgctcccatgctgctgtcccttcaggctcacatgcacaggaatgctacatgatggccagctgcttccctccttggttatcatccactgcagctgctagttagaaaggtttggagggatgacttttagtaaatcatggggattttattgatttattttcacttttgggattttgtggggtgggagtggggagcaggaattgcactcagacatgacatttcaattcatctctgctaatgaaaagggttctttctcttgggggaaatgtgtgtgtcagttctgtcagctgcaagttcttgtataatgaagtcaatgccatcaggccaaggaaataaaataattgcttaccttaaaaatc

SEQ ID NO: 292725 - DNA, 365 bp, Homo sapiens
tcttgcagcgtcgtctctagcaggatcccctccttctgcacgcgcacggaatgctacatgatggccagctgcttccctccttggttatcatccactgcagctgctagttagaaaggtttggagggatgacttttagtaaatcatggggattttattgatttattttcacttttgggattttgtggggtgggagtggggagcaggaattgcactcagacatgacatttcaattcatctctgctaatgaaaagggttctttctcttgggggaaatgtgtgtgtcagttctgtcagctgcaagttcttgtataatgaagtcaatgccatcaggccaaggaaataaaataattgcttaccttaaaaatc

SEQ ID NO: 292726 - DNA, 959 bp, Homo sapiens
actggacgcataacgcatgggcgggctgggctgatgctcgcgggggtgacgtcacagcccgacgcgccacccagctgtttttgtgctcccagctctagcgaaaagccgccggtatttctccatctggctctcctctacctccaggcaggctcacccgagatccccgccccgaaccccccctgcacactcggcccagcgctgttgcccccggagcggacgtttctgcagctattctgagcacaccttgacgtcggctgagggagcgggacagggtcagcggcgaaggaggcaggccccgcgcggggatctcggaagccctgcggtgcatcatgaagttccagtacaaggaggaccatccctttgagtatcggaaaaaggaaggagaaaagatccggaagaaatatccggacagggtccccgctccggggcttgtgtggggacagccagcctcctcgtgttgatttctgatcacctggtacctggtcgcgataaggcaggactgagacgttttttctccgttttggacaccggcttaagtagttaaaactaccgcaggcagtgagtaggaacagaaaagtattaggtatctttcagcatccgggcgttttccccattaccccctcccccgcccacttgcctggtgtttctctaatgcaggctgcgcagccgaattggagggcagaatatggcttaagtggtagggggaccagcagctgttggattttggaaatggaggagcggagattttaaaattgtgctctttatcttcaggtaggaacattagtattacgtgtcacataatggtaaaataattgctgttatctgatgtcttttcttgactcacagccactctgggtttcttctctaatccttacctaacgttcgtggttttatagctaccagaagccaccagggccttagcccagcagtagaaacctcttgtaaccccttttccttta

SEQ ID NO: 292727 - DNA, 666 bp, Homo sapiens
aaaaggttcagaagctattcagtaattttcttgcattacagggggttaggggagcacaagacagtcctggcctggaaaacaaggtcacgttctctgcccaacagccctcttgcctcatcgttctaggctccggggcttgtgtggggacagccagcctcctcgtgttgatttctgatcacctggtacctggtcgcgataaggcaggactgagacgttttttctccgttttggacaccggcttaagtagttaaaactaccgcaggcagtgagtaggaacagaaaagtattaggtatctttcagcatccgggcgttttccccattaccccctcccccgcccacttgcctggtgtttctctaatgcaggctgcgcagccgaattggagggcagaatatggcttaagtggtagggggaccagcagctgttggattttggaaatggaggagcggagattttaaaattgtgctctttatcttcaggtaggaacattagtattacgtgtcacataatggtaaaataattgctgttatctgatgtcttttcttgactcacagccactctgggtttcttctctaatccttacctaacgttcgtggttttatagctaccagaagccaccagggccttagcccagcagtagaaacctcttgtaaccccttttccttta

SEQ ID NO: 292728 - DNA, 2290 bp, Homo sapiens
actggacgcataacgcatgggcgggctgggctgatgctcgcgggggtgacgtcacagcccgacgcgccacccagctgtttttgtgctcccagctctagcgaaaagccgccggtatttctccatctggctctcctctacctccaggcaggctcacccgagatccccgccccgaaccccccctgcacactcggcccagcgctgttgcccccggagcggacgtttctgcagctattctgagcacaccttgacgtcggctgagggagcgggacagggtcagcggcgaaggaggcaggccccgcgcggggatctcggaagccctgcggtgcatcatgaagttccagtacaaggaggaccatccctttgagtatcggaaaaaggaaggagaaaagatccggaagaaatatccggacagggtccccgtgattgtagagaaggctccaaaagccagggtgcctgatctggacaagaggaagtacctagtgccctctgaccttactgttggccagttctacttcttaatccggaagagaatccacctgagacctgaggacgccttattcttctttgtcaacaacaccatccctcccaccagtgctaccatgggccaactgtatgaggacaatcatgaggaagactattttctgtatgtggcctacagtgatgagagtgtctatgggaaatgagtggttggaagcccagcagatgggagcacctggacttgggggtaggggaggggtgtgtgtgcgcgacatggggaaagagggtggctcccaccgcaaggagacagaaggtgaagacatctagaaacattacaccacacacaccgtcatcacattttcacatgctcaattgatattttttgctgcttcctcggcccagggagaaagcatgtcaggacagagctgttggattggctttgatagaggaatggggatgatgtaagtttacagtattcctggggtttaattgttgtgcagtttcatagatgggtcaggaggtggacaagttggggccagagatgatggcagtccagcagcaactccctgtgctcccttctctttgggcagagattctatttttgacatttgcacaagacaggtagggaaaggggacttgtggtagtggaccatacctggggaccaaaagagacccactgtaattgatgcattgtggcccctgatcttccctgtctcacacttcttttctcccatcccggttgcaatctcactcagacatcacagtaccaccccaggggtggcagtagacaacaacccagaaatttagacagggatctcttacctttggaaaataggggttaggcatgaaggtggttgtgattaagaagatggttttgttattaaatagcattaaactggaattgacaagagtgttgagcatccctgtctaacctgctctttctctttggtgccccttatctcaccccttccttggaatttaataagtctcaggcatttccaattgtagactaaaaccactcttagcatctcctctagtattttccatgtatcaggaaagaggtgtcttatgtagggagggggcaagtatgaagtaaggtaattatatactactctcattcaggattcttgctcccatgctgctgtcccttcaggctcacatgcacaggaatgctacatgatggccagctgcttccctccttggttatcatccactgcagctgctagttagaaaggtttggagggatgacttttagtaaatcatggggattttattgatttattttcacttttgggattttgtggggtgggagtggggagcaggaattgcactcagacatgacatttcaattcatctctgctaatgaaaagggttctttctcttgggggaaatgtgtgtgtcagttctgtcagctgcaagttcttgtataatgaagtcaatgccatcaggccaaggaaataaaataattgcttaccttaaaaatcaaaaaaaaaaaaaaaaaaaaaaaaaaaaaaaaaaaaaaaaaacaaaaaacaacagaaaagccacaccaagacgacctcaccaacaggacaacacgccaaaccccacccacaagcgagaagaaagaaaaaacagacaccacatgaacagcgcgagggccagaccacaacattgcacgcgagggacgatcaacagaccagcagacgagcactgaagaagcgaacgccgcgagagactaaccacccaccacacagggcgccccaaaccacgagcgaagaaaagccgcagaaggcagaaaaacaactgaggaaacgcaccgaacacagcagcc

SEQ ID NO: 292729 - DNA, 1599 bp, Homo sapiens
cgctgggagcgggagccgccgccgccgccggagctaacctcggggaccgagatgcaggtgattgtagagaaggctccaaaagccagggtgcctgatctggacaagaggaagtacctagtgccctctgaccttactgttggccagttctacttcttaatccggaagagaatccacctgagacctgaggacgccttattcttctttgtcaacaacaccatccctcccaccagtgctaccatgggccaactgtatgaggacaatcatgaggaagactattttctgtatgtggcctacagtgatgagagtgtctatgggaaatgagtggttggaagcccagcagatgggagcacctggacttgggggtaggggaggggtgtgtgtgcgcgacatggggaaagagggtggctcccaccgcaaggagacagaaggtgaagacatctagaaacattacaccacacacaccgtcatcacattttcacatgctcaattgatattttttgctgcttcctcggcccagggagaaagcatgtcaggacagagctgttggattggctttgatagaggaatggggatgatgtaagtttacagtattcctggggtttaattgttgtgcagtttcatagatgggtcaggaggtggacaagttggggccagagatgatggcagtccagcagcaactccctgtgctcccttctctttgggcagagattctatttttgacatttgcacaagacaggtagggaaaggggacttgtggtagtggaccatacctggggaccaaaagagacccactgtaattgatgcattgtggcccctgatcttccctgtctcacacttcttttctcccatcccggttgcaatctcactcagacatcacagtaccaccccaggggtggcagtagacaacaacccagaaatttagacagggatctcttacctttggaaaataggggttaggcatgaaggtggttgtgattaagaagatggttttgttattaaatagcattaaactggaattgacaagagtgttgagcatccctgtctaacctgctctttctctttggtgccccttatctcaccccttccttggaatttaataagtctcaggcatttccaattgtagactaaaaccactcttagcatctcctctagtattttccatgtatcaggaaagaggtgtcttatgtagggagggggcaagtatgaagtaaggtaattatatactactctcattcaggattcttgctcccatgctgctgtcccttcaggctcacatgcacaggaatgctacatgatggccagctgcttccctccttggttatcatccactgcagctgctagttagaaaggtttggagggatgacttttagtaaatcatggggattttattgatttattttcacttttgggattttgtggggtgggagtggggagcaggaattgcactcagacatgacatttcaattcatctctgctaatgaaaagggttctttctcttgggggaaatgtgtgtgtcagttctgtcagctgcaagttcttgtataatgaagtcaatgccatcaggccaaggaaataaaataattgcttaccttaaaaatc

SEQ ID NO: 292730 - DNA, 1377 bp, Homo sapiens
actggacgcataacgcatgggcgggctgggctgatgctcgcgggggtgacgtcacagcccgacgcgccacccagctgtttttgtgctcccagctctagcgaaaagccgccggtatttctccatctggctctcctctacctccaggcaggctcacccgagatccccgccccgaaccccccctgcacactcgcgcaaggagacagaaggtgaagacatctagaaacattacaccacacacaccgtcatcacattttcacatgctcaattgatattttttgctgcttcctcggcccagggagaaagcatgtcaggacagagctgttggattggctttgatagaggaatggggatgatgtaagtttacagtattcctggggtttaattgttgtgcagtttcatagatgggtcaggaggtggacaagttggggccagagatgatggcagtccagcagcaactccctgtgctcccttctctttgggcagagattctatttttgacatttgcacaagacaggtagggaaaggggacttgtggtagtggaccatacctggggaccaaaagagacccactgtaattgatgcattgtggcccctgatcttccctgtctcacacttcttttctcccatcccggttgcaatctcactcagacatcacagtaccaccccaggggtggcagtagacaacaacccagaaatttagacagggatctcttacctttggaaaataggggttaggcatgaaggtggttgtgattaagaagatggttttgttattaaatagcattaaactggaattgacaagagtgttgagcatccctgtctaacctgctctttctctttggtgccccttatctcaccccttccttggaatttaataagtctcaggcatttccaattgtagactaaaaccactcttagcatctcctctagtattttccatgtatcaggaaagaggtgtcttatgtagggagggggcaagtatgaagtaaggtaattatatactactctcattcaggattcttgctcccatgctgctgtcccttcaggctcacatgcacaggaatgctacatgatggccagctgcttccctccttggttatcatccactgcagctgctagttagaaaggtttggagggatgacttttagtaaatcatggggattttattgatttattttcacttttgggattttgtggggtgggagtggggagcaggaattgcactcagacatgacatttcaattcatctctgctaatgaaaagggttctttctcttgggggaaatgtgtgtgtcagttctgtcagctgcaagttcttgtataatgaagtcaatgccatcaggccaaggaaataaaataattgcttaccttaaaaatc

SEQ ID NO: 292731 - DNA, 1770 bp, Homo sapiens
actggacgcataacgcatgggcgggctgggctgatgctcgcgggggtgacgtcacagcccgacgcgccacccagctgtttttgtgctcccagctctagcgaaaagccgccggtatttctccatctggctctcctctacctccaggcaggctcacccgagatccccgccccgaaccccccctgcacactcggcccagcgctgttgcccccggagcggacgtttctgcagctattctgagcacaccttgacgtcggctgagggagcgggacagggtcagcggcgaaggaggcaggccccgcgcggggatctcggaagccctgcggtgcatcatgaagttccagtacaaggaggaccatccctttgagtatcggaaaaaggaaggagaaaagatccggaagaaatatccggacagggtccccgtgattgtagagaaggctccaaaagccagggtgcctgatctggacaagaggaagtacctagtgccctctgaccttactgttggccagttctacttcttaatccggaagagaatccacctgagacctgaggacgccttattcttctttgtcaacaacaccatccctcccaccagtgctaccatgggccaactgtatgaggacaatcatgaggaagactattttctgtatgtggcctacagtgatgagagtgtctatgggaaatgagtggttggaagcccagcagatgggagcacctggacttgggggtaggggaggggtgtgtgtgcgcgacatggggaaagagggtggctcccaccgcaaggagacagaaggtgaagacatctagaaacattacaccacacacaccgtcatcacattttcacatgctcaattgatattttttgctgcttcctcggcccagggagaaagcatgtcaggacagagctgttggattggctttgatagaggaatggggatgatgtaagtttacagtattcctggggtttaattgttgtgcagtttcatagatgggtcaggaggtggacaagttggggccagagatgatggcagtccagcagcaactccctgtgctcccttctctttgggcagagattctatttttgacatttgcacaagacaggtagggaaaggggacttgtggtagtggaccatacctggggaccaaaagagacccactgtaattgatgcattgtggcccctgatcttccctgtctcacacttcttttcatccctgtctaacctgctctttctctttggtgccccttatctcaccccttccttggaatttaataagtctcaggcatttccaattgtagactaaaaccactcttagcatctcctctagtattttccatgtatcaggaaagaggtgtcttatgtagggagggggcaagtatgaagtaaggtaattatatactactctcattcaggattcttgctcccatgctgctgtcccttcaggctcacatgcacaggaatgctacatgatggccagctgcttccctccttggttatcatccactgcagctgctagttagaaaggtttggagggatgacttttagtaaatcatggggattttattgatttattttcacttttgggattttgtggggtgggagtggggagcaggaattgcactcagacatgacatttcaattcatctctgctaatgaaaagggttctttctcttgggggaaatgtgtgtgtcagttctgtcagctgcaagttcttgtataatgaagtcaatgccatcaggccaaggaaataaaataattgcttaccttaaaaatc

SEQ ID NO: 292732 - DNA, 1769 bp, Homo sapiens
actggacgcataacgcatgggcgggctgggctgatgctcgcgggggtgacgtcacagcccgacgcgccacccagctgtttttgtgctcccagctctagcgaaaagccgccggtatttctccatctggctctcctctacctccaggcaggctcacccgagatccccgccccgaaccccccctgcacactcggcccagcgctgttgcccccggagcggacgtttctgcagctattctgagcacaccttgacgtcggctgagggagcgggacagggtcagcggcgaaggaggcaggccccgcgcggggatctcggaagccctgcggtgcatcatgaagttccagtacaaggaggaccatccctttgagtatcggaaaaaggaaggagaaaagatccggaagaaatatccggacagggtccccgtgattgtagagaaggctccaaaagccagggtgcctgatctggacaagaggaagtacctagtgccctctgaccttactgttggccagttctacttcttaatccggaagagaatccacctgagacctgaggacgccttattcttctttgtcaacaacaccatccctcccaccagtgctaccatgggccaactgtatgaggacaatcatgaggaagactattttctgtatgtggcctacagtgatgagagtgtctatgggaaatgagtggttggaagcccagcagatgggagcacctggacttgggggtaggggaggggtgtgtgtgcgcgacatggggaaagagggtggctcccaccgcaaggagacagaaggtgaagacatctagaaacattacaccacacacaccgtcatcacattttcacatgctcaattgatattttttgctgcttcctcggcccagggagaaagcatgtcaggacagagctgttggattggctttgatagaggaatggggatgatgtaagtttacagtattcctggggtttaattgttgtgcagtttcatagatgggtcaggaggtggacaagttggggccagagatgatggcagtccagcagcaactccctgtgctcccttctctttgggcagagattctatttttgacatttgcacaagacaggtagggaaaggggacttgtggtagtggaccatacctggggaccaaaagagacccactgtaattgatgcattgtggcccctgatcttccctgtctcacacttcttttctcccatcccggttgcaatctcactcagacatcacagtaccaccccaggggtggcagtagacaacaacccagaaatttagacagggatctcttacctttggaaaataggggttaggcatgaaggtggttgtgattaagaagatggttttgttattaaatagcattaaactggaattgacaagagtgttgagcatccctgtctaacctgctctttctctttggtgccccttatctcaccccttccttggaatttaataagtctcaggcatttccaattgtagactaaaaccactcttagcatctcctctagtattttccatgtatcaggaaagaggtgtcttatgtagggagggggcaagtatgaagtaaggtaattatatactactctcattgtggggagcaggaattgcactcagacatgacatttcaattcatctctgctaatgaaaagggttctttctcttgggggaaatgtgtgtgtcagttctgtcagctgcaagttcttgtataatgaagtcaatgccatcaggccaaggaaataaaataattgcttaccttaaaaatc

SEQ ID NO: 292733 - DNA, 1632 bp, Homo sapiens
actggacgcataacgcatgggcgggctgggctgatgctcgcgggggtgacgtcacagcccgacgcgccacccagctgtttttgtgctcccagctctagcgaaaagccgccggtatttctccatctggctctcctctacctccaggcaggctcacccgagatccccgccccgaaccccccctgcacactcggcccagcgctgttgcccccggagcggacgtttctgcagctattctgagcacaccttgacgtcggctgagggagcgggacagggtcagcggcgaaggaggcaggccccgcgcggggatctcggaagccctgcggtgcatcatgaagttccagtacaaggaggaccatccctttgagtatcggaaaaaggaaggagaaaagatccggaagaaatatccggacagggtccccgtgattgtagagaaggctccaaaagccagggtgcctgatctggacaagaggaagtacctagtgccctctgaccttactgttggccagttctacttcttaatccggaagagaatccacctgagacctgaggacgccttattcttctttgtcaacaacaccatccctcccaccagtgctaccatgggccaactgtatgaggtaatggttctggttgcacaatactggatgccgtccagtgcagtctggcatcctctagcccttgttctagatgcgttgataacacatctgagaagtggggcagaaggtgttatttatccggatcctcttacatatggcagtgtaaggctctgagagattagataccacttgttttttagggattagccactctactagatttaatccttctgaaatcttgtctgactatagtcttgtctgactatagtgttttaatgctggactgtttattgaaacagcaggaagtgattcctgatagcaaaagttccaaagcgtcagcccatcgcagttcctgctattctggttggtagcatgtaatttgtaatgcattcagaatccagttcattattttactcccatttagcaacagattgagaaagcacgtaatagtaaagccagctccttctaactctgaggccagcctctgccaactgaaggattctccccacagtcagcttcttctatgaactctgaagttttggcttaagacaaccacattgatactaaacaaggggaaacttttcttagaacaaaactaaaactgtgaaacagattccacattatctgggcacaatgaatcagataaaatgaaatataaaattaaggcaaagtctgtaaatggattcatgtcttaacagataaactcaggaggaataatttttatgtgatgtggtttaattggaagtgtcagaatctgaggaaactatagtgaaggactttattattactgaaaatataacctgggattataactattgttttttgcagtattttgcataagatgtttccttctcattgtgctccgttaatgaattacgtaaacttctaataatcctgaatctttttttgcatagcatatattccctgttagtatatgtcccattatatatccatctgtggtatctatgttccccttgctaggagtgagctctttaagagtgaggactgtgccctagtcatcttcatatccctgata

SEQ ID NO: 292734 - DNA, 504 bp, Homo sapiens
gccagcatcatacaagtttcacaaaaagaaatcaagatggggcctcatcatgttgcccaggctggtctctaactcctggactcaagccatcctcctgcatcagtactgcaaaggtactacggatcacttgagctagatgtggatgatgagcaaaactggaccaagcaaatgaaggaaacaccataggtgtggcaaagcagcaagatagaaggaagccaagtcccaacatcctgtagttccataccaactctgatggcttcgtagaatggacttatcattctaacctggactttaaatgcgagggggaaaaaaatccatgaaaaattattcaaggcagatgattataatattttagacttttggttagggcaattgagagaattcatcactaaggggcagaaaactcaactaaatcaaaactccaggccaagagtaccactctgaaggctgctaggcttgctaagtttttctatttctgtgtgtgtgtgtgtgtgtgtgtgtgcg

SEQ ID NO: 292735 - DNA, 825 bp, Homo sapiens
cattaggactgtacttggctgtgagtaacaaagtcggcagcaacagcttaaacaaactttctgtctctattacatactacgcaaatcaagggagagccctacaaaagttacagaagggaacagccagaggacaaggacaccatgttcttcatcctcatgcaagacatctgacctgttcttctgagaggaatcccaggaacaacacacgctctctcagcctccagccggatcagttctgagtgttctcaagcccaaccaatgattgagggggcactgtcaatctcttgctgcaatcatcaaggattgtttgtcatgtatgcactgacctctttggaattccatcatgcaaagtgcgcttgcttgtctttgctttcattatagttacccacaataactcatacctttgcactcattttccgagaacttgtaggacaccattatttgctgtctcctatagccaggcatttcatcctctgcatctggaaacagggccagcttcagggatatacaacctgcacagttacacagggccccccactcagaaggaccccaaacttggtttcattctgtgctgctgccatcttgaaaggcttaatcgttttttcaacaacggcattgcattttcattttgcacggagccctgcaaattatgtagttgatcctgtctagaagactaactgcttcaaggtgaatttctatcaagccctgtctttacacctgggatgggagccattacagactggttctgagtacagcttttagccccagtgatcattttcattgccattcacttggtagggtgactattaccaacctaaaagttca

SEQ ID NO: 292736 - DNA, 453 bp, Homo sapiens
cttgaccttattgagacttgaccttttgcttttccatgcatagactttctgtctctattacatactacgcaaatcaagggagagccctacaaaagttacagaagggaacagccagaggacaaggacaccatgttcttcatcctcatgcaagacatctgacctgttcttctgagaggaatcccaggaacaacacacgctctctcagcctccagccggatcagttctgagtgttctcaagcccaaccaatgattgagggggcactgtcaatctcttgctgcaatcatcaaggattgtttgtcatgtatgcactgacctctttggaattccatcatgcaaagtgcgcttgcttgtctttgctttcattatagttacccacaataactcatacctttgcactcattttccgagaacttgtaggacaccattatttgctgtctcctatagccaggcat

SEQ ID NO: 292737 - DNA, 936 bp, Homo sapiens
cacatccttaccgtcacttccgctcaacgggaccgaaaaaaaaaaccttcagtgttaccggcaaacactggtccacgctgatgaagtggcttcatgatgtcatcaatatccctggctcctctttctgcaagcagcttttactccctggctccctctcagtcacaagactttctgtctctattacatactacgcaaatcaagggagagccctacaaaagttacagaagggaacagccagaggacaaggacaccatgttcttcatcctcatgcaagacatctgacctgttcttctgagaggaatcccaggaacaacacacgctctctcagcctccagccggatcagttctgagtgttctcaagcccaaccaatgattgagggggcactgtcaatctcttgctgcaatcatcaaggattgtttgtcatgtatgcactgacctctttggaattccatcatgcaaagtgcgcttgcttgtctttgctttcattatagttacccacaataactcatacctttgcactcattttccgagaacttgtaggacaccattatttgctgtctcctatagccaggcatttcatcctctgcatctggaaacagggccagcttcagggatatacaacctgcacagttacacagggccccccactcagaaggaccccaaacttggtttcattctgtgctgctgccatcttgaaaggcttaatcgttttttcaacaacggcattgcattttcattttgcacggagccctgcaaattatgtagttgatcctgtctagaagactaactgcttcaaggtgaatttctatcaagccctgtctttacacctgggatgggagccattacagactggttctgagtacagcttttagccccagtgatcattttcattgccattcacttggtagggtgactattaccaacctaaaagttca

SEQ ID NO: 292738 - DNA, 601 bp, Homo sapiens
  misc_feature (39)..(39): n is a, c, g, or t
  misc_feature (44)..(44): n is a, c, g, or t
tattctacagttagttaacgttcaaaatgcgtaaaaacnaacgnacagcctttagttagaatgataagtccattttacgaagccatcagagttcgtatggaactacaggatgttgggacttggcttccttctatcttgctgctttgccacacctatggtgtttccttcatttgcttggtccagttttgctcatcatccacatctagctagttgaagaaaagagaaaatgaggaacttagagttagctcttgtccagcttaagccggctgagaccaacaactcttcaactgggcctgcatgagtgtccaatgggtgaccttttggcatcacatgaccaagagctccaccctcagatcatgctaaagctgcaattttgtggacatgtgtcctatgaagagctatgaagcttgactatgcttgtgcacatcaccagttgcctcactgtttcttaccccaattacctttccccatgcctcagaccaccttgctcctttatcccataaataccctaaaaccccgtctttgggagctagatttgagatctgtcctcctgtctcctcacttggctgcttcatgaataaaccctttctctgcagcaaaa

SEQ ID NO: 292739 - DNA, 630 bp, Homo sapiens
  misc_feature (39)..(39): n is a, c, g, or t
  misc_feature (44)..(44): n is a, c, g, or t
tattctacagttagttaacgttcaaaatgcgtaaaaacnaacgnacagcctttagttagaatgataagtccattttacgaagccatcagagttcgtatggaactacaggatgttgggacttggcttccttctatcttgctgctttgccacacctatggtgtttccttcatttgcttggtccagttttgctcatcatccacatctagctagttgaagaaaagagaaaatgaggaacttagagttagctcttgtccagcttaagccggctgagaccaacaactcttcaactgggcctgcatgagtgtccaatgggtgaccttttggcatcacatgaccaagagctccaccctcagatcatgctaaagctgcaattttgtggacatgtgtcctatgaagagctatgaagcttgactatgcttgtgcacatcaccagttgcctcactgtttcttaccccaattacctttccccatgcctcagaccaccttgctcctttatcccataaataccctaaaaccccgtctttgggagctagatttgagatctgtcctcctgtctcctcacttggctgcttcatgaataaaccctttctctgcagcaaaaaaaaaataaaatgtcctcgctggcctcac

SEQ ID NO: 292740 - DNA, 959 bp, Homo sapiens
aatcacttgaacccaggaggtggaggttgcagtgagccgagatcatgccactacacttcagcctggccaatagagtgagactctgtctcaaaaacaaacaaacaaacagaaaaaaaacaaaaaacaaaaaacaaagaaccagtttgggttttggcagaaatcacatcaggaatattacacgaccccagtaggtaaccctgagtgctcaggtctgagctgaggtctcagtcttttatggcttcatgaaaggactgtgccctcagggaggggaccatggcttggcttgtggggtcttggtgatgactgccatctttcttcatcaccacacccagcttcttgctggcatttgcgaggagacagcagcagataagaggttcaccctttatctcccagtgagcaagatgcttccctgttcagagaggaagtaacactgcttatgcttgactgctgttttttttttttggtcttttgtttgcttttcttttgattggaattctgtatttaagatgttaagttgtgtcagcttacatatggaacattccaggagaggtgactggccccccaccctgcttggcagtggatttctgcatcaccagcttcagaagtgtccctgttcgctagtctgttgtttgcttgctttgtaaatactttggtcccaagctgagacaattgctgtgtaaaacgggaagagtcaatcttgaagggtattatttttcagaagaatttgccgtgtgccttcaccgaaggcagtcaagtctgcagttggatttttctcactagggaatgacaggaaacggggataattttgcactgtggatatattacaggagttgtctatacgattatagtacctgattctttggacatatcattgaactccgaaatgaattcaacctccaggtttaatgaaatctctgatgttactggaaaaaaaaaaaaggaatgaacatcagttctac

SEQ ID NO: 292741 - DNA, 511 bp, Homo sapiens
gacattgcctgtcatcagatggaatgcacgcgaccctggctcagcaaactgcaaacagcctggagtctgcctgtggggagcggtcgaccaatgacgcctgagtggctgctgcctgcgccagagctgcaggggaggctcggtgctgggaagaatgcacgttccagggccctctttcagcctctctcaagcctgaatttgggaagactgcggccagtaaaaatgctccataaaatgttccacatggtttccggcgcgcgtgcgctctgtgaaatggctcgagaagcgattagcacgaccatccctcacatacttacatttttttgtggtgagaacatttaaagcccactctttccagttcttaagtatgcattaatagctgtaatcaccatgttgtacatcagagctccagaacttactcatcttagagctgaaactttgtgctctctggccggcgtctctgctgccccctccagcccctggtaaacaccctaccgctctggatttcatgagt

SEQ ID NO: 292742 - DNA, 995 bp, Homo sapiens
gccctgctggtgctgggagtagggcgcaagatgtcggcggatgcagctccgaggaggtaggcagtgggagccggcgttcagtccggcccgtgccaacagtggttcctctctcccccgtagttcgaggagaccacgcgctgcccctctggcacgatcgtggatgaaccccctggcaactgaaatgggaaaggcagcgcccccgactctggggactggaccgaagtccacggtagtgacagctgccagaccctgaggagaggacgagaagacccgaggcctctgctacgaacactggcagccgatggaaaattcagacggatttgggacagtatgcagagttctccaagcgacagattaacagaggctcttgaagaataactgcgtaatcacgtgttctgctcaaaagaaggcctgaatgcccagtgccttatttggctttcagggttggtgaaagaaaaagcaaagtagatgctttctaatgctaagtcatttaatgtagcaccattccttgaacttctttcatctctaaggtcgtccctttcacctgatgatgacctttgggccatcgtacaggcatgtgtaaacttggagatcttcctcaacattgcaccatatcttgggttcattcaaggcagagtctccttgcaaaagcattctaaaacaatgtaaagtcgaagagagtagagcaatacctccatagttggaaaatgtggaggaggccaattaagggacagaaaaagaagtgcagagaatcttggaattgttgcaaaattattctggagatatttctaagtctcctctatccttttccttagtgattaatacaggtttttatattaagtggacagtaaaatccaaacagaaagaggtatatgtcgtataatgaagcctatgttcaaagtatatctgaaatttgtttttataatgtctttcttgagagcttataaagatgtcagtattctgtgggaaacaaattggcacatgcataaaagaga

SEQ ID NO: 292743 - DNA, 1695 bp, Homo sapiens
gccctgctggtgctgggagtagggcgcaagatgtcggcggatgcagctccgaggaggtaggcagtgggagccggcgttcagtccggcccgtgccaacagtggttcctctctcccccgtagttcgaggagaccacgcgctgcccctctggcacgatcgtggatgaaccccctggcaactgaaatgggaaaggcagcgcccccgactctggggactggaccgaagtccacggtagtgacagctgccagaccctgaggagaggacgagaagacccgaggcctctgctacgaacactggcagccgatggaaaattcagacggatttgggacagtatgcagagttctccaagcgacagattaacagaggctcttgaagaataactgcgtaatcacgtgttctgctcaaaagaaggcctgaatgcccagtgccttatttggctttcaggacagggtcttgcggtgtcacccaggctagagtacagtggtgcaatcatagctcactgctgcctcaaactcctagactcaagcgatcctcctgcttcagcctcccgagtagctgggactacaggtagatgatgggctccacgggaacagagcaaacgttcgctcctgctcctacacggtgtttcctctaaacctgaggctcagccgacttgtcatcacttaaaacccaattcagagcggggggcactgccagtgaatagttcatcaccgactcagtttccccatgtgtatgctgtggtattggatcagcaacgagataagaagatctctcccatttccaagcgtctatgatgattctgaggcacaaggtcacatttgacagtactaggaaacccaggaaacaagaagcaaagatgacaaaggctgtgtctgcctgggcagacgatctatttggacaagataatagacccaggcatggacatgctctccaagaaagatgccctgacagctgctcacactgaagctgaatcgaacattccaatccttagaggttccagcgaagatcttgaagtctccctgagccattgacacaatggccatgccatcccagtgataaaacacaaattgtggccttgttttggacagaaataaagagcccagtttgttagtgatttactgataataactgaatcgagtactaatacttggcgattttaaaagccatcatgttaaaaagaccacctgattcccagtgaccctgcagtgactgggtttgggcagctcgtcccctgcacctgtttggggctgtgccagccacttccagtgagaacatcgcattaacttgcggtcgcagacctggctggaccccttgaaccaaattcctttctgaccttatcagaccccaaataaaagagctcaccaggcccctcagcctacgtgacccacctgcccagtgaaaaaagtagggccctgttctgttctctgaggatggtcagtgtgctctttgatgaaaacggtttctaagctgaggcctgagacctagatcattgttctcacagcgtgtgcttgaccagccacaccagaagcacccaggctgctggctaaaaacactgatgctggggcccaccctagcccctgggtagggggtagagacctaaggtttggcatttttacaagctcctagggtgattcttagatgccctgatgattgagaaccactgctcgagcttcttaaatggctgctgaagaatgatt

SEQ ID NO: 292744 - DNA, 1236 bp, Homo sapiens
gccctgctggtgctgggagtagggcgcaagatgtcggcggatgcagctccgaggaggtaggcagtgggagccggcgttcagtccggcccgtgccaacagtggttcctctctcccccgtagttcgaggagaccacgcgctgcccctctggcacgatcgtggatgaaccccctggcaactgaaatgggaaaggcagcgcccccgactctggggactggaccgaagtccacggtagtgacagctgccagaccctgaggagaggacgagaagacccgaggcctctgctacgaacactggcagccgatggaaaattcagacggatttgggacagtatgcagagttctccaagcgacagattaacagaggctcttgaagaataactgcgtaatcacgtgttctgctcaaaagaaggcctgaatgcccagtgccttatttggctttcaggacagggtcttgcggtgtcacccaggctagagtacagtggtgcaatcatagctcactgctgcctcaaactcctagactcaagcgatcctcctgcttcagcctcccgagtagctgggactacaggtagatgatgggctccacgggaacagagcaaacgttcgctcctgctcctacacggtgtttcctctaaacctgaggctcagccgacttgtcatcacttaaaacccaattcagagcggggggcactgccagtgaatagttcatcaccgactcagtttccccatgtgtatgctgtggtattggatcagcaacgagataagaagatctctcccatttccaagcgtctatgatgattctgaggcacaaggtcacatttgacagtactaggaaacccaggaaacaagaagcaaagatgacaaaggctgtgtctgcctgggcagacgatctatttggacaagataatagacccaggcatggacatgctctccaagaaagatgccctgacagctgctcacactgaagctgaatcgaacattccaatccttagaggttccagcgaagatcttgaagtctccctgagccattgacacaatggccatgccatcccagtgataaaacacaaattgtggccttgttttggacagaaataaagagcccagtttgttagtgatttactgatacacacacacaccccaccccccacaaaaaacccgggggcgccctcttcgcgggggcgcgcggaaaacacggggtcctcaccgggcccttggctccatacctgtttccgtgcccct

SEQ ID NO: 292745 - DNA, 1923 bp, Homo sapiens
gccctgctggtgctgggagtagggcgcaagatgtcggcggatgcagctccgaggaggtaggcagtgggagccggcgttcagtccggcccgtgccaacagtggttcctctctcccccgtagttcgaggagaccacgcgctgcccctctggcacgatcgtggatgaaccccctggcaactgaaatgggaaaggcagcgcccccgactctggggactggaccgaagtccacggtagtgacagctgccagaccctgaggagaggacgagaagacccgaggcctctgctacgaacactggcagccgatggaaaattcagacggatttgggacagtatgcagagttctccaagcgacagattaacagaggctcttgaagaataactgcgtaatcacgtgttctgctcaaaagaaggcctgaatgcccagtgccttatttggctttcaggacagggtcttgcggtgtcacccaggctagagtacagtggtgcaatcatagctcactgctgcctcaaactcctagactcaagcgatcctcctgcttcagcctcccgagtagctgggactacaggtagatgatgggctccacgggaacagagcaaacgttcgctcctgctcctacacggtgtttcctctaaacctgaggctcagccgacttgtcatcacttaaaacccaattcagagcggggggcactgccagtgaatagttcatcaccgactcaggtgagtttgggaagttgaaatttgcaggggtgagtgacgggttaatacaagtgggcacagaagcattgacaaagctgtctgtgaagccctcctgctgttctaagatgatggattagagcccaaggggatccttggtgttacctttgaggttccagccatggaggcaagtagggattgggctccagttctcctcctgtcactaatttgccttcgtttttggggcctcagtttccccatgtgtatgctgtggtattggatcagcaacgagataagaagatctctcccatttccaagcgtctatgatgattctgaggcacaaggtcacatttgacagtactaggaaacccaggaaacaagaagcaaagatgacaaaggctgtgtctgcctgggcagacgatctatttggacaagataatagacccaggcatggacatgctctccaagaaagatgccctgacagctgctcacactgaagctgaatcgaacattccaatccttagaggttccagcgaagatcttgaagtctccctgagccattgacacaatggccatgccatcccagtgataaaacacaaattgtggccttgttttggacagaaataaagagcccagtttgttagtgatttactgataataactgaatcgagtactaatacttggcgattttaaaagccatcatgttaaaaagaccacctgattcccagtgaccctgcagtgactgggtttgggcagctcgtcccctgcacctgtttggggctgtgccagccacttccagtgagaacatcgcattaacttgcggtcgcagacctggctggaccccttgaaccaaattcctttctgaccttatcagaccccaaataaaagagctcaccaggcccctcagcctacgtgacccacctgcccagtgaaaaaagtagggccctgttctgttctctgaggatggtcagtgtgctctttgatgaaaacggtttctaagctgaggcctgagacctagatcattgttctcacagcgtgtgcttgaccagccacaccagaagcacccaggctgctggctaaaaacactgatgctggggcccaccctagcccctgggtagggggtagagacctaaggtttggcatttttacaagctcctagggtgattcttagatgccctgatgattgagaaccactgctcgagcttcttaaatggctgctgaagaatgatt

SEQ ID NO: 292746 - DNA, 1554 bp, Homo sapiens
gcttgagccaccatgcccagcttcaacctattctttatgggccaggtaaatacctcttcccccaggaagcctaccttgaccgtgttagcccattgagctctcacctgcctttctctttgtattacctattccactgatttgcccctgagcacggacagccctggcgtttatgcggacatctgccttgttgtctcaggtagatgatgggctccacgggaacagagcaaacgttcgctcctgctcctacacggtgtttcctctaaacctgaggctcagccgacttgtcatcacttaaaacccaattcagagcggggggcactgccagtgaatagttcatcaccgactcaggtgagtttgggaagttgaaatttgcaggggtgagtgacgggttaatacaagtgggcacagaagcattgacaaagctgtctgtgaagccctcctgctgttctaagatgatggattagagcccaaggggatccttggtgttacctttgaggttccagccatggaggcaagtagggattgggctccagttctcctcctgtcactaatttgccttcgtttttggggcctcagtttccccatgtgtatgctgtggtattggatcagcaacgagataagaagatctctcccatttccaagcgtctatgatgattctgaggcacaaggtcacatttgacagtactaggaaacccaggaaacaagaagcaaagatgacaaaggctgtgtctgcctgggcagacgatctatttggacaagataatagacccaggcatggacatgctctccaagaaagatgccctgacagctgctcacactgaagctgaatcgaacattccaatccttagaggttccagcgaagatcttgaagtctccctgagccattgacacaatggccatgccatcccagtgataaaacacaaattgtggccttgttttggacagaaataaagagcccagtttgttagtgatttactgataataactgaatcgagtactaatacttggcgattttaaaagccatcatgttaaaaagaccacctgattcccagtgaccctgcagtgactgggtttgggcagctcgtcccctgcacctgtttggggctgtgccagccacttccagtgagaacatcgcattaacttgcggtcgcagacctggctggaccccttgaaccaaattcctttctgaccttatcagaccccaaataaaagagctcaccaggcccctcagcctacgtgacccacctgcccagtgaaaaaagtagggccctgttctgttctctgaggatggtcagtgtgctctttgatgaaaacggtttctaagctgaggcctgagacctagatcattgttctcacagcgtgtgcttgaccagccacaccagaagcacccaggctgctggctaaaaacactgatgctggggcccaccctagcccctgggtagggggtagagacctaaggtttggcatttttacaagctcctagggtgattcttagatgccctgatgattgagaaccactgctcgagcttcttaaatggctgctgaagaatgatt

SEQ ID NO: 292747 - DNA, 1500 bp, Homo sapiens
gcttgagccaccatgcccagcttcaacctattctttatgggccaggtaaatacctcttcccccaggaagcctaccttgaccgtgttagcccattgagctctcacctgcctttctctttgtattacctattccactgatttgcccctgagcacggacagccctggcgtttatgcggacatctgccttgttgtctcaggtagatgatgggctccacgggaacagagcaaacgttcgctcctgctcctacacggtgtttcctctaaacctgaggctcagccgacttgtcatcacttagtgagtttgggaagttgaaatttgcaggggtgagtgacgggttaatacaagtgggcacagaagcattgacaaagctgtctgtgaagccctcctgctgttctaagatgatggattagagcccaaggggatccttggtgttacctttgaggttccagccatggaggcaagtagggattgggctccagttctcctcctgtcactaatttgccttcgtttttggggcctcagtttccccatgtgtatgctgtggtattggatcagcaacgagataagaagatctctcccatttccaagcgtctatgatgattctgaggcacaaggtcacatttgacagtactaggaaacccaggaaacaagaagcaaagatgacaaaggctgtgtctgcctgggcagacgatctatttggacaagataatagacccaggcatggacatgctctccaagaaagatgccctgacagctgctcacactgaagctgaatcgaacattccaatccttagaggttccagcgaagatcttgaagtctccctgagccattgacacaatggccatgccatcccagtgataaaacacaaattgtggccttgttttggacagaaataaagagcccagtttgttagtgatttactgataataactgaatcgagtactaatacttggcgattttaaaagccatcatgttaaaaagaccacctgattcccagtgaccctgcagtgactgggtttgggcagctcgtcccctgcacctgtttggggctgtgccagccacttccagtgagaacatcgcattaacttgcggtcgcagacctggctggaccccttgaaccaaattcctttctgaccttatcagaccccaaataaaagagctcaccaggcccctcagcctacgtgacccacctgcccagtgaaaaaagtagggccctgttctgttctctgaggatggtcagtgtgctctttgatgaaaacggtttctaagctgaggcctgagacctagatcattgttctcacagcgtgtgcttgaccagccacaccagaagcacccaggctgctggctaaaaacactgatgctggggcccaccctagcccctgggtagggggtagagacctaaggtttggcatttttacaagctcctagggtgattcttagatgccctgatgattgagaaccactgctcgagcttcttaaatggctgctgaagaatgatt

SEQ ID NO: 292748 - DNA, 1252 bp, Homo sapiens
tacgttatccatgaagtgtcgcgagagaaacggacgccgttctctcccgcggaattcaggtttacggccctgcgggttctcagagaatttctagaatttggaatcgagtgcattttctgacatttgagtacagtacccaggggttcttggagaagaacctggtcccagaggagcttgactgaccataaaaatgagtactgcagatgcacttgatgatgaaaacacatttaaaatattagttgcaacagatattcatcttggatttatggagaaagatgcagtcagaggaaatgatacgtttgtaacactcgatgaaattttaagacttgcccaggaaaatgaagtggattttattttgttaggtggtgatctttttcatgaaaataagccctcaaggaaaacattacatacctgcctcgagttattaagaaaatattgtatgggtgatcggcctgtccagtttgaaattctcagtgatcagtcagtcaactttggttttagtaagtttccatgggtgaactatcaagatggcaacctcaacatttcaattccagtgtttagtattcatggcaatcatgacgatcccacaggggcagatgcactttgtgccttggacattttaagttgtgctggatttgtaaatcactttggacgttcaatgtctgtggagaagatagacattagtccggttttgcttcaaaaaggaagcacaaagattgcgctatatggtttaggatccattccagatgaaaggctctatcgaatgtttgtcaataaaaaagtaacaatgttgagaccaaaggaagatgagaactcttggtttaacttatttgtgattcatcagaacagggtataggattgattgaaaagaagacagacttgaagaagcaagatttattatctgatcactgcagtaaaaatgtgaggtggtgacagtgatggcaatgaaacagaaatgggagggacacaccggagaagttgtcagggaagaactcaaaggatttggggcctgattatataatttattacagttgtcccttggtatccacggggggtgttcggtccaggacctaaaatcctgggatgctgaaatcccttgaataaaatggtatagcatttgcatataacctacatatatcctcctatgtactttaaatcatctctagattacttgtaatacctgatacaatgtaaatactgtttaaatagttgttatactgtattgctttaaaaatttatatttttcgttgtt

SEQ ID NO: 292749 - DNA, 2588 bp, Homo sapiens
tacgttatccatgaagtgtcgcgagagaaacggacgccgttctctcccgcggaattcaggtttacggccctgcgggttctcagaggcaagttcagaccgtgttgttttcttttcacggatcctgccctttcttcccgaaaagaagacagccttgggtcgcgattgtggggcttcgaagagtccagcagtgggaatttctagaatttggaatcgagtgcattttctgacatttgagtacagtacccaggggttcttggagaagaacctggtcccagaggagcttgactgaccataaaaatgagtactgcagatgcacttgatgatgaaaacacatttaaaatattagttgcaacagatattcatcttggatttatggagaaagatgcagtcagaggaaatgatacgtttgtaacactcgatgaaattttaagacttgcccaggaaaatgaagtggattttattttgttaggtggtgatctttttcatgaaaataagccctcaaggaaaacattacatacctgcctcgagttattaagaaaatattgtatgggtgatcggcctgtccagtttgaaattctcagtgatcagtcagtcaactttggttttagtaagtttccatgggtgaactatcaagatggcaacctcaacatttcaattccagtgtttagtattcatggcaatcatgacgatcccacaggggcagatgcactttgtgccttggacattttaagttgtgctggatttgtaaatcactttggacgttcaatgtctgtggagaagatagacattagtccggttttgcttcaaaaaggaagcacaaagattgcgctatatggtttaggatccattccagatgaaaggctctatcgaatgtttgtcaataaaaaagtaacaatgttgagaccaaaggaagatgagaactcttggtttaacttatttgtgattcatcagaacaggagtaaacatggaagtactaacttcattccagaacaatttttggatgacttcattgatcttgttatctggggccatgaacatgagtgtaaaatagctccaaccaaaaatgaacaacagctgttttatatctcacaacctggaagctcagtggttacttctctttccccaggagaagctgtaaagaaacatgttggtttgctgcgtattaaagggaggaagatgaatatgcataaaattcctcttcacacagtgcggcagtttttcatggaggatattgttctagctaatcatccagacatttttaacccagataatcctaaagtaacccaagccatacaaagcttctgtttggagaagattgaagaaatgcttgaaaatgctgaacgggaacgtctgggtaattctcaccagccagagaagcctcttgtacgactgcgagtggactatagtggaggttttgaacctttcagtgttcttcgctttagccagaaatttgtggatcgggtagctaatccaaaagacattatccattttttcaggcatagagaacaaaaggaaaaaacaggagaagagatcaactttgggaaacttatcacaaagccttcagaaggaacaactttaagggtagaagatcttgtaaaacagtactttcaaaccgcagagaagaatgtgcagctctcactgctaacagaaagagggatgggtgaagcagtacaagaatttgtggacaaggaggagaaagatgccattgaggaattagtgaaataccagttggaaaaaacacagcgatttcttaaagaacgtcatattgatgccctcgaagacaaaatcgatgaggaggtacgtcgtttcagagaaaccagacaaaaaaatactaatgaagaagatgatgaagtccgtgaggctatgaccagggccagagcactcagatctcagtcagaggagtctgcttctgcctttagtgctgatgaccttatgagtatagatttagcagaacagatggctaatgactctgatgatagcatctcagcagcaaccaacaaaggaagaggccgaggaagaggtcgaagaggtggaagagggcagaattcagcatcgagaggagggtctcaaagaggaagagcctttaaatctacaagacagcagccttcccgaaatgtcactactaagaattattcagaggtgattgaggtagatgaatcagatgtggaagaagacatttttcctaccacttcaaagacagatcaaaggtggtccagcacatcatccagcaaaatcatgtcccagagtcaagtatcgaaaggggttgattttgaatcaagtgaggatgatgatgatgatccttttatgaacactagttctttaagaagaaatagaagataatatatttaatggcactgagaaacatgcaagatacaggaaaaatgaaaatgttacaagctaagagtttacagtttaagattttaagtattgtttcctgagcataactccataagtaagaaatttctagttcacagacatacaatagcattgattcaccttgtttttttaacctggttgttgtagtaagagctttgtttcaatatcactcttgagtaaagattaaaataaagctaccattttacatttct

SEQ ID NO: 292750 - DNA, 2128 bp, Homo sapiens
tacgttatccatgaagtgtcgcgagagaaacggacgccgttctctcccgcggaattcaggtttacggccctgcgggttctcagagaatttctagaatttggaatcgagtgcattttctgacatttgagtacagtacccaggggttcttggagaagaacctggtcccagaggagcttgactgaccataaaaatgagtactgcagatgcacttgatgatgaaaacacatttaaaatattagttgcaacagatattcatcttggatttatggagaaagatgcagtcagaggaaatgatacgtttgtaacactcgatgaaattttaagacttgcccaggaaaatgaagtggattttattttgttaggtggtgatctttttcatgaaaataagccctcaaggaaaacattacatacctgcctcgagttattaagaaaatattgtatgggtgatcggcctgtccagtttgaaattctcagtgatcagtcagtcaactttggttttagtaagtttccatgggtgaactatcaagatggcaacctcaacatttcaattccagtgtttagtattcatggcaatcatgacgatcccacaggggcagatgcactttgtgccttggacattttaagttgtgctggatttgtaaatcactttggacgttcaatgtctgtggagaagatagacattagtccggttttgcttcaaaaaggaagcacaaagattgcgctatatggtttaggatccattccagatgaaaggctctatcgaatgtttgtcaataaaaaagtaacaatgttgagaccaaaggaagatgagaactcttggtttaacttatttgtgattcatcagaacaggagtaaacatggaagtactaacttcattccagaacaatttttggatgacttcattgatcttgttatctggggccatgaacatgagtgtaaaatagctccaaccaaaaatgaacaacagctgttttatatctcacaacctggaagctcagtggttacttctctttccccaggagaagctgtaaagaaacatgttggtttgctgcgtattaaagggaggaagatgaatatgcataaaattcctcttcacacagtgcggcagtttttcatggaggatattgttctagctaatcatccagacatttttaacccagataatcctaaagtaacccaagccatacaaagcttctgtttggagaagattgaagaaatgcttgaaaatgctgaacgggaacgtctgggtaattctcaccagccagagaagcctcttgtacgactgcgagtggactatagtggaggttttgaacctttcagtgttcttcgctttagccagaaatttgtggatcgggtagctaatccaaaagacattatccattttttcaggcatagagaacaaaaggaaaaaacaggagaagagatcaactttgggaaacttatcacaaagccttcagaaggaacaactttaagggtagaagatcttgtaaaacagtactttcaaaccgcagagaagaatgtgcagctctcactgctaacagaaagagggatgggtgaagcagtacaagaatttgtggacaaggaggagaaagatgccattgaggaattagtgaaataccagttggaaaaaacacagcgatttcttaaagaacgtcatattgatgccctcgaagacaaaatcgatgaggaggtacgtcgtttcagagaaaccagacaaaaaaatactaatgaagaagatgatgaagtccgtgaggctatgaccagggccagagcactcagatctcagtcagaggagtctgcttctgcctttagtgctgatgaccttatgagtatagatttagcagaacagatggctaatgactctgatgatagcatctcagcagcaaccaacaaaggaagaggccgaggaagaggtcgaagaggtggaagagggcagaattcagcatcgagaggagggtctcaaagaggaagagcagacactggtctggagacttctacccgtagcaggaactcaaagactgctgtgtcagcatctagaaatatgtctattatagatggtgagtatagactgcaagtgattatttattaattccaacattagaaagaccaaggtgatcaccattggtag

SEQ ID NO: 292751 - DNA, 659 bp, Homo sapiens
atggatacaaaggaatttttatcatagaatgctgttttctagaattctcctctggaatatttcttagatattgaatatggctactaaggtagaggaaaatgagaaactactggaaccccatggctcctaatgtagcaacagggataaaggtatcgtcaacaacaaagaagggattaggaggctttccttcaatacatttgtagttcatttggttaggtgattagattttatccttcaggtgtttttctatgaaatatttttagtgtgtgtatttataaacactacagtatctcaataagctgggaaataatgagactgacagttgggcattgagttatgcgtacctataattctatctccctttagatttttaaaaatatcaaatagttttataattaggcatcattcagttttgcagataggactcagaaaatctttagctaaagaagtatgcaagtttttctaagttattttaagaataacataatgcacatttcatctttttcattctagcctttaaatctacaagacagcagccttcccgaaatgtcactactaagaattattcagaggtaagaaaaaaagttttatggttgtgtattaataatttatgttttctgcattatgaattgtcaactctctgatttacaaagtaaata

SEQ ID NO: 292752 - DNA, 2565 bp, Homo sapiens
tacgttatccatgaagtgtcgcgagagaaacggacgccgttctctcccgcggaattcaggtttacggccctgcgggttctcagagaatttctagaatttggaatcgagtgcattttctgacatttgagtacagtacccaggggttcttggagaagaacctggtcccagaggagcttgactgaccataaaaatgagtactgcagatgcacttgatgatgaaaacacatttaaaatattagttgcaacagatattcatcttggatttatggagaaagatgcagtcagaggaaatgatacgtttgtaacactcgatgaaattttaagacttgcccaggaaaatgaagtggattttattttgttaggtggtgatctttttcatgaaaataagccctcaaggaaaacattacatacctgcctcgagttattaagaaaatattgtatgggtgatcggcctgtccagtttgaaattctcagtgatcagtcagtcaactttggttttagtaagtttccatgggtgaactatcaagatggcaacctcaacatttcaattccagtgtttagtattcatggcaatcatgacgatcccacaggggcagatgcactttgtgccttggacattttaagttgtgctggatttgtaaatcactttggacgttcaatgtctgtggagaagatagacattagtccggttttgcttcaaaaaggaagcacaaagattgcgctatatggtttaggatccattccagatgaaaggctctatcgaatgtttgtcaataaaaaagtaacaatgttgagaccaaaggaagatgagaactcttggtttaacttatttgtgattcatcagaacaggagtaaacatggaagtactaacttcattccagaacaatttttggatgacttcattgatcttgttatctggggccatgaacatgagtgtaaaatagctccaaccaaaaatgaacaacagctgttttatatctcacaacctggaagctcagtggttacttctctttccccaggagaagctgtaaagaaacatgttggtttgctgcgtattaaagggaggaagatgaatatgcataaaattcctcttcacacagtgcggcagtttttcatggaggatattgttctagctaatcatccagacatttttaacccagataatcctaaagtaacccaagccatacaaagcttctgtttggagaagattgaagaaatgcttgaaaatgctgaacgggaacgtctgggtaattctcaccagccagagaagcctcttgtacgactgcgagtggactatagtggaggttttgaacctttcagtgttcttcgctttagccagaaatttgtggatcgggtagctaatccaaaagacattatccattttttcaggcatagagaacaaaaggaaaaaacaggagaagagatcaactttgggaaacttatcacaaagccttcagaaggaacaactttaagggtagaagatcttgtaaaacagtactttcaaaccgcagagaagaatgtgcagctctcactgctaacagaaagagggatgggtgaagcagtacaagaatttgtggacaaggaggagaaagatgccattgaggaattagtgaaataccagttggaaaaaacacagcgatttcttaaagaacgtcatattgatgccctcgaagacaaaatcgatgaggaggtacgtcgtttcagagaaaccagacaaaaaaatactaatgaagaagatgatgaagtccgtgaggctatgaccagggccagagcactcagatctcagtcagaggagtctgcttctgcctttagtgctgatgaccttatgagtatagatttagcagaacagatggctaatgactctgatgatagcatctcagcagcaaccaacaaaggaagaggccgaggaagaggtcgaagaggtggaagagggcagaattcagcatcgagaggagggtctcaaagaggaagagcagacactggtctggagacttctacccgtagcaggaactcaaagactgctgtgtcagcatctagaaatatgtctattatagatgcctttaaatctacaagacagcagccttcccgaaatgtcactactaagaattattcagaggtgattgaggtagatgaatcagatgtggaagaagacatttttcctaccacttcaaagacagatcaaaggtggtccagcacatcatccagcaaaatcatgtcccagagtcaagtatcgaaaggggttgattttgaatcaagtgaggatgatgatgatgatccttttatgaacactagttctttaagaagaaatagaagataatatatttaatggcactgagaaacatgcaagatacaggaaaaatgaaaatgttacaagctaagagtttacagtttaagattttaagtattgtttcctgagcataactccataagtaagaaatttctagttcacagacatacaatagcattgattcaccttgtttttttaacctggttgttgtagtaagagctttgtttcaatatcactcttgagtaaagattaaaataaagctaccattttacatttct

SEQ ID NO: 292753 - DNA, 2959 bp, Homo sapiens
tacgttatccatgaagtgtcgcgagagaaacggacgccgttctctcccgcggaattcaggtttacggccctgcgggttctcagagaatttctagaatttggaatcgagtgcattttctgacatttgagtacagtacccaggggttcttggagaagaacctggtcccagaggagcttgactgaccataaaaatgagtactgcagatgcacttgatgatgaaaacacatttaaaatattagttgcaacagatattcatcttggatttatggagaaagatgcagtcagaggaaatgatacgtttgtaacactcgatgaaattttaagacttgcccaggaaaatgaagtggattttattttgttaggtggtgatctttttcatgaaaataagccctcaaggaaaacattacatacctgcctcgagttattaagaaaatattgtatgggtgatcggcctgtccagtttgaaattctcagtgatcagtcagtcaactttggttttagtaagtttccatgggtgaactatcaagatggcaacctcaacatttcaattccagtgtttagtattcatggcaatcatgacgatcccacaggggcagatgcactttgtgccttggacattttaagttgtgctggatttgtaaatcactttggacgttcaatgtctgtggagaagatagacattagtccggttttgcttcaaaaaggaagcacaaagattgcgctatatggtttaggatccattccagatgaaaggctctatcgaatgtttgtcaataaaaaagtaacaatgttgagaccaaaggaagatgagaactcttggtttaacttatttgtgattcatcagaacaggagtaaacatggaagtactaacttcattccagaacaatttttggatgacttcattgatcttgttatctggggccatgaacatgagtgtaaaatagctccaaccaaaaatgaacaacagctgttttatatctcacaacctggaagctcagtggttacttctctttccccaggagaagctgtaaagaaacatgttggtttgctgcgtattaaagggaggaagatgaatatgcataaaattcctcttcacacagtgcggcagtttttcatggaggatattgttctagctaatcatccagacatttttaacccagataatcctaaagtaacccaagccatacaaagcttctgtttggagaagattgaagaaatgcttgaaaatgctgaacgggaacgtctgggtaattctcaccagccagagaagcctcttgtacgactgcgagtggactatagtggaggttttgaacctttcagtgttcttcgctttagccagaaatttgtggatcgggtagctaatccaaaagacattatccattttttcaggcatagagaacaaaaggaaaaaacaggagaagagatcaactttgggaaacttatcacaaagccttcagaaggaacaactttaagggtagaagatcttgtaaaacagtactttcaaaccgcagagaagaatgtgcagctctcactgctaacagaaagagggatgggtgaagcagtacaagaatttgtggacaaggaggagaaagatgccattgaggaattagtgaaataccagttggaaaaaacacagcgatttcttaaagaacgtcatattgatgccctcgaagacaaaatcgatgaggaggtacgtcgtttcagagaaaccagacaaaaaaatactaatgaagaagatgatgaagtccgtgaggctatgaccagggccagagcactcagatctcagtcagaggagtctgcttctgcctttagtgctgatgaccttatgagtatagatttagcagaacagatggctaatgactctgatgatagcatctcagcagcaaccaacaaaggaagaggccgaggaagaggtcgaagaggtggaagagggcagaattcagcatcgagaggagggtctcaaagaggaagagcagacactggtctggagacttctacccgtagcaggaactcaaagactgctgtgtcagcatctagaaatatgtctattatagatgcctttaaatctacaagacagcagccttcccgaaatgtcactactaagaattattcagaggtgattgaggtagatgaatcagatgtggaagaagacatttttcctaccacttcaaagacagatcaaaggtggtccagcacatcatccagcaaaatcatgtcccagagtcaagtatcgaaaggggttgattttgaatcaagtgaggatgatgatgatgatccttttatgaacactagttctttaagaagaaatagaagataatatatttaatggcactgagaaacatgcaagatacaggaaaaatgaaaatgttacaagctaagagtttacagtttaagattttaagtattgtttcctgagcataactccataagtaagaaatttctagttcacagacatacaatagcattgattcaccttgtttttttaacctggttgttgtagtaagagctttgtttcaatatcactcttgagtaaagattaaaataaagctaccattttacatttctatttcataatgaaaaactatgtcagtattttaatatggttacatttagccaaagttgagggaaagagcttataaaatttaacttcttcataattttagtaatttcctagaggttctgggttttctgaaagtaaaacaatttatgcgaacctatgtctaaattcactgtttgttactatgtatgtttttttccaatgcttcttataagactaaatgattagaagtacctaatagtttgaacagatatgtttttatttaaaagagtagaataacctttcagaattactgagttttttattccagttgtagcaaagatttcaaaagattgtgttcccattaagtggtagtaatttcctttattattctgtatccttaatggtgttctctctctctct

SEQ ID NO: 292754 - DNA, 1236 bp, Homo sapiens
atgggtatgacctgggtcttattcacactgcattttggggttcctgagctgcttgtttgagcgagaggtgcttcaggttcaggtcttatgcctagccccttgggtgagagggcctattctgattggcccccaggccctgctgtggagtctgggtctgagttgaactgctgagaaagagccccagacctccagcatcgtggtggagcactggagatgctctggagccagcctgcctggggtcaagtccgggttccatctctgactgtgtgacctcggggacgtgccataactgctctgtgcctcggtctcctcatcggtgaagtatttccctcttagggatgttgtgggaatgaagtgggtgaaggaatgcgagtcctgagaaccgtgtctgctttgtgcacgtgctcagacgcatcaacgattctgcttctcattcgcttctggtgccttttaagtgctgccagggtgtccgcactgtgaacggtccttgacggggtgttatcttcagaaagggaagactagcacccggccccccaggcttccaaagcatcatccatgcaaccatgttggctttcaattccttggagttaaggctgacggccatctggttctaacccggcctcctgtcttcctgtcccactgacttcccgttcttcagctgctctaggcttccctgtctgtctccagaccctagcccacctctgttcccttcccaggctcagctcatccatcaccaactgccatggacccctcttcagcaccctgccccctcctgcagtccctccgcccagccagtacctggtttctgtctcagcggggagctgactcctctctgtgccccccagcgcagggctggactctgaggaggaggactcagtagataggtattgagtgatgagatgagggaatcggctttctgtggccgggaacactcctgctgcagggggtccacctgatgggtgagtcagagaaagactcaggcctgttgaaagtggatcaacaggcaggcagggagatggccagtagccagccgtccgtcctgttcacagcctgcggagtggtgaggctgcctctgtgttttcatggatctgagattcagaacatagctggtttacagccatggcccagttgtgtgctctggagtttcactgcctgaattttaacttgaaaatgtaggacttgggagtctctctgagccattctggcttgggagattgcctgattatatatttcaaa

SEQ ID NO: 292755 - DNA, 1110 bp, Homo sapiens
ggagccaggttgtagaggggctcaaagttagaggaggcggccagctccaccggctgcacccggctgggcgacccggcaaccttcagggggcgctgtttcccccatccctgtccccaactggccggctcccgcgggcgcgcggcggggaaggccagaggacctgggcgcgggcgatgtgcctcctgagcgtccaaaccgggggtgaggcgcggtcacgcccagcgggaaccgcaggcgccgaagcccgggtactgggcccagaatcccgcggaattttggatccgagggaggcgctggggcgcgggacctcgggcgtggggtcccgggcgctggatcggcgcggacgggaggcggcgctggtcccgcgggccagcgggtctcgggagggggcgcccgatcccgcgtctccggcgccgcttcccgggaagtttcaagtttgaaagtcctggcggagggtctgcggcttccgggaccggagtggctgagaggagggccccaagcggccggagcggcgccatggaggagggggcgccgcggcaggtgaacggcgtgggaggggcgcgcgggcccggggggtgcgagaaagcctctgtcatcgccccggagccccgaaccgcggccgcttcccccgatcctcccctcacccgcgccccttccctgcccctgccctggccccggccccgcgacgccctcgcagagcagacctgatctccgggttcggtggttcctggaccttgcacagtctccaaatcagtccgcggctgacccggagactgaaccccaaccagcccgtgagcgaggacggctgagtccgcagtgtgcgccaccagggtggtccccagagtgtccttaagtcggttctcctcggtggggctccaaggccgacgggaattagccgggatagaaaggcggggcacaggggcctgggggggttagaatgtgcgcgcagcggggggcgcagtctgtgcgcgcttggcagtggcaggagtccttcccggagcacaggaggcacgaggggagcgtagatgagaggggagcggcctcccccgccccagggcgggaacctttgggtacatagcgggttctagaatgcggagggggctgggtttc

SEQ ID NO: 292756 - DNA, 3414 bp, Homo sapiens
ggagccaggttgtagaggggctcaaagttagaggaggcggccagctccaccggctgcacccggctgggcgacccggcaaccttcagggggcgctgtttcccccatccctgtccccaactggccggctcccgcgggcgcgcggcggggaaggccagaggacctgggcgcgggcgatgtgcctcctgagcgtccaaaccgggggtgaggcgcggtcacgcccagcgggaaccgcaggcgccgaagcccgggtactgggcccagaatcccgcggaattttggatccgagggaggcgctggggcgcgggacctcgggcgtggggtcccgggcgctggatcggcgcggacgggaggcggcgctggtcccgcgggccagcgggtctcgggagggggcgcccgatcccgcgtctccggcgccgcttcccgggaagtttcaagtttgaaagtcctggcggagggtctgcggcttccgggaccggagtggctgagaggagggccccaagcggccggagcggcgccatggaggagggggcgccgcggcagcctgggccgagccagtggcccccagaggatgagaaggaggtgatccgccgggccatccagaaagagctgaagatcaaggagggggtggagaacctgcggcgcgtggccacagaccgccgccacttgggccatgtgcagcagctgctgcggtcctccaaccgccgcctggagcagctgcatggcgagctgcgggagctgcacgcccgaatcctgctgcccggccctgggcctggcccagctgagcctgtggcctcaggaccccggccgtgggcagagcagctcagggctcggcacctagaggctctccggaggcagctgcatgtggagctgaaggtgaagcagggggctgagaacatgacccacacgtgcgccagtggcacccccaaggagaggaagctcctggcagctgcccagcagatgctgcgggacagccagctgaaggtggccctgctgcggatgaagatcagcagcctggaggccagtgggtccccggagccagggcctgagctgctggcggaggagctacagcatcgactgcacgttgaggcagctgtggctgagggcgccaagaacgtggtgaaactgcttagtagccggagaacacaggaccgcaaggcactggctgaggcccaggcccagctacaggagtcctctcagaaactggacctcctgcgcctggccttggagcagctgctggagcaactgcctcctgcccaccctttgcgcagcagagtgacccgagagttgcgggctgcggtgcctggatacccccagccttcagggacacctgtgaagcccaccgccctaacagggacactgcaggtccgcctcctgggctgtgaacagttgctgacagccgtgcctgggcgctccccagcggccgcactggccagcagcccctccgagggctggcttcggaccaaggccaagcaccagcgtggccgaggcgagcttgccagcgaggtgctggctgtgctaaaggtggacaaccgtgttgtggggcagacgggctgggggcaggtggccgaacagtcctgggaccagacctttgtcatcccactggagcgagcccgtgagctggagattggggtacactggcgggactggcggcagctatgtggcgtggccttcctgagacttgaggacttcctggacaatgcctgtcaccaactgtccctcagcctggtaccgcagggactgctttttgcccaggtgaccttctgcgatcctgtcattgagaggcggccccggctgcagaggcaggaacgcatcttctctaaacgcagaggccaggacttcctgagggcttcgcagatgaacctcggcatggcggcctgggggcgcctcgtcatgaacctgctgcccccctgcagctccccgagcacaatcagcccccctaaaggatgccctcggaccccaacaacactgcgagaggcctctgaccctgccactcccagtaatttcctgcccaagaagacccccttgggtgaagagatgacacccccacccaagcccccacgcctctacctcccccaggagccaacatccgaggagactccgcgcaccaaacgtccccatatggagcctaggactcgacgtgggccatctccaccagcctcccccaccaggaaaccccctcggcttcaggacttccgctgcttagctgtgctgggccggggacactttgggaagcctgtactgcgagaagcggatcctggaggctgtgggctgcacagggcaccctttcctgctctccctccttgcctgcttccagacctccagccatgcctgctttgtgactgagtttgtgcctggtggtgacctcatgatgcagatccacgaggatgtcttccccgagccccaggcccgcttctacgtggcttgtgttgtcctggggctgcagttcttacacgagaagaagatcatttacagggacctgaagttggataaccttctgctggatgcccagggattcctgaagatcgcagactttggactctgcaaggaagggatcggcttcggggaccggactagcaccttctgtggcaccccggagttcctggctcccgaggtgctgacccaggaggcatacacacgggctgtggactggtgggggctgggtgtgctgctctacgagatgctggtgggtgagtgcccgttcccaggggacacagaggaagaggtgtttgactgcatcgtcaacatggacgccccctaccccggctttctgtcggtgcaagggcttgagttcattcagaagctcctccagaagtgcccggagaagcgcctcggggcaggtgagcaggatgccgaggagatcaaggtccagccattcttcaggaccaccaactggcaagccctgctcgcccgcaccatccagccccccttcgtgcctaccctgtgtggccctgcggacctgcgctactttgagggcgagttcacagggctgccgcctgccctgaccccacctgcaccccacagcctcctcactgcccgccaacaggccgccttccgggacttcgactttgtgtcagagcgattcctggaaccctgagggcatctcctggcacctctgtccccttcccccacagactgttagagcctctgctcgttcacccgtgcgccctgcctggaggtccaggccttgctgggtacttctgagcccttgggattcaaagtggcagccatggggccactgttgtgggctttgctcagtgtcactgggcaaagtgtgtcccttccccctccagctcgccctcttctacctcccagcgagacctggcccagaaagggtgccgcagcaaggagtgatatggtttgtctttttaagactggacttgctttatattaaatttgtaaaagtgaaaaaaaaaa

SEQ ID NO: 292757 - DNA, 3585 bp, Homo sapiens
ggagccaggttgtagaggggctcaaagttagaggaggcggccagctccaccggctgcacccggctgggcgacccggcaaccttcagggggcgctgtttcccccatccctgtccccaactggccggctcccgcgggcgcgcggcggggaaggccagaggacctgggcgcgggcgatgtgcctcctgagcgtccaaaccgggggtgaggcgcggtcacgcccagcgggaaccgcaggcgccgaagcccgggtactgggcccagaatcccgcggaattttggatccgagggaggcgctggggcgcgggacctcgggcgtggggtcccgggcgctggatcggcgcggacgggaggcggcgctggtcccgcgggccagcgggtctcgggagggggcgcccgatcccgcgtctccggcgccgcttcccgggaagtttcaagtttgaaagtcctggcggagggtctgcggcttccgggaccggagtggctgagaggagggccccaagcggccggagcggcgccatggaggagggggcgccgcggcagcctgggccgagccagtggcccccagaggatgagaaggaggtgatccgccgggccatccagaaagagctgaagatcaaggagggggtggagaacctgcggcgcgtggccacagaccgccgccacttgggccatgtgcagcagctgctgcggtcctccaaccgccgcctggagcagctgcatggcgagctgcgggagctgcacgcccgaatcctgctgcccggccctgggcctggcccagctgagcctgtggcctcaggaccccggccgtgggcagagcagctcagggctcggcacctagaggctctccggaggcagctgcatgtggagctgaaggtgaagcagggggctgagaacatgacccacacgtgcgccagtggcacccccaaggagaggaagctcctggcagctgcccagcagatgctgcgggacagccagctgaaggtggccctgctgcggatgaagatcagcagcctggaggccagtgggtccccggagccagggcctgagctgctggcggaggagctacagcatcgactgcacgttgaggcagctgtggctgagggcgccaagaacgtggtgaaactgcttagtagccggagaacacaggaccgcaaggcactggctgaggcccaggcccagctacaggagtcctctcagaaactggacctcctgcgcctggccttggagcagctgctggagcaactgcctcctgcccaccctttgcgcagcagagtgacccgagagttgcgggctgcggtgcctggatacccccagccttcagggacacctgtgaagcccaccgccctaacagggacactgcaggtccgcctcctgggctgtgaacagttgctgacagccgtgcctgggcgctccccagcggccgcactggccagcagcccctccgagggctggcttcggaccaaggccaagcaccagcgtggccgaggcgagcttgccagtgagtagggaaggagcttcagggggagcaggagacccctgcttcaggcctgccctgagtcccggctctggccctgcaggcgaggtgctggctgtgctaaaggtggacaaccgtgttgtggggcagacgggctgggggcaggtggccgaacagtcctgggaccagacctttgtcatcccactggagcgagcccgtgagctggagattggggtacactggcgggactggcggcagctatgtggcgtggccttcctgagacttgaggacttcctggacaatgcctgtcaccaactgtccctcagcctggtaccgcagggactgctttttgcccaggtgaccttctgcgatcctgtcattgagaggcggccccggctgcagaggcaggaacgcatcttctctaaacgcagaggccaggacttcctgagggcttcgcagatgaacctcggcatggcggcctgggggcgcctcgtcatgaacctgctgcccccctgcagctccccgagcacaatcagcccccctaaaggatgccctcggaccccaacaacactgcgagaggcctctgaccctgccactcccagtaatttcctgcccaagaagacccccttgggtgaagagatgacacccccacccaagcccccacgcctctacctcccccaggagccaacatccgaggagactccgcgcaccaaacgtccccatatggagcctaggactcgacgtgggccatctccaccagcctcccccaccaggaaaccccctcggcttcaggacttccgctgcttagctgtgctgggccggggacactttgggaaggtcctcctggtccagttcaaggggacagggaaatactacgccatcaaagcactgaagaagcaggaggtgctcagccgggacgagatagagagcctgtactgcgagaagcggatcctggaggctgtgggctgcacagggcaccctttcctgctctccctccttgcctgcttccagacctccagccatgcctgctttgtgactgagtttgtgcctggtggtgacctcatgatgcagatccacgaggatgtcttccccgagccccaggcccgcttctacgtggcttgtgttgtcctggggctgcagttcttacacgagaagaagatcatttacagggacctgaagttggataaccttctgctggatgcccagggattcctgaagatcgcagactttggactctgcaaggaagggatcggcttcggggaccggactagcaccttctgtggcaccccggagttcctggctcccgaggtgctgacccaggaggcatacacacgggctgtggactggtgggggctgggtgtgctgctctacgagatgctggtgggtgagtgcccgttcccaggggacacagaggaagaggtgtttgactgcatcgtcaacatggacgccccctaccccggctttctgtcggtgcaagggcttgagttcattcagaagctcctccagaagtgcccggagaagcgcctcggggcaggtgagcaggatgccgaggagatcaaggtccagccattcttcaggaccaccaactggcaagccctgctcgcccgcaccatccagccccccttcgtgcctaccctgtgtggccctgcggacctgcgctactttgagggcgagttcacagggctgccgcctgccctgaccccacctgcaccccacagcctcctcactgcccgccaacaggccgccttccgggacttcgactttgtgtcagagcgattcctggaaccctgagggcatctcctggcacctctgtccccttcccccacagactgttagagcctctgctcgttcacccgtgcgccctgcctggaggtccaggccttgctgggtacttctgagcccttgggattcaaagtggcagccatggggccactgttgtgggctttgctcagtgtcactgggcaaagtgtgtcccttccccctccagctcgccctcttctacctcccagcgagacctggcccagaaagggtgccgcagcaaggagtgatatggtttgtctttttaagactggacttgctttatattaaatttgtaaaagtgaaaaaaaaaa

SEQ ID NO: 292758 - DNA, 1594 bp, Homo sapiens
gggctttttcgagcccataggtcgggacagcccaggactgggcatgggaggcttggagtggctctgggtaggggcccagccagtgccctaggggacttcatataccctctcttcctttgcaggaaaccccctcggcttcaggacttccgctgcttagctgtgctgggccggggacactttgggaaggtagtgggctgaagagggtggtatgggacaggattgggggcctcatcacatgagccgggaggacctgatctgtgggggcggtaaaggctccctggtctggccgcacctggagcacaacctctctctggccccaggtcctcctggtccagttcaaggggacagggaaatactacgccatcaaagcactgaagaagcaggaggtgctcagccgggacgagatagagagcctgtactgcgagaagcggatcctggaggctgtgggctgcacagggcaccctttcctgctctccctccttgcctgcttccagacctccagccatgcctgctttgtgactgagtttgtgcctggtggtgacctcatgatgcagatccacgaggatgtcttccccgagccccaggcccgcttctacgtggcttgtgttgtcctggggctgcagttcttacacgagaagaagatcatttacagggacctgaagttggataaccttctgctggatgcccagggattcctgaagatcgcagactttggactctgcaaggaagggatcggcttcggggaccggactagcaccttctgtggcaccccggagttcctggctcccgaggtgctgacccaggaggcatacacacgggctgtggactggtgggggctgggtgtgctgctctacgagatgctggtgggtgagtgcccgttcccaggggacacagaggaagaggtgtttgactgcatcgtcaacatggacgccccctaccccggctttctgtcggtgcaagggcttgagttcattcagaagctcctccagaagtgcccggagaagcgcctcggggcaggtgagcaggatgccgaggagatcaaggtccagccattcttcaggaccaccaactggcaagccctgctcgcccgcaccatccagccccccttcgtgcctaccctgtgtggccctgcggacctgcgctactttgagggcgagttcacagggctgccgcctgccctgaccccacctgcaccccacagcctcctcactgcccgccaacaggccgccttccgggacttcgactttgtgtcagagcgattcctggaaccctgagggcatctcctggcacctctgtccccttcccccacagactgttagagcctctgctcgttcacccgtgcgccctgcctggaggtccaggccttgctgggtacttctgagcccttgggattcaaagtggcagccatggggccactgttgtgggctttgctcagtgtcactgggcaaagtgtgtcccttccccctccagctcgccctcttctacctcccagcgagacctggcccagaaagggtgccgcagcaaggagtgatatggtttgtctttttaagactggacttgctttatattaaatttgtaaaagtgaaaaaaaaaa

SEQ ID NO: 292759 - DNA, 2199 bp, Homo sapiens
ggagccaggttgtagaggggctcaaagttagaggaggcggccagctccaccggctgcacccggctgggcgacccggcaaccttcagggggcgctgtttcccccatccctgtccccaactggccggctcccgcgggcgcgcggcggggaaggccagaggacctgggcgcgggcgatgtgcctcctgagcgtccaaaccgggggtgaggcgcggtcacgcccagcgggaaccgcaggcgccgaagcccgggtactgggcccagaatcccgcggaattttggatccgagggaggcgctggggcgcgggacctcgggcgtggggtcccgggcgctggatcggcgcggacgggaggcggcgctggtcccgcgggccagcgggtctcgggagggggcgcccgatcccgcgtctccggcgccgcttcccgggaagtttcaagtttgaaagtcctggcggagggtctgcggcttccgggaccggagtggctgagaggagggccccaagcggccggagcggcgccatggaggagggggcgccgcggcagcctgggccgagccagtggcccccagaggatgagaaggaggtgatccgccgggccatccagaaagagctgaagatcaaggagggggtggagaacctgcggcgcgtggccacagaccgccgccacttgggccatgtgcagcagctgctgcggtcctccaaccgccgcctggagcagctgcatggcgagctgcgggagctgcacgcccgaatcctgctgcccggccctgggcctggcccagctgagcctgtggcctcaggaccccggccgtgggcagagcagctcagggctcggcacctagaggctctccggaggcagctgcatgtggagctgaaggtgaagcagggggctgagaacatgacccacacgtgcgccagtggcacccccaaggagaggaagctcctggcagctgcccagcagatgctgcgggacagccagctgaaggtggccctgctgcggatgaagatcagcagcctggaggccagtgggtccccggagccagggcctgagctgctggcggaggagctacagcatcgactgcacgttgaggcagctgtggctgagggcgccaagaacgtggtgaaactgcttagtagccggagaacacaggaccgcaaggcactggctgaggcccaggcccagctacaggagtcctctcagaaactggacctcctgcgcctggccttggagcagctgctggagcaactgcctcctgcccaccctttgcgcagcagagtgacccgagagttgcgggctgcggtgcctggatacccccagccttcagggacacctgtgaagcccaccgccctaacagggacactgcaggtccgcctcctgggctgtgaacagttgctgacagccgtgcctgggcgctccccagcggccgcactggccagcagcccctccgagggctggcttcggaccaaggccaagcaccagcgtggccgaggcgagcttgccagcgaggtgctggctgtgctaaaggtggacaaccgtgttgtggggcagacgggctgggggcaggtggccgaacagtcctgggaccagacctttgtcatcccactggagcgagcccgtgagctggagattggggtacactggcgggactggcggcagctatgtggcgtggccttcctgagacttgaggacttcctggacaatgcctgtcaccaactgtccctcagcctggtaccgcagggactgctttttgcccaggtgaccttctgcgatcctgtcattgagaggcggccccggctgcagaggcaggaacgcatcttctctaaacgcagaggccgccttccgggacttcgactttgtgtcagagcgattcctggaaccctgagggcatctcctggcacctctgtccccttcccccacagactgttagagcctctgctcgttcacccgtgcgccctgcctggaggtccaggccttgctgggtacttctgagcccttgggattcaaagtggcagccatggggccactgttgtgggctttgctcagtgtcactgggcaaagtgtgtcccttccccctccagctcgccctcttctacctcccagcgagacctggcccagaaagggtgccgcagcaaggagtgatatggtttgtctttttaagactggacttgctttatattaaatttgtaaaagtgaaaaaaaaaa

SEQ ID NO: 292760 - DNA, 1779 bp, Homo sapiens
ggagccaggttgtagaggggctcaaagttagaggaggcggccagctccaccggctgcacccggctgggcgacccggcaaccttcagggggcgctgtttcccccatccctgtccccaactggccggctcccgcgggcgcgcggcggggaaggccagaggacctgggcgcgggcgatgtgcctcctgagcgtccaaaccgggggtgaggcgcggtcacgcccagcgggaaccgcaggcgccgaagcccgggtactgggcccagaatcccgcggaattttggatccgagggaggcgctggggcgcgggacctcgggcgtggggtcccgggcgctggatcggcgcggacgggaggcggcgctggtcccgcgggccagcgggtctcgggagggggcgcccgatcccgcgtctccggcgccgcttcccgggaagtttcaagtttgaaagtcctggcggagggtctgcggcttccgggaccggagtggctgagaggagggccccaagcggccggagcggcgccatggaggagggggcgccgcggcagcctgggccgagccagtggcccccagaggatgagaaggaggtgatccgccgggccatccagaaagagctgaagatcaaggagggggtggagaacctgcggcgcgtggccacagaccgccgccacttgggccatgtgcagcagctgctgcggtcctccaaccgccgcctggagcagctgcatggcgagctgcgggagctgcacgcccgaatcctgctgcccggccctgggcctggcccagctgagcctgtggcctcaggaccccggccgtgggcagagcagctcagggctcggcacctagaggctctccggaggcagctgcatgtggagctgaaggtgaagcagggggctgagaacatgacccacacgtgcgccagtggcacccccaaggagaggaagctcctggcagctgcccagcagatgctgcgggacagccagctgaaggtggccctgctgcggatgaagatcagcagcctggaggccagtgggtccccggagccagggcctgagctgctggcggaggagctacagcatcgactgcacgttgaggcagctgtggctgagggcgccaagaacgtggtgaaactgcttagtagccggagaacacaggaccgcaaggcactggctgaggcccaggcccagctacaggagtcctctcagaaactggacctcctgcgcctggccttggagcagctgctggagcaactgcctcctgcccaccctttgcgcagcagagtgacccgagagttgcgggctgcggtgcctggatacccccagccttcagggacacctgtgaagcccaccgccctaacagggacactgcaggtccgcctcctgggctgtgaacagttgctgacagccgtgcctgggcgctccccagcggccgcactggccagcagcccctccgagggctggcttcggaccaaggccaagcaccagcgtggccgaggcgagcttgccagcgaggtgctggctgtgctaaaggtggacaaccgtgttgtggggcagacgggctgggggcaggtggccgaacagtcctgggaccagacctttgtcatcccactggagcgagcccgtgagctggagattggggtacactggcgggactggcggcagctatgtggcgtggccttcctgagacttgaggacttcctggacaatgcctgtcaccaactgtccctcagcctggtaccgcagggactgctttttgcccagagtgtgtgtctgggggtaccgggctcg

SEQ ID NO: 292761 - DNA, 1075 bp, Homo sapiens
aagtagaggctgggtgtaaaatcggacgaggaaggctggctgtgcccaggcccagctacaggagtcctctcagaaactggacctcctgcgcctggccttggagcagctgctggagcaactgcctcctgcccaccctttgcgcagcagagtgacccgagagttgcgggctgcggtgcctggatacccccagccttcagggacacctgtgaagcccaccgccctaacagggacactgcaggtccgcctcctgggctgtgaacagttgctgacagccgtgcctgggcgctccccagcggccgcactggccagcagcccctccgagggctggcttcggaccaaggccaagcaccagcgtggccgaggcgagcttgccagcgaggtgctggctgtgctaaaggtggacaaccgtgttgtggggcagacgggctgggggcaggtggccgaacagtcctgggaccagacctttgtcatcccactggagcgagcccgtgagctggagattggggtacactggcgggactggcggcagctatgtggcgtggccttcctgagacttgaggacttcctggacaatgcctgtcaccaactgtccctcagcctggtaccgcagggactgctttttgcccaggtgaccttctgcgatcctgtcattgagaggcggccccggctgcagaggcaggaacgcatcttctctaaacgcagaggccgccttccgggacttcgactttgtgtcagagcgattcctggaaccctgagggcatctcctggcacctctgtccccttcccccacagactgttagagcctctgctcgttcacccgtgcgccctgcctggaggtccaggccttgctgggtacttctgagcccttgggattcaaagtggcagccatggggccactgttgtgggctttgctcagtgtcactgggcaaagtgtgtcccttccccctccagctcgccctcttctacctcccagcgagacctggcccagaaagggtgccgcagcaaggagtgatatggtttgtctttttaagactggacttgctttatattaaatttgtaaaagtgaaaaaaaaaa

SEQ ID NO: 292762 - DNA, 715 bp, Homo sapiens
ctcctccagaagtgcccggagaagcgcctcggggcaggtgagcaggatgccgaggagatcaaggtccagccattcttcagggtgagcggctggggtggcggtggtcccctgtgcctggcagggtaggtggcatggagtgactcctggagctgctgttcctgccgtctcaggcgcctctcctttgccctcagaccaccaactggcaagccctgctcgcccgcaccatccagccccccttcgtgcctaccctgtgtggccctgcggacctgcgctactttgagggcgagttcacagggctgccgcctgccctgaccccacctgcaccccacagcctcctcactgcccgccaacaggccgccttccgggacttcgactttgtgtcagagcgattcctggaaccctgagggcatctcctggcacctctgtccccttcccccacagactgttagagcctctgctcgttcacccgtgcgccctgcctggaggtccaggccttgctgggtacttctgagcccttgggattcaaagtggcagccatggggccactgttgtgggctttgctcagtgtcactgggcaaagtgtgtcccttccccctccagctcgccctcttctacctcccagcgagacctggcccagaaagggtgccgcagcaaggagtgatatggtttgtctttttaagactggacttgctttatattaaatttgtaaaagtga

SEQ ID NO: 292763 - DNA, 3506 bp, Homo sapiens
ggagccaggttgtagaggggctcaaagttagaggaggcggccagctccaccggctgcacccggctgggcgacccggcaaccttcagggggcgctgtttcccccatccctgtccccaactggccggctcccgcgggcgcgcggcggggaaggccagaggacctgggcgcgggcgatgtgcctcctgagcgtccaaaccgggggtgaggcgcggtcacgcccagcgggaaccgcaggcgccgaagcccgggtactgggcccagaatcccgcggaattttggatccgagggaggcgctggggcgcgggacctcgggcgtggggtcccgggcgctggatcggcgcggacgggaggcggcgctggtcccgcgggccagcgggtctcgggagggggcgcccgatcccgcgtctccggcgccgcttcccgggaagtttcaagtttgaaagtcctggcggagggtctgcggcttccgggaccggagtggctgagaggagggccccaagcggccggagcggcgccatggaggagggggcgccgcggcagcctgggccgagccagtggcccccagaggatgagaaggaggtgatccgccgggccatccagaaagagctgaagatcaaggagggggtggagaacctgcggcgcgtggccacagaccgccgccacttgggccatgtgcagcagctgctgcggtcctccaaccgccgcctggagcagctgcatggcgagctgcgggagctgcacgcccgaatcctgctgcccggccctgggcctggcccagctgagcctgtggcctcaggaccccggccgtgggcagagcagctcagggctcggcacctagaggctctccggaggcagctgcatgtggagctgaaggtgaagcagggggctgagaacatgacccacacgtgcgccagtggcacccccaaggagaggaagctcctggcagctgcccagcagatgctgcgggacagccagctgaaggtggccctgctgcggatgaagatcagcagcctggaggccagtgggtccccggagccagggcctgagctgctggcggaggagctacagcatcgactgcacgttgaggcagctgtggctgagggcgccaagaacgtggtgaaactgcttagtagccggagaacacaggaccgcaaggcactggctgaggcccaggcccagctacaggagtcctctcagaaactggacctcctgcgcctggccttggagcagctgctggagcaactgcctcctgcccaccctttgcgcagcagagtgacccgagagttgcgggctgcggtgcctggatacccccagccttcagggacacctgtgaagcccaccgccctaacagggacactgcaggtccgcctcctgggctgtgaacagttgctgacagccgtgcctgggcgctccccagcggccgcactggccagcagcccctccgagggctggcttcggaccaaggccaagcaccagcgtggccgaggcgagcttgccagcgaggtgctggctgtgctaaaggtggacaaccgtgttgtggggcagacgggctgggggcaggtggccgaacagtcctgggaccagacctttgtcatcccactggagcgagcccgtgagctggagattggggtacactggcgggactggcggcagctatgtggcgtggccttcctgagacttgaggacttcctggacaatgcctgtcaccaactgtccctcagcctggtaccgcagggactgctttttgcccaggtgaccttctgcgatcctgtcattgagaggcggccccggctgcagaggcaggaacgcatcttctctaaacgcagaggccaggacttcctgagggcttcgcagatgaacctcggcatggcggcctgggggcgcctcgtcatgaacctgctgcccccctgcagctccccgagcacaatcagcccccctaaaggatgccctcggaccccaacaacactgcgagaggcctctgaccctgccactcccagtaatttcctgcccaagaagacccccttgggtgaagagatgacacccccacccaagcccccacgcctctacctcccccaggagccaacatccgaggagactccgcgcaccaaacgtccccatatggagcctaggactcgacgtgggccatctccaccagcctcccccaccaggaaaccccctcggcttcaggacttccgctgcttagctgtgctgggccggggacactttgggaaggtcctcctggtccagttcaaggggacagggaaatactacgccatcaaagcactgaagaagcaggaggtgctcagccgggacgagatagagagcctgtactgcgagaagcggatcctggaggctgtgggctgcacagggcaccctttcctgctctccctccttgcctgcttccagacctccagccatgcctgctttgtgactgagtttgtgcctggtggtgacctcatgatgcagatccacgaggatgtcttccccgagccccaggcccgcttctacgtggcttgtgttgtcctggggctgcagttcttacacgagaagaagatcatttacagggacctgaagttggataaccttctgctggatgcccagggattcctgaagatcgcagactttggactctgcaaggaagggatcggcttcggggaccggactagcaccttctgtggcaccccggagttcctggctcccgaggtgctgacccaggaggcatacacacgggctgtggactggtgggggctgggtgtgctgctctacgagatgctggtgggtgagtgcccgttcccaggggacacagaggaagaggtgtttgactgcatcgtcaacatggacgccccctaccccggctttctgtcggtgcaagggcttgagttcattcagaagctcctccagaagtgcccggagaagcgcctcggggcaggtgagcaggatgccgaggagatcaaggtccagccattcttcaggaccaccaactggcaagccctgctcgcccgcaccatccagccccccttcgtgcctaccctgtgtggccctgcggacctgcgctactttgagggcgagttcacagggctgccgcctgccctgaccccacctgcaccccacagcctcctcactgcccgccaacaggccgccttccgggacttcgactttgtgtcagagcgattcctggaaccctgagggcatctcctggcacctctgtccccttcccccacagactgttagagcctctgctcgttcacccgtgcgccctgcctggaggtccaggccttgctgggtacttctgagcccttgggattcaaagtggcagccatggggccactgttgtgggctttgctcagtgtcactgggcaaagtgtgtcccttccccctccagctcgccctcttctacctcccagcgagacctggcccagaaagggtgccgcagcaaggagtgatatggtttgtctttttaagactggacttgctttatattaaatttgtaaaagtgaaaaaaaaaa

SEQ ID NO: 292764 - DNA, 3640 bp, Homo sapiens
ggagccaggttgtagaggggctcaaagttagaggaggcggccagctccaccggctgcacccggctgggcgacccggcaaccttcagggggcgctgtttcccccatccctgtccccaactggccggctcccgcgggcgcgcggcggggaaggccagaggacctgggcgcgggcgatgtgcctcctgagcgtccaaaccgggggtgaggcgcggtcacgcccagcgggaaccgcaggcgccgaagcccgggtactgggcccagaatcccgcggaattttggatccgagggaggcgctggggcgcgggacctcgggcgtggggtcccgggcgctggatcggcgcggacgggaggcggcgctggtcccgcgggccagcgggtctcgggagggggcgcccgatcccgcgtctccggcgccgcttcccgggaagtttcaagtttgaaagtcctggcggagggtctgcggcttccgggaccggagtggctgagaggagggccccaagcggccggagcggcgccatggaggagggggcgccgcggcagcctgggccgagccagtggcccccagaggatgagaaggaggtgatccgccgggccatccagaaagagctgaagatcaaggagggggtggagaacctgcggcgcgtggccacagaccgccgccacttgggccatgtgcagcagctgctgcggtcctccaaccgccgcctggagcagctgcatggcgagctgcgggagctgcacgcccgaatcctgctgcccggccctgggcctggcccagctgagcctgtggcctcaggaccccggccgtgggcagagcagctcagggctcggcacctagaggctctccggaggcagctgcatgtggagctgaaggtgaagcagggggctgagaacatgacccacacgtgcgccagtggcacccccaaggagaggaagctcctggcagctgcccagcagatgctgcgggacagccagctgaaggtggccctgctgcggatgaagatcagcagcctggaggccagtgggtccccggagccagggcctgagctgctggcggaggagctacagcatcgactgcacgttgaggcagctgtggctgagggcgccaagaacgtggtgaaactgcttagtagccggagaacacaggaccgcaaggcactggctgaggcccaggcccagctacaggagtcctctcagaaactggacctcctgcgcctggccttggagcagctgctggagcaactgcctcctgcccaccctttgcgcagcagagtgacccgagagttgcgggctgcggtgcctggatacccccagccttcagggacacctgtgaagcccaccgccctaacagggacactgcaggtccgcctcctgggctgtgaacagttgctgacagccgtgcctgggcgctccccagcggccgcactggccagcagcccctccgagggctggcttcggaccaaggccaagcaccagcgtggccgaggcgagcttgccagcgaggtgctggctgtgctaaaggtggacaaccgtgttgtggggcagacgggctgggggcaggtggccgaacagtcctgggaccagacctttgtcatcccactggagcgagcccgtgagctggagattggggtacactggcgggactggcggcagctatgtggcgtggccttcctgagacttgaggacttcctggacaatgcctgtcaccaactgtccctcagcctggtaccgcagggactgctttttgcccaggtgaccttctgcgatcctgtcattgagaggcggccccggctgcagaggcaggaacgcatcttctctaaacgcagaggccaggacttcctgagggcttcgcagatgaacctcggcatggcggcctgggggcgcctcgtcatgaacctgctgcccccctgcagctccccgagcacaatcagcccccctaaaggatgccctcggaccccaacaacactgcgagaggcctctgaccctgccactcccagtaatttcctgcccaagaagacccccttgggtgaagagatgacacccccacccaagcccccacgcctctacctcccccaggagccaacatccgaggagactccgcgcaccaaacgtccccatatggagcctaggactcgacgtgggccatctccaccagcctcccccaccaggaaaccccctcggcttcaggacttccgctgcttagctgtgctgggccggggacactttgggaaggtagtgggctgaagagggtggtatgggacaggattgggggcctcatcacatgagccgggaggacctgatctgtgggggcggtaaaggctccctggtctggccgcacctggagcacaacctctctctggccccaggtcctcctggtccagttcaaggggacagggaaatactacgccatcaaagcactgaagaagcaggaggtgctcagccgggacgagatagagagcctgtactgcgagaagcggatcctggaggctgtgggctgcacagggcaccctttcctgctctccctccttgcctgcttccagacctccagccatgcctgctttgtgactgagtttgtgcctggtggtgacctcatgatgcagatccacgaggatgtcttccccgagccccaggcccgcttctacgtggcttgtgttgtcctggggctgcagttcttacacgagaagaagatcatttacagggacctgaagttggataaccttctgctggatgcccagggattcctgaagatcgcagactttggactctgcaaggaagggatcggcttcggggaccggactagcaccttctgtggcaccccggagttcctggctcccgaggtgctgacccaggaggcatacacacgggctgtggactggtgggggctgggtgtgctgctctacgagatgctggtgggtgagtgcccgttcccaggggacacagaggaagaggtgtttgactgcatcgtcaacatggacgccccctaccccggctttctgtcggtgcaagggcttgagttcattcagaagctcctccagaagtgcccggagaagcgcctcggggcaggtgagcaggatgccgaggagatcaaggtccagccattcttcaggaccaccaactggcaagccctgctcgcccgcaccatccagccccccttcgtgcctaccctgtgtggccctgcggacctgcgctactttgagggcgagttcacagggctgccgcctgccctgaccccacctgcaccccacagcctcctcactgcccgccaacaggccgccttccgggacttcgactttgtgtcagagcgattcctggaaccctgagggcatctcctggcacctctgtccccttcccccacagactgttagagcctctgctcgttcacccgtgcgccctgcctggaggtccaggccttgctgggtacttctgagcccttgggattcaaagtggcagccatggggccactgttgtgggctttgctcagtgtcactgggcaaagtgtgtcccttccccctccagctcgccctcttctacctcccagcgagacctggcccagaaagggtgccgcagcaaggagtgatatggtttgtctttttaagactggacttgctttatattaaatttgtaaaagtgaaaaaaaaaa

SEQ ID NO: 292765 - DNA, 3088 bp, Homo sapiens
ggagccaggttgtagaggggctcaaagttagaggaggcggccagctccaccggctgcacccggctgggcgacccggcaaccttcagggggcgctgtttcccccatccctgtccccaactggccggctcccgcgggcgcgcggcggggaaggccagaggacctgggcgcgggcgatgtgcctcctgagcgtccaaaccgggggtgaggcgcggtcacgcccagcgggaaccgcaggcgccgaagcccgggtactgggcccagaatcccgcggaattttggatccgagggaggcgctggggcgcgggacctcgggcgtggggtcccgggcgctggatcggcgcggacgggaggcggcgctggtcccgcgggccagcgggtctcgggagggggcgcccgatcccgcgtctccggcgccgcttcccgggaagtttcaagtttgaaagtcctggcggagggtctgcggcttccgggaccggagtggctgagaggagggccccaagcggccggagcggcgccatggaggagggggcgccgcggcagcctgggccgagccagtggcccccagaggatgagaaggaggtgatccgccgggccatccagaaagagctgaagatcaaggagggggtggagaacctgcggcgcgtggccacagaccgccgccacttgggccatgtgcagcagctgctgcggtcctccaaccgccgcctggagcagctgcatggcgagctgcgggagctgcacgcccgaatcctgctgcccggccctgggcctggcccagctgagcctgtggcctcaggaccccggccgtgggcagagcagctcagggctcggcacctagaggctctccggaggcagctgcatgtggagctgaaggtgaagcagggggctgagaacatgacccacacgtgcgccagtggcacccccaaggagaggaagctcctggcagctgcccagcagatgctgcgggacagccagctgaaggtggccctgctgcggatgaagatcagcagcctggaggccagtgggtccccggagccagggcctgagctgctggcggaggagctacagcatcgactgcacgttgaggcagctgtggctgagggcgccaagaacgtggtgaaactgcttagtagccggagaacacaggaccgcaaggcactggctgaggcccaggcccagctacaggagtcctctcagaaactggacctcctgcgcctggccttggagcagctgctggagcaactgcctcctgcccaccctttgcgcagcagagtgacccgagagttgcgggctgcggtgcctggatacccccagccttcagggacacctgtgaagcccaccgccctaacagggacactgcaggtccgcctcctgggctgtgaacagttgctgacagccgtgcctgggcgctccccagcggccgcactggccagcagcccctccgagggctggcttcggaccaaggccaagcaccagcgtggccgaggcgagcttgccagcgaggtgctggctgtgctaaaggtggacaaccgtgttgtggggcagacgggctgggggcaggtggccgaacagtcctgggaccagacctttgtcatcccactggagcgagcccgtgagctggagattggggtacactggcgggactggcggcagctatgtggcgtggccttcctgagacttgaggacttcctggacaatgcctgtcaccaactgtccctcagcctggtaccgcagggactgctttttgcccaggtgaccttctgcgatcctgtcattgagaggcggccccggctgcagaggcaggaacgcatcttctctaaacgcagaggccaggacttcctgagggcttcgcagatgaacctcggcatggcggcctgggggcgcctcgtcatgaacctgctgcccccctgcagctccccgagcacaatcagcccccctaaaggatgccctcggaccccaacaacactgcgagaggcctctgaccctgccactcccagtaatttcctgcccaagaagacccccttgggtgaagagatgacacccccacccaagcccccacgcctctacctcccccaggagccaacatccgaggagactccgcgcaccaaacgtccccatatggagcctaggactcgacgtgggccatctccaccagcctcccccaccaggaaaccccctcggcttcaggacttccgctgcttagctgtgctgggccggggacactttgggaaggtcctcctggtccagttcaaggggacagggaaatactacgccatcaaagcactgaagaagcaggaggtgctcagccgggacgagatagagagcctgtactgcgagaagcggatcctggaggctgtgggctgcacagggcaccctttcctgctctccctccttgcctgcttccagacctccagccatgcctgctttgtgactgagtttgtgcctggtggtgacctcatgatgcagatccacgaggatgtcttccccgagccccaggcccgcttctacgtggcttgtgttgtcctggggctgcagttcttacacgagaagaagatcatttacagggacctgaagttggataaccttctgctggatgcccagggattcctgaagatcgcagactttggactctgcaaggaagggatcggcttcggggaccggactagcaccttctgtggcaccccggagttcctggctcccgaggtgctgacccaggaggcatacacacgggctgtggactggtgggggctgggtgtgctgctctacgagatgctggtgggtgagctctgtccccttcccccacagactgttagagcctctgctcgttcacccgtgcgccctgcctggaggtccaggccttgctgggtacttctgagcccttgggattcaaagtggcagccatggggccactgttgtgggctttgctcagtgtcactgggcaaagtgtgtcccttccccctccagctcgccctcttctacctcccagcgagacctggcccagaaagggtgccgcagcaaggagtgatatggtttgtctttttaagactggacttgctttatattaaatttgtaaaagtgaaaaaaaaaa

SEQ ID NO: 292766 - DNA, 1418 bp, Homo sapiens
ggctagtagagctgggttcgaatcggccgaggggagcctaggactcgacgtgggccatctccaccagcctcccccaccaggaaaccccctcggcttcaggacttccgctgcttagctgtgctgggccggggacactttgggaaggtcctcctggtccagttcaaggggacagggaaatactacgccatcaaagcactgaagaagcaggaggtgctcagccgggacgagatagagagcctgtactgcgagaagcggatcctggaggctgtgggctgcacagggcaccctttcctgctctccctccttgcctgcttccagacctccagccatgcctgctttgtgactgagtttgtgcctggtggtgacctcatgatgcagatccacgaggatgtcttccccgagccccaggcccgcttctacgtggcttgtgttgtcctggggctgcagttcttacacgagaagaagatcatttacagggacctgaagttggataaccttctgctggatgcccagggattcctgaagatcgcagactttggactctgcaaggaagggatcggcttcggggaccggactagcaccttctgtggcaccccggagttcctggctcccgaggtgctgacccaggaggcatacacacgggctgtggactggtgggggctgggtgtgctgctctacgagatgctggtgggtgagtgcccgttcccaggggacacagaggaagaggtgtttgactgcatcgtcaacatggacgccccctaccccggctttctgtcggtgcaagggcttgagttcattcagaagctcctccagaagtgcccggagaagcgcctcggggcaggtgagcaggatgccgaggagatcaaggtccagccattcttcaggaccaccaactggcaagccctgctcgcccgcaccatccagccccccttcgtgcctaccctgtgtggccctgcggacctgcgctactttgagggcgagttcacagggctgccgcctgccctgaccccacctgcaccccacagcctcctcactgcccgccaacaggccgccttccgggacttcgactttgtgtcagagcgattcctggaaccctgagggcatctcctggcacctctgtccccttcccccacagactgttagagcctctgctcgttcacccgtgcgccctgcctggaggtccaggccttgctgggtacttctgagcccttgggattcaaagtggcagccatggggccactgttgtgggctttgctcagtgtcactgggcaaagtgtgtcccttccccctccagctcgccctcttctacctcccagcgagacctggcccagaaagggtgccgcagcaaggagtgatatggtttgtctttttaagactggacttgctttatattaaatttgtaaaagtgaaaaaaaaaa

SEQ ID NO: 292767 - DNA, 1028 bp, Homo sapiens
ttctcccataaccacccctgcagcttctacgtggcttgtgttgtcctggggctgcagttcttacacgagaagaagatcatttacagggacctgaagttggataaccttctgctggatgcccagggattcctgaagatcgcagactttggactctgcaaggaagggatcggcttcggggaccggactagcaccttctgtggcaccccggagttcctggctcccgaggtgctgacccaggaggcatacacacgggctgtggactggtgggggctgggtgtgctgctctacgagatgctggtgggtgagtgcccgttcccaggggacacagaggaagaggtgtttgactgcatcgtcaacatggacgccccctaccccggctttctgtcggtgcaagggcttgagttcattcagaagctcctccagaagtgcccggagaagcgcctcggggcaggtgagcaggatgccgaggagatcaaggtccagccattcttcaggaccaccaactggcaagccctgctcgcccgcaccatccagccccccttcgtgcctaccctgtgtggccctgcggacctgcgctactttgagggcgagttcacagggctgccgcctgccctgaccccacctgcaccccacagcctcctcactgcccgccaacaggccgccttccgggacttcgactttgtgtcagagcgattcctggaaccctgagggcatctcctggcacctctgtccccttcccccacagactgttagagcctctgctcgttcacccgtgcgccctgcctggaggtccaggccttgctgggtacttctgagcccttgggattcaaagtggcagccatggggccactgttgtgggctttgctcagtgtcactgggcaaagtgtgtcccttccccctccagctcgccctcttctacctcccagcgagacctggcccagaaagggtgccgcagcaaggagtgatatggtttgtctttttaagactggacttgctttatattaaatttgtaaaagtgaaaaaaaaaa

SEQ ID NO: 292768 - DNA, 1006 bp, Homo sapiens
gactccagccgcacctcctccggctctgcagtggcggcgaggaggcgagccggagcgacggcggggctggggccggagccgagccggggtcgggcagcagcagggaccccccagaggcggggcctgtgggaccgctatgggcgtggagatcgagaccatctcccccggagacggaaggacattccccaagaagggccaaacgtgtgtggtgcactacacaggaatgctccaaaatgggaagaagtttgattcatccagagacagaaacaaacctttcaagttcagaattggcaaacaggaagtcatcaaaggttttgaagagggtgcagcccagctgggtcctctttctcctctccccatctgcccccatccctgctagaatgagcttggggcagagggcgaagctgacctgcacccctgatgtggcatatggagccacgggccaccccggtgtcatccctcccaatgccaccctcatctttgacgtggagctgctcaacttagagtgaaggcaggaaggaactcaaggtggctggagatggctgctgctcaccctcctagcctgctctgccactgggacggctcctgcttttggggctcttgatcagtgtgctaacctcactgcctcatggcatcatccattctctctgcccaagttgctctgtatgtgttcgtcagtgttcatgcgaattcttgcttgaggaaacttcggttgcagattgaagcatttcaggttgtgcattttgtgtgatgcatgtagtagcctttcctgatgacagaacacagatctcttgttcgcacaatctacactgccttaccttcacttaaaccacacacacaaggtgctcagacatgaaatgtacatggcgtaccgtacacagagggacttgagccagttacctttgctgtcactttctctcttataaattctgttagctgctcacttaaacaatgtcctctttgagaaaatgtaaaataaaggctctgtgcttgacaaaaaaaaaac

SEQ ID NO: 292769 - DNA, 960 bp, Homo sapiens
gactccagccgcacctcctccggctctgcagtggcggcgaggaggcgagccggagcgacggcggggctggggccggagccgagccggggtcgggcagcagcagggaccccccagaggcggggcctgtgggaccgctatgggcgtggagatcgagaccatctcccccggagacggaaggacattccccaagaagggccaaacgtgtgtggtgcactacacaggaatgctccaaaatgggaagaagtttgattcatccagagacagaaacaaacctttcaagttcagaattggcaaacaggaagtcatcaaaggttttgaagagggtgcagcccagatgagcttggggcagagggcgaagctgacctgcacccctgatgtggcatatggagccacgggccaccccggtgtcatccctcccaatgccaccctcatctttgacgtggagctgctcaacttagagtgaaggcaggaaggaactcaaggtggctggagatggctgctgctcaccctcctagcctgctctgccactgggacggctcctgcttttggggctcttgatcagtgtgctaacctcactgcctcatggcatcatccattctctctgcccaagttgctctgtatgtgttcgtcagtgttcatgcgaattcttgcttgaggaaacttcggttgcagattgaagcatttcaggttgtgcattttgtgtgatgcatgtagtagcctttcctgatgacagaacacagatctcttgttcgcacaatctacactgccttaccttcacttaaaccacacacacaaggtgctcagacatgaaatgtacatggcgtaccgtacacagagggacttgagccagttacctttgctgtcactttctctcttataaattctgttagctgctcacttaaacaatgtcctctttgagaaaatgtaaaataaaggctctgtgcttgacaaaaaaaaaac

SEQ ID NO: 292770 - DNA, 839 bp, Homo sapiens
gactccagccgcacctcctccggctctgcagtggcggcgaggaggcgagccggaaggacattccccaagaagggccaaacgtgtgtggtgcactacacaggaatgctccaaaatgggaagaagtttgattcatccagagacagaaacaaacctttcaagttcagaattggcaaacaggaagtcatcaaaggttttgaagagggtgcagcccagatgagcttggggcagagggcgaagctgacctgcacccctgatgtggcatatggagccacgggccaccccggtgtcatccctcccaatgccaccctcatctttgacgtggagctgctcaacttagagtgaaggcaggaaggaactcaaggtggctggagatggctgctgctcaccctcctagcctgctctgccactgggacggctcctgcttttggggctcttgatcagtgtgctaacctcactgcctcatggcatcatccattctctctgcccaagttgctctgtatgtgttcgtcagtgttcatgcgaattcttgcttgaggaaacttcggttgcagattgaagcatttcaggttgtgcattttgtgtgatgcatgtagtagcctttcctgatgacagaacacagatctcttgttcgcacaatctacactgccttaccttcacttaaaccacacacacaaggtgctcagacatgaaatgtacatggcgtaccgtacacagagggacttgagccagttacctttgctgtcactttctctcttataaattctgttagctgctcacttaaacaatgtcctctttgagaaaatgtaaaataaaggctctgtgcttgacaaaaaaaaaac

SEQ ID NO: 292771 - DNA, 871 bp, Homo sapiens
gactccagccgcacctcctccggctctgcagtggcggcgaggaggcgagccggagcgacggcggggctggggccggagccgagccggggtcgggcagcagcagggaccccccagaggcggggcctgtgggaccgctatgggcgtggagatcgagaccatctcccccggagacggaaggacattccccaagaagggccaaacgtgtgtggtgcactacacaggaatgctccaaaatgggaagaagtttgattcatccagagacagaaacaaacctttcaagttcagaattggcaaacaggaagtcatcaaaggttttgaagagggtgcagcccagctgggtcctctttctcctctccccatctgcccccatccctgctagagaaggaactcaaggtggctggagatggctgctgctcaccctcctagcctgctctgccactgggacggctcctgcttttggggctcttgatcagtgtgctaacctcactgcctcatggcatcatccattctctctgcccaagttgctctgtatgtgttcgtcagtgttcatgcgaattcttgcttgaggaaacttcggttgcagattgaagcatttcaggttgtgcattttgtgtgatgcatgtagtagcctttcctgatgacagaacacagatctcttgttcgcacaatctacactgccttaccttcacttaaaccacacacacaaggtgctcagacatgaaatgtacatggcgtaccgtacacagagggacttgagccagttacctttgctgtcactttctctcttataaattctgttagctgctcacttaaacaatgtcctctttgagaaaatgtaaaataaaggctctgtgcttgacaaaaaaaaaac

SEQ ID NO: 292772 - DNA, 1577 bp, Homo sapiens
gactccagccgcacctcctccggctctgcagtggcggcgaggaggcgagccggagcgacggcggggctggggccggagccgagccggggtcgggcagcagcagggaccccccagaggcggggcctgtgggaccgctatgggcgtggagatcgagaccatctcccccggagacggtaccgggctccctccggagccaggggaggggaggggtcccggggcggagcccggagggcgggggtctgattcggaggtggcgtggagggtgctgaagggtcggggggctggatggggaaggcaggcggagacgccggacgggattcttgggggtctaggagaccatcctccgccatcctcttccgcgctcacctaggggaatgtaggcggcagctcggaggcgggggtctgcggcccggaggcgggggtctgcggcccgccaccgccccgggcttctcctgtcgcggctgcagtcgttcggttatccgctgctgctgataccccagcctgggtttcggcttcgctttccctgccctactcggcgagctctggaaagcaggacctgctctcggatacccgctgctcggggacctcctcctagcgcgtcccccgccgggcctcccctcggtcgcttccctgcgggccgggctgtgagcggctgtggggacagacccaggctggggaagggggaagcgctcccttgcccgcttccggatctcgctttatcctgccgccgctttcagactccctggccaccctgtccactcccatggcctccacattgaagcttctaagcccagccctgcgacctacggccgaacctctccctggacgtcccagggtgctccctggtcagcaagtccaaaacagaactctcgcttcccaccttctctcctaagtgatcctctttatcccccttccgtgtctcactttcccaagtccttgtattactgggtctgggtgtgcaaggaatagccatttctttatttcttgaaatttaattaataccaaagcccccattgtctgcagggtttgatgggcaaacttcatatcagatattattaatatgaacagctcccctccccaggaaattggataacttcttggctccaggccatcttccttgtccaatcccagccactacttcagatatcccctggagtacaggcttctttgcccacgcaggaaacattgctgctgggtcccagaaagcatctccctgaggccttttcatccctcagcagcccctgagctaatctccccatcttcagtctctcctccctgctttcaatctcgtccccaatctcatattcactccctttctatatcatagcctgaagactcttcttaaaatgcagtggctcacgcctgtaatcccagcactttgggaggctgaggcgggcggatcacaaggtcaggagttcgagaccagcctgaccaacatgttgaaaccccgtctctactaaaaatacaaaaattagctgggcatggtggtacgcacctgtaatcccagctactcgggaggctggggcaggagaatcacttgaccctgggagccagaggttgcagtgagctgagattgt

SEQ ID NO: 292773 - DNA, 1163 bp, Homo sapiens
gactccagccgcacctcctccggctctgcagtggcggcgaggaggcgagccggagcgacggcggggctggggccggagccgagccggggtcgggcagcagcagggaccccccagaggcggggcctgtgggaccgctatgggcgtggagatcgagaccatctcccccggagacggaaggacattccccaagaagggccaaacgtgtgtggtgcactacacagccagtctagtgggaatgataaaggaggcttggaaggccaactctttccctcttctaccagcaagggccatccatggtgccagcttctaggcgaggtagagtgagttcttcaggactgctggcaggaagatcatgagcaggtgtttgttccaagggaggaatgctccaaaatgggaagaagtttgattcatccagagacagaaacaaacctttcaagttcagaattggcaaacaggaagtcatcaaaggttttgaagagggtgcagcccagctgggtcctctttctcctctccccatctgcccccatccctgctagaatgagcttggggcagagggcgaagctgacctgcacccctgatgtggcatatggagccacgggccaccccggtgtcatccctcccaatgccaccctcatctttgacgtggagctgctcaacttagagtgaaggcaggaaggaactcaaggtggctggagatggctgctgctcaccctcctagcctgctctgccactgggacggctcctgcttttggggctcttgatcagtgtgctaacctcactgcctcatggcatcatccattctctctgcccaagttgctctgtatgtgttcgtcagtgttcatgcgaattcttgcttgaggaaacttcggttgcagattgaagcatttcaggttgtgcattttgtgtgatgcatgtagtagcctttcctgatgacagaacacagatctcttgttcgcacaatctacactgccttaccttcacttaaaccacacacacaaggtgctcagacatgaaatgtacatggcgtaccgtacacagagggacttgagccagttacctttgctgtcactttctctcttataaattctgttagctgctcacttaaacaatgtcctctttgagaaaatgtaaaataaaggctctgtgcttgacaaaaaaaaaac

SEQ ID NO: 292774 - DNA, 1095 bp, Homo sapiens
gactccagccgcacctcctccggctctgcagtggcggcgaggaggcgagccggagcgacggcggggctggggccggagccgagccggggtcgggcagcagcagggaccccccagaggcggggcctgtgggaccgctatgggcgtggagatcgagaccatctcccccggagacggaaggacattccccaagaagggccaaacgtgtgtggtgcactacacagccagtctagtgggaatgataaaggaggcttggaaggccaactctttccctcttctaccagcaagggccatccatggtgccagcttctaggaatgctccaaaatgggaagaagtttgattcatccagagacagaaacaaacctttcaagttcagaattggcaaacaggaagtcatcaaaggttttgaagagggtgcagcccagctgggtcctctttctcctctccccatctgcccccatccctgctagaatgagcttggggcagagggcgaagctgacctgcacccctgatgtggcatatggagccacgggccaccccggtgtcatccctcccaatgccaccctcatctttgacgtggagctgctcaacttagagtgaaggcaggaaggaactcaaggtggctggagatggctgctgctcaccctcctagcctgctctgccactgggacggctcctgcttttggggctcttgatcagtgtgctaacctcactgcctcatggcatcatccattctctctgcccaagttgctctgtatgtgttcgtcagtgttcatgcgaattcttgcttgaggaaacttcggttgcagattgaagcatttcaggttgtgcattttgtgtgatgcatgtagtagcctttcctgatgacagaacacagatctcttgttcgcacaatctacactgccttaccttcacttaaaccacacacacaaggtgctcagacatgaaatgtacatggcgtaccgtacacagagggacttgagccagttacctttgctgtcactttctctcttataaattctgttagctgctcacttaaacaatgtcctctttgagaaaatgtaaaataaaggctctgtgcttgacaaaaaaaaaac

SEQ ID NO: 292775 - DNA, 1028 bp, Homo sapiens
gactccagccgcacctcctccggctctgcagtggcggcgaggaggcgagccggagcgacggcggggctggggccggagccgagccggggtcgggcagcagcagggaccccccagaggcggggcctgtgggaccgctatgggcgtggagatcgagaccatctcccccggagacggaaggacattccccaagaagggccaaacgtgtgtggtgcactacacaggcgaggtagagtgagttcttcaggactgctggcaggaagatcatgagcaggtgtttgttccaagggaggaatgctccaaaatgggaagaagtttgattcatccagagacagaaacaaacctttcaagttcagaattggcaaacaggaagtcatcaaaggttttgaagagggtgcagcccagatgagcttggggcagagggcgaagctgacctgcacccctgatgtggcatatggagccacgggccaccccggtgtcatccctcccaatgccaccctcatctttgacgtggagctgctcaacttagagtgaaggcaggaaggaactcaaggtggctggagatggctgctgctcaccctcctagcctgctctgccactgggacggctcctgcttttggggctcttgatcagtgtgctaacctcactgcctcatggcatcatccattctctctgcccaagttgctctgtatgtgttcgtcagtgttcatgcgaattcttgcttgaggaaacttcggttgcagattgaagcatttcaggttgtgcattttgtgtgatgcatgtagtagcctttcctgatgacagaacacagatctcttgttcgcacaatctacactgccttaccttcacttaaaccacacacacaaggtgctcagacatgaaatgtacatggcgtaccgtacacagagggacttgagccagttacctttgctgtcactttctctcttataaattctgttagctgctcacttaaacaatgtcctctttgagaaaatgtaaaataaaggctctgtgcttgacaaaaaaaaaac

SEQ ID NO: 292776 - DNA, 1026 bp, Homo sapiens
tgtttggaacctgggattcaaatggcctggcaggaagtgctctagcagagggactctggccttgcaagagtccctatttccccctttttttttgcttttcacacagtaaaaccctgctttacttccctttgagtcgtctgtgagcctaaatttttgtggctgtgggaaggacaagaaccccatctttagctgaaataaggaaaagttccgcaacatttttggcacacaccctgggggctccggaagtggattatgttggctcggagaatgatacctcaaaggctggtgctgagagttcttagaagctgcttcagaatcaaggatctctccagagatcaaccactggagaaaagatactaggagtcatcaccacatctagacagagtgctgctccaagagattaactgagggatttcatctgcataataagtcaaccttttttccaggcgcaatggctcacgcctgtaatcctagcactttcggaggcccagttgtcttctcctcatagtcctccactaaagcctgaacaacaaggaatgctgtcggaactggaccttgatgaaggaaatactttctgactcattggaatttgttatagtcaaaaaccctcaaccctgcatcctaccatcctgggcttgcactgcaagttacatgatccctgagctgaccactttggcttgaatccctggaaggagaaaggagagagagagcaactagttcagacacaagcatctagttcagctttggtactgcttaattctgtttttctccctccctctaatcctttttttgactgtcacatttgtcctaatagcaagttaggacatgtctgttggctctcgagattcatgggacagcaatgcagcaaatctagccatagtatttgctctctctagccctgccctttttcctgtccagtgaatatcaaaacaggtagaaaacatggcctgaaggattgtctctgccaccacctccatatgcattttaccagtagtcctgtcatacaggttgaattagttttatgta

SEQ ID NO: 292777 - DNA, 430 bp, Homo sapiens
cagtacctatctgtcgcctgggggttggggacccttgctttaaatgttacagcttttaatgaccatcctagaggttgaacttctggtccccttaaacaggtcttggaatgtcttcctcttgggttgaatttgaaaatcctctgctattacaagaggtctaagactcctaatagctctttcagacctgactctcacctttaattttactccccagttgtcttctcctcatagtcctccactaaagcctgaacaacaaggtaggaccattcgttttatttccccttttgtcctggctcatctttctttattgctgatgtgttattctttgcaggtagacagttgtttcctccccctgctatctgttctgagtcagggagaaacgtcaacttgggtgacgactaagttagtggtcattgcaaagttctttagg

SEQ ID NO: 292778 - DNA, 1575 bp, Homo sapiens
caatgtaggaaaggtgatttctaatggatgccacacgttgtagatctctgacctctattttctcgctggtggtacatctactgcacttacacatatgttgttccttttcatttccagaagattcacttagttccttgatacagaatcagagcttaagactgtcatttcacaagagcattgagcacaatgaaactgtgaatctttgaagcttatgattatgcttcacatttttgtaaacttcaaataaccttggaaaaatttccagattgggtgtagagttatttaattataaagaactattttaggtatagtcaatgattttcaattattatgtcaattacattcgttgtattcacttacggactttatggtaggttacaaaaatatatactttgaaaagaaatatactctttatgcaaaggaagctatgccatcaacaaacttgacctctaattcccaagtttattacagaaaaatttgtagtgtgaaaaaggcaaacatctccagctcatcttctcaggtatctatgaagattccgtacaaactcctttcaaatttttcccaggaatgctgtcggaactggaccttgatgaaggaaatactttctgactcattggaatttgttatagtcaaagtaagtaaggcacaaatattgaagataaacttggtacagtatgtagtgccttttgttattaaatgcaactttgggtgattacttgacattttgacttcattgatttactaaaagaagttttgaaaattttactgaagaccactgtttttgtttttgctattgtttttaaatttactatatatgatgtttgtagtcatttctatgaaaatgttggcattaagccttttaatgaggggcacaatctgctaccataatattcttttaatgggaaatcaagtaggaatggataattgtgacttttctaggaatggagaccactgaaaatgagacagaaactagtgtgtataaatacattacagtatgggtgtggatgttcacactccacaccatgaatgcaatgaaaggatctctaatcactgtagatagtgctttgcatgttatgtttccagtctgggtatagctggcatcttattaacaaaaggaattcatcacttctgtttggaatcattctctatcagaaccctcaaccctgcatcctaccatcctgggcttgcactgcaagttacatgatccctgagctgaccactttggcttgaatccctggaaggagaaaggagagagagagcaactagttcagacacaagcatctagttcagctttggtactgcttaattctgtttttctccctccctctaatcctttttttgactgtcacatttgtcctaatagcaagttaggacatgtctgttggctctcgagattcatgggacagcaatgcagcaaatctagccatagtatttgctctctctagccctgccctttttcctgtccagtgaatatcaaaacaggtagaaaacatggcctgaaggattgtctctgccaccacctccatatgcattttaccagtagtcctgtcatacaggttgaattagttttatgta

SEQ ID NO: 292779 - DNA, 641 bp, Homo sapiens
tgtttggaacctgggattcaaatggcctggcaggaagtgctctagcagagggactctggccttgcaagagtccctatttccccctttttttttgcttttcacacagtaaaaccctgctttacttccctttgagtcgtctgtgagcctaaatttttgtggctgtgggaaggacaagaaccccatctttagctgaaataaggaaaagttccgcaacatttttggcacacaccctgggggctccggaagtggattatgttggctcggagaatgatacctcaaaggctggtgctgagagttcttagaagctgcttcagaatcaaggatctctccagagatcaaccactggagaaaagatactaggagtcatcaccacatctagacagagtgctgctccaagagattaactgagggatttcatctgcataataagtcaaccttttttccaggcgcaatggctcacgcctgtaatcctagcactttcggaggcccagttgattttcagcacatcttcagaggacaaagaagcagctcttttcactcctacaatgggaatgataatctccaccttatttagttttaaaagaattaaatgagataatgcagctaaagcagttcagaataaaacctgacatgtagtaata

SEQ ID NO: 292780 - DNA, 913 bp, Homo sapiens
ccggaagctcccacctgagcaggcgcatcctcagggcctgggcctggcctccttgcctgtgagatggcactgtgacggtgcccacctcgtggggtgtgtgagggccgagtgaaatcgtgcatttgcgctaacgatgagaaccactgcttgagggccttcctatttcttccaccatgcatctggaaatgcccatgaccttcatcgcagcagcgtatgtgcgttggtcttctccagggatgccgaaagtagacatacagggagtcgcagtacggataccaccagtgccagcctgacctcacaagagacgtcttgtgtgactggccctgccgtcacagctgggccagtaaagtaccttccaggaggctccagttgctacctgactcacaaccttctaatcccatgatcttttagttctagtttccttatcttggtctgagcaaatggctcattttaaagatgacttgcagacaaatgtagagatcatcccaggggaaagtgccccaagaaaggagagtccaagaccacctgcccctcccagttctgcggctggagtgggtgggtgcagcaaccacagccccagtgtacaggagtcaccactgtctcctcccgcattggcccagcttggaagtgcacagcaaccaagcatgaggactgagttaagcttttcggagaaaaaagacactatgatcatctggcagatcacgatcactgtttggtgccagaggtaaggagtttgcttgttgtgtttgcttggaggcgacagttggcaatgacagcctgggagaagcaccggcagttaacagcactctgcaccactcatggctgagactgaggggagccttttacagcagctctgaaagcaggaggtgttctcagacttgaccctgaagtaaacacatctctttcacctttt

SEQ ID NO: 292781 - DNA, 858 bp, Homo sapiens
ccggaagctcccacctgagcaggcgcatcctcagggcctgggcctggcctccttgcctgtgagatggcactgtgacggtgcccacctcgtggggtgtgtgagggccgagtgaaatcgtgcatttgcggaaatgcccatgaccttcatcgcagcagcgtatgtgcgttggtcttctccagggatgccgaaagtagacatacagggagtcgcagtacggataccaccagtgccagcctgacctcacaagagacgtcttgtgtgactggccctgccgtcacagctgggccagtaaagtaccttccaggaggctccagttgctacctgactcacaaccttctaatcccatgatcttttagttctagtttccttatcttggtctgagcaaatggctcattttaaagatgacttgcagacaaatgtagagatcatcccaggggaaagtgccccaagaaaggagagtccaagaccacctgcccctcccagttctgcggctggagtgggtgggtgcagcaaccacagccccagtgtacaggagtcaccactgtctcctcccgcattggcccagcttggaagtgcacagcaaccaagcatgaggactgagttaagcttttcggagaaaaaagacactatgatcatctggcagatcacgatcactgtttggtgccagaggtaaggagtttgcttgttgtgtttgcttggaggcgacagttggcaatgacagcctgggagaagcaccggcagttaacagcactctgcaccactcatggctgagactgaggggagccttttacagcagctctgaaagcaggaggtgttctcagacttgaccctgaagtaaacacatctctttcacctttt

SEQ ID NO: 292782 - DNA, 306 bp, Homo sapiens
ccggaagctcccacctgagcaggcgcatcctcagggcctgggcctggcctccttgcctgtgagatggcactgtgacggtgcccacctcgtggggtgtgtgagggccgagtgaaatcgtgcatttgcggagaagaaaggaaggagagctgagtgtggtgaaaaaagtgaagagtgctggctttggaagcatgtatgctaaaattggaaccacacagagatgaccatgacccctgtgcaaggatgctgtgcaaattcatgaagcattccgtatttttataagtaaataaatggaaaaaagtgtaaaga

SEQ ID NO: 292783 - DNA, 1126 bp, Homo sapiens
ccggaagctcccacctgagcaggcgcatcctcagggcctgggcctggcctccttgcctgtgagatggcactgtgacggtgcccacctcgtggggtgtgtgagggccgagtgaaatcgtgcatttgcgatgtctaggacacactggatttgtacatctggggctcaggagaggaccagatcagagctggaaatcatgccaggaagagtatgaagcatggagagaaggtgtggaggcctccctgaggaaacgaggggtcgagcaggtgaagagggggctgagagctaaggagtgcacagagacaatgacagaaagacgggaggtctggtttcaggaagggtgtgatggacagaagagatgcagcagaggtcaaggaaggaccaagatgcatcaggaggaaatgcccatgaccttcatcgcagcagcgtatgtgcgttggtcttctccagggatgccgaaagtagacatacagggagtcgcagtacggataccaccagtgccagcctgacctcacaagagacgtcttgtgtgactggccctgccgtcacagctgggccagtaaagtaccttccaggaggctccagttgctacctgactcacaaccttctaatcccatgatcttttagttctagtttccttatcttggtctgagcaaatggctcattttaaagatgacttgcagacaaatgtagagatcatcccaggggaaagtgccccaagaaaggagagtccaagaccacctgcccctcccagttctgcggctggagtgggtgggtgcagcaaccacagccccagtgtacaggagtcaccactgtctcctcccgcattggcccagcttggaagtgcacagcaaccaagcatgaggactgagttaagcttttcggagaaaaaagacactatgatcatctggcagatcacgatcactgtttggtgccagaggtaaggagtttgcttgttgtgtttgcttggaggcgacagttggcaatgacagcctgggagaagcaccggcagttaacagcactctgcaccactcatggctgagactgaggggagccttttacagcagctctgaaagcaggaggtgttctcagacttgaccctgaagtaaacacatctctttcacctttt

SEQ ID NO: 292784 - DNA, 282 bp, Homo sapiens
ttagagaattttcatgataaaagtttaaaagtacatacacacacacaaaacaatacccatgttgcaagaacacattgaaataagaagataaacattaaaatggttggttaccttttaggagaagaaaggaaggagagctgagtgtggtgaaaaaagtgaagagtgctggctttggaagcatgtatgctaaaattggaaccacacagagatgaccatgacccctgtgcaaggatgctgtgcaaattcatgaagcattccgtatttttataagtaaataaatgg

SEQ ID NO: 292785 - DNA, 1032 bp, Homo sapiens
  misc_feature (42)..(42): n is a, c, g, or t
  misc_feature (1029)..(1029): n is a, c, g, or t
gagacccactctgcgggccaagaaaggtgaccgggcttcctnccggcttgctaagcagaggccggaagcggtggtttttagcggctctctgggtagcagggtggtgtgatagcggcagcgaggggctcggagaggtgctcggattctcgtagctgtgccgggacttaaccaccaccatgtcgagcaaaagaacaaagaccaagaccaagaagcgccctcagcgtgcaacatccaatgtgtttgctatgtttgaccagtcacagattcaggagttcaaagaggccttcaacatgattgatcagaacagagatggtttcatcgacaaggaagatttgcatgatatgcttgcttcattggggaagaatccaactgatgagtatctagatgccatgatgaatgaggctccaggccccatcaatttcaccatgttcctcaccatgtttggtgagaagttaaatggcacagatcctgaagatgtcatcagaaatgcctttgcttgctttgatgaagaagcaactggcaccatacaggaagattacttgagagagctgctgacaaccatgggggatcggtttacagatgaggaagtggatgagctgtacagagaagcacctattgataaaaaggggaatttcaattacatcgagttcacacgcatcctgaaacatggagccaaagacaaagatgactgaaataacttcaaattccagccaaacgttccttgttgccactttgggtattctgagattttctcttgcatgcccttagctttacagcttttgcatttcctgttgtatttattctcagccattttgggcatatgtatctttataatcagactggaaacgggactttctattaatatcatcttcagaataaaaaataggataatttaacctaccagcccttctcccccaataactgtggtctatacagagtcaatatattttttcagagaaagttattcgctcgattttttctgaatcataattaaactttatgataaaataaaaaaaaaaactcgagggnggg

SEQ ID NO: 292786 - DNA, 929 bp, Homo sapiens
ggagtagtgcctattttagacctgcttggaagaatataactcaatgcagtgtcttacttttgctgctgagcggtttgcagactaccatcttccctgcaactctgaaggatggacttaaccaccaccatgtcgagcaaaagaacaaagaccaagaccaagaagcgccctcagcgtgcaacatccaatgtgtttgctatgtttgaccagtcacagattcaggagttcaaagaggccttcaacatgattgatcagaacagagatggtttcatcgacaaggaagatttgcatgatatgcttgcttcattggggaagaatccaactgatgagtatctagatgccatgatgaatgaggctccaggccccatcaatttcaccatgttcctcaccatgtttggtgagaagttaaatggcacagatcctgaagatgtcatcagaaatgcctttgcttgctttgatgaagaagcaactggcaccatacaggaagattacttgagagagctgctgacaaccatgggggatcggtttacagatgaggaagtggatgagctgtacagagaagcacctattgataaaaaggggaatttcaattacatcgagttcacacgcatcctgaaacatggagccaaagacaaagatgactgaaataacttcaaattccagccaaacgttccttgttgccactttgggtattctgagattttctcttgcatgcccttagctttacagcttttgcatttcctgttgtatttattctcagccattttgggcatatgtatctttataatcagactggaaacgggactttctattaatatcatcttcagaataaaaaataggataatttaacctaccagcatggggcttcgccgccccatttgcaaaaagatccccgaatcgcaaacaaccttggtagacacaacaaataaaaa

SEQ ID NO: 292787 - DNA, 578 bp, Homo sapiens
  misc_feature (7)..(7): n is a, c, g, or t
actggcngactctagtaggatcccctgatttggatcctgaagatgtcatcagaaatgcctttgcttgctttgatgaagaagcaactggcaccatacaggaagattacttgagagagctgctgacaaccatgggggatcggtttacagatgaggaagtggatgagctgtacagagaagcacctattgataaaaaggggaatttcaattacatcgagttcacacgcatcctgaaacatggagccaaagacaaagatgactgaaataacttcaaattccagccaaacgttccttgttgccactttgggtattctgagattttctcttgcatgcccttagctttacagcttttgcatttcctgttgtatttattctcagccattttgggcatatgtatctttataatcagactggaaacgggactttctattaatatcatcttcagaataaaaaataggataatttaacctaccagcccttctcccccaataactgtggtctatacagagtcaatatattttttcagagaaagttattcgctcgattttttctgaatcataattaaactttatgataaaata

SEQ ID NO: 292788 - DNA, 970 bp, Homo sapiens
  misc_feature (861)..(861): n is a, c, g, or t
  misc_feature (923)..(923): n is a, c, g, or t
  misc_feature (928)..(928): n is a, c, g, or t
  misc_feature (933)..(933): n is a, c, g, or t
  misc_feature (970)..(970): n is a, c, g, or t
ggagtagtgcctattttagacctgcttggaagaatataactcaatgcagtgtcttacttttgctgctgagcggtttgcagactaccatcttccctgcaactctgaaggatggacttaaccaccaccatgtcgagcaaaagaacaaagaccaagaccaagaagcgccctcagcgtgcaacatccaatgtgtttgctatgtttgaccagtcacagattcaggagttcaaagaggccttcaacatgattgatcagaacagagatggtttcatcgacaaggaagatttgcatgatatgcttgcttcattggggaagaatccaactgatgagtatctagatgccatgatgaatgaggctccaggccccatcaatttcaccatgttcctcaccatgtttggtgagaagttaaatggcacagatcctgaagatgtcatcagaaatgcctttgcttgctttgatgaagaagcaactggcaccatacaggaagattacttgagagagctgctgacaaccatgggggatcggtttacagatgaggaagtggatgagctgtacagagaagcacctattgataaaaaggggaatttcaattacatcgagttcacacgcatcctgaaacatggagccaaagacaaagatgactgaaataacttcaaattccagccaaacgttccttgttgccactttgggtattctgagattttctcttgcatgcccttagctttacagcttttgcatttcctgttgtatttattctcagccattttgggcatatgtatctttataatcagactggaaacgggactttctattaatatcatccgataaaatggtattactacagctttcccaaatgggttacgnggacaattttagaaagatcgcgattggaacaaattgggataaaaaaaaaagtggcggggaanaaagnggggnaaagaggaagggggaaagagggggatgaagagtcagn

SEQ ID NO: 292789 - DNA, 498 bp, Homo sapiens
ggacgcgtgggtgacccacgcgtgcgcttgagagagctgctgacaaccatgggggatcggtttacagatgaggaagtggatgagctgtacagagaagcacctattgataaaaaggggaatttcaattacatcgagttcacacgcatcctgaaacatggagccaaagacaaagatgactgaaataacttcaaattccagccaaacgttccttgttgccactttgggtattctgagattttctcttgcatgcccttagctttacagcttttgcatttcctgttgtatttattctcagccattttgggcatatgtatctttataatcagactggaaacgggactttctattaatatcatcttcagaataaaaaataggataatttaacctaccagcccttctcccccaataactgtggtctatacagagtcaatatattttttcagagaaagttattcgctcgattttttctgaatcataattaaactttatgataaaata

SEQ ID NO: 292790 - DNA, 312 bp, Homo sapiens
aatacccgggtcgactactacaactaaattcccgcccgcgtcgactgagttttctcttgcatgcccttagctttacagcttttgcatttcctgttgtatttattctcagccattttgggcatatgtatctttataatcagactggaaacgggactttctattaatatcatcttcagaataaaaaataggataatttaacctaccagcccttctcccccaataactgtggtctatacagagtcaatatattttttcagagaaagttattcgctcgattttttctgaatcataattaaactttatgataaaata

SEQ ID NO: 292791 - DNA, 898 bp, Homo sapiens
gtaaaaatctcattttacatctgagaaaaccaaagtcagggatgaagtgaaatgcctgaaataaaatagcttcttaaaactgggcctcaagcttccagtattctttccactgtaccactttattgatgtgtatgatgtagtgttgattttagcctggcaggtaaatgttacttgtttgtagaataagatgtgaccattcatgccacttgaaggaaccgtaaggcttagattctttaaccatactttttattactttgtttaggcataggtttagtctctcttatcaagagatcagaagctgaatgtggaggcagaatgatagagcaaatgatagagcggagcagtgctgctaagcagctaggcatttttctaggcacttctctgctgaggctgttttaagtaggtggacaccctgtagttcatatatttgcatgtttatagtttgtaacatacagaacatgcttagtcaagtatagatattctttgtaattaaccctcagaatagtatgtattctgatcccttgttctttattctccaggcaccatacaggaagattacttgagagagctgctgacaaccatgggggatcggtttacagatgaggaagtggatgagctgtacagagaagcacctaattgtttaaacttcttatttaccaaacttggcttttgttggtttcagtcgtatctcccaaagaaaggtagatgagggaaatacctagaaaatgatatggttgttagctttctcttcctccagttttcctaacaatcctatctcctctactatccattcctcctcctcctcccaaggatatccaattttaactgccctaatcaggttttctgcactttgtcttccaatttttaaaataatttcctgtagaatttgcatatatga

SEQ ID NO: 292792 - DNA, 999 bp, Homo sapiens
  misc_feature (8)..(9): n is a, c, g, or t
  misc_feature (21)..(21): n is a, c, g, or t
catcgacnncccttttctcgngaagcgcgccattgtgttgttacccgcgaattcggccattatggccggggggctctctgggtagcagggtggtgtgatagcggcagcgaggggctcggagaggtgctcggattctcgtagctgtgccgggacttaaccaccaccatgtcgagcaaaagaacaaagaccaagaccaagaagcgccctcagcgtgcaacatccaatgtgtttgctatgtttgaccagtcacagattcaggagttcaaagaggccttcaacatgattgatcagaacagagatggtttcatcgacaaggaagatttgcatgatatgcttgcttcattggggaagaatccaactgatgagtatctagatgccatgatgaatgaggctccaggccccatcaatttcaccatgttcctcaccatgtttggtgagaagttaaatggcacagatcctgaagatgtcatcagaaatgcctttgcttgctttgatgaagaagcaactggcaccatacaggaagattacttgagagagctgctgacaaccatgggggatcggtttacagatgaggaagtggatgagctgtacagagaagcacctattgataaaaaggggaatttcaattacatcgagttcacacgcatcctgaaacatggagccaaagacaaagatgactgaaataacttcaaattccagccaaacgttccttgttgccactttgggtattctgagattttctcttgcatgcccttagctttacagcttttgcatttcctgttgtatttattctcagccattttgggcatatgtatctttataatcagactggaaacgggactttctattaatatcatcttcagaataaaaaataggataatttaacctaccagcccttctcccccaataactgtggtctatacagagtcaatatattttttcagagaaagttattcgctcgattttttctgaatcataattaaactttatgataaaata

SEQ ID NO: 292793 - DNA, 949 bp, Homo sapiens
ggcacgagttttttttttagcggctctctgggtagcagggtggtgtgatagcggcagcgaggggctcggagaggtgctcggattctcgtagctgtgccgggacttaaccaccaccatgtcgagcaaaagaacaaagaccaagaccaagaagcgccctcagcgtgcaacatccaatgtgtttgctatgtttgaccagtcacagattcaggagttcaaagaggccttcaacatgattgatcagaacagagatggtttcatcgacaaggaagatttgcatgatatgcttgcttcattggggaagaatccaactgatgagtatctagatgccatgatgaatgaggctccaggccccatcaatttcaccatgttcctcaccatgtttggtgagaagttaaatggcacagatcctgaagatgtcatcagaaatgcctttgcttgctttgatgaagaagcaactggcaccatacaggaagattacttgagagagctgctgacaaccatgggggatcggtttacagatgaggaagtggatgagctgtacagagaagcacctattgataaaaaggggaatttcaattacatcgagttcacacgcatcctgaaacatggagccaaagacaaagatgactgaaataacttcaaattccagccaaacgttccttgttgccactttgggtattctgagattttctcttgcatgcccttagctttacagcttttgcatttcctgttgtatttattctcagccattttgggcatatgtatctttataatcagactggaaacgggactttctattaatatcatcttcagaataaaaaataggataatttaacctaccagcccttctcccccaataactgtggtctatacagagtcaatatattttttcagagaaagttattcgctcgattttttctgaatcataattaaactttatgataaaata

SEQ ID NO: 292794 - DNA, 1047 bp, Homo sapiens
  misc_feature (42)..(42): n is a, c, g, or t
gagacccactctgcgggccaagaaaggtgaccgggcttcctnccggcttgctaagcagaggccggaagcggtggtttttagcggctctctgggtagcagggtggtgtgatagcggcagcgaggggctcggagaggtgctcggattctcgtagctgtgccgggacttaaccaccaccatgtcgagcaaaagaacaaagaccaagaccaagaagcgccctcagcgtgcaacatccaatgtgtttgctatgtttgaccagtcacagattcaggagttcaaagaggccttcaacatgattgatcagaacagagatggtttcatcgacaaggaagatttgcatgatatgcttgcttcattggggaagaatccaactgatgagtatctagatgccatgatgaatgaggctccaggccccatcaatttcaccatgttcctcaccatgtttggtgagaagttaaatggcacagatcctgaagatgtcatcagaaatgcctttgcttgctttgatgaagaagcaactggcaccatacaggaagattacttgagagagctgctgacaaccatgggggatcggtttacagatgaggaagtggatgagctgtacagagaagcacctattgataaaaaggggaatttcaattacatcgagttcacacgcatcctgaaacatggagccaaagacaaagatgactgaaataacttcaaattccagccaaacgttccttgttgccactttgggtattctgagattttctcttgcatgcccttagctttacagcttttgcatttcctgttgtatttattctcagccattttgggcatatgtatctttataatcagactggaaacgggactttctattaatatcatcttcagaataaaaaataggataatttaacctaccagcccttctcccccaataactgtggtctatacagagtcaatatattttttcagagaaagttattcgctcgattttttctgaatcataattaaactttatgataaaataaaaaaaaatcactgcccgtcgttttaccgtcgtgctg

SEQ ID NO: 292795 - DNA, 1273 bp, Homo sapiens
  misc_feature (42)..(42): n is a, c, g, or t
gagacccactctgcgggccaagaaaggtgaccgggcttcctnccggcttgctaagcagaggccggaagcggtggtttttagcggctctctgggtagcagggtggtgtgatagcggcagcgaggggctcggagaggtgctcggattctcgtagctgtgccgggacttaaccaccaccatgtcgagcaaaagaacaaagaccaagaccaagaagcgccctcagcgtgcaacatccaatgtgtttgctatgtttgaccagtcacagattcaggagttcaaagaggccttcaacatgattgatcagaacagagatggtttcatcgacaaggaagatttgcatgatatgcttgcttcattggggaagaatccaactgatgagtatctagatgccatgatgaatgaggctccaggccccatcaatttcaccatgttcctcaccatgtttggtgagaagttaaatggcacagatcctgaagatgtcatcagaaatgcctttgcttgctttgatgaagaagcaactggcaccatacaggaagattacttgagagagctgctgacaaccatgggggatcggtttacagatgaggaagtggatgagctgtacagagaagcacctattgataaaaaggggaatttcaattacatcgagttcacacgcatcctgaaacatggagccaaagacaaagatgactgaaataacttcaaattccagccaaacgttccttgttgccactttgggtattctgagattttctcttgcatgcccttagctttacagcttttgcatttcctgttgtatttattctcagccattttgggcatatgtatctttataatcagactggaaacgggactttctattaatatcatcttcagaataaaaaataggataatttaacctaccagcccttctcccccaataactgtggtctatacagagtcaatatattttttcagagaaagttattcgctcgattttttctgaatcataattaaactttatgataaaataattgtttaaacttcttatttaccaaacttggcttttgttggtttcagtcgtatctcccaaagaaaggtagatgagggaaatacctagaaaatgatatggttgttagctttctcttcctccagttttcctaacaatcctatctcctctactatccattcctcctcctcctcccaaggatatccaattttaactgccctaatcaggttttctgcactttgtcttccaatttttaaaataatttcctgtagaatttgcatatatga

SEQ ID NO: 292796 - DNA, 960 bp, Homo sapiens
ggagtagtgcctattttagacctgcttggaagaatataactcaatgcagtgtcttacttttgctgctgagcggtttgcagactaccatcttccctgcaactctgaaggatggacttaaccaccaccatgtcgagcaaaagaacaaagaccaagaccaagaagcgccctcagcgtgcaacatccaatgtgtttgctatgtttgaccagtcacagattcaggagttcaaagaggccttcaacatgattgatcagaacagagatggtttcatcgacaaggaagatttgcatgatatgcttgcttcattggggaagaatccaactgatgagtatctagatgccatgatgaatgaggctccaggccccatcaatttcaccatgttcctcaccatgtttggtgagaagttaaatggcacagatcctgaagatgtcatcagaaatgcctttgcttgctttgatgaagaagcaactggcaccatacaggaagattacttgagagagctgctgacaaccatgggggatcggtttacagatgaggaagtggatgagctgtacagagaagcacctattgataaaaaggggaatttcaattacatcgagttcacacgcatcctgaaacatggagccaaagacaaagatgactgaaataacttcaaattccagccaaacgttccttgttgccactttgggtattctgagattttctcttgcatgcccttagctttacagcttttgcatttcctgttgtatttattctcagccattttgggcatatgtatctttataatcagactggaaacgggactttctattaatatcatcttcagaataaaaaataggataatttaacctaccagcccttctcccccaataactgtggtctatacagagtcaatatattttttcagagaaagttattcgctcgattttttctgaatcataattaaactttatgataaaata

SEQ ID NO: 292797 - DNA, 933 bp, Homo sapiens
  misc_feature (42)..(42): n is a, c, g, or t
gagacccactctgcgggccaagaaaggtgaccgggcttcctnccggcttgctaagcagaggccggaagcggtggtttttagcggctctctgggtagcagggtggtgtgatagcggcagcgaggggctcggagaggtgctcggattctcgtagctgtgccgggacttaaccaccaccatgtcgagcaaaagaacaaagaccaagaccaagaagcgccctcagcgtgcaacatccaatgtgtttgctatgtttgaccagtcacagattcaggagttcaaagaggccttcaacatgattgatcagaacagagatggtttcatcgacaaggaagatttgcatgatatgcttgcttcattggggaagaatccaactgatgagtatctagatgccatgatgaatgaggctccaggccccatcaatttcaccatgttcctcaccatgtttggtgagaagttaaatggcacagatcctgaagatgtcatcagaaatgcctttgcttgctttgatgaagaagcaactggcaccatacaggaagattacttgagagagctgctgacaaccatgggggatcggtttacagatgaggaagtggatgagctgtacagagaagcacctattgataaaaaggggaatttcaattacatcgagttcacacgcatcctgaaacatggagccaaagacaaagatgactgaaataacttcaaattccagccaaacgttccttgttgccactttgggtattctgagattttctcttgcatgcccttagctttacagcttttgcatttcctgttgtatttattctcagccattttgggcatatgtatctttataatcagactggaaacgggactttctattaatatcatcttcagaataaaaaataggataatttaacctaccagccaccaactaccccactcccgtaccaggg

SEQ ID NO: 292798 - DNA, 935 bp, Homo sapiens
aagcagtggtatcaacgcagagtgccattacggccgggggctgagcggtttgcagactaccatcttccctgcaactctgaaggatggacttaaccaccaccatgtcgagcaaaagaacaaagaccaagaccaagaagcgccctcagcgtgcaacatccaatgtgtttgctatgtttgaccagtcacagattcaggagttcaaagaggccttcaacatgattgatcagaacagagatggtttcatcgacaaggaagatttgcatgatatgcttgcttcattggggaagaatccaactgatgagtatctagatgccatgatgaatgaggctccaggccccatcaatttcaccatgttcctcaccatgtttggtgagaagttaaatggcacagatcctgaagatgtcatcagaaatgcctttgcttgctttgatgaagaagcaactggcaccatacaggaagattacttgagagagctgctgacaaccatgggggatcggtttacagatgaggaagtggatgagctgtacagagaagcacctattgataaaaaggggaatttcaattacatcgagttcacacgcatcctgaaacatggagccaaagacaaagatgactgaaataacttcaaattccagccaaacgttccttgttgccactttgggtattctgagattttctcttgcatgcccttagctttacagcttttgcatttcctgttgtatttattctcagccattttgggcatatgtatctttataatcagactggaaacgggactttctattaatatcatcttcagaataaaaaataggataatttaacctaccagcccttctcccccaataactgtggtctatacagagtcaatatattttttcagagaaagttattcgctcgattttttctgaatcataattaaactttatgataaaata

SEQ ID NO: 292799 - DNA, 957 bp, Homo sapiens
aacgagtcggttcactagtacggtcgcagttgtgctggaacttcggcttacgggtgaggtacagctacgagaatccgagcacctctccgagcccctcgctgccgctatgacttaaccaccaccatgtcgagcaaaagaacaaagaccaagaccaagaagcgccctcagcgtgcaacatccaatgtgtttgctatgtttgaccagtcacagattcaggagttcaaagaggccttcaacatgattgatcagaacagagatggtttcatcgacaaggaagatttgcatgatatgcttgcttcattggggaagaatccaactgatgagtatctagatgccatgatgaatgaggctccaggccccatcaatttcaccatgttcctcaccatgtttggtgagaagttaaatggcacagatcctgaagatgtcatcagaaatgcctttgcttgctttgatgaagaagcaactggcaccatacaggaagattacttgagagagctgctgacaaccatgggggatcggtttacagatgaggaagtggatgagctgtacagagaagcacctattgataaaaaggggaatttcaattacatcgagttcacacgcatcctgaaacatggagccaaagacaaagatgactgaaataacttcaaattccagccaaacgttccttgttgccactttgggtattctgagattttctcttgcatgcccttagctttacagcttttgcatttcctgttgtatttattctcagccattttgggcatatgtatctttataatcagactggaaacgggactttctattaatatcatcttcagaataaaaaataggataatttaacctaccagcccttctcccccaataactgtggtctatacagagtcaatatattttttcagagaaagttattcgctcgattttttctgaatcataattaaactttatgataaaata

SEQ ID NO: 292800 - DNA, 956 bp, Homo sapiens
ccgcccttcgccgtgccctggaatgtgcggccaggcaaagccacaggacggacgcaaccatctgcggaaaggataggggggaggaagacttaacactgcaacaacaggacttaaccaccaccatgtcgagcaaaagaacaaagaccaagaccaagaagcgccctcagcgtgcaacatccaatgtgtttgctatgtttgaccagtcacagattcaggagttcaaagaggccttcaacatgattgatcagaacagagatggtttcatcgacaaggaagatttgcatgatatgcttgcttcattggggaagaatccaactgatgagtatctagatgccatgatgaatgaggctccaggccccatcaatttcaccatgttcctcaccatgtttggtgagaagttaaatggcacagatcctgaagatgtcatcagaaatgcctttgcttgctttgatgaagaagcaactggcaccatacaggaagattacttgagagagctgctgacaaccatgggggatcggtttacagatgaggaagtggatgagctgtacagagaagcacctattgataaaaaggggaatttcaattacatcgagttcacacgcatcctgaaacatggagccaaagacaaagatgactgaaataacttcaaattccagccaaacgttccttgttgccactttgggtattctgagattttctcttgcatgcccttagctttacagcttttgcatttcctgttgtatttattctcagccattttgggcatatgtatctttataatcagactggaaacgggactttctattaatatcatcttcagaataaaaaataggataatttaacctaccagcccttctcccccaataactgtggtctatacagagtcaatatattttttcagagaaagttattcgctcgattttttctgaatcataattaaactttatgataaaata

SEQ ID NO: 292801 - DNA, 928 bp, Homo sapiens
aacgagtcggttcactagtacggtcgcagttgtgctggaacttcggcttacgggtgaggtacagctacgagaatccgaggacttaaccaccaccatgtcgagcaaaagaacaaagaccaagaccaagaagcgccctcagcgtgcaacatccaatgtgtttgctatgtttgaccagtcacagattcaggagttcaaagaggccttcaacatgattgatcagaacagagatggtttcatcgacaaggaagatttgcatgatatgcttgcttcattggggaagaatccaactgatgagtatctagatgccatgatgaatgaggctccaggccccatcaatttcaccatgttcctcaccatgtttggtgagaagttaaatggcacagatcctgaagatgtcatcagaaatgcctttgcttgctttgatgaagaagcaactggcaccatacaggaagattacttgagagagctgctgacaaccatgggggatcggtttacagatgaggaagtggatgagctgtacagagaagcacctattgataaaaaggggaatttcaattacatcgagttcacacgcatcctgaaacatggagccaaagacaaagatgactgaaataacttcaaattccagccaaacgttccttgttgccactttgggtattctgagattttctcttgcatgcccttagctttacagcttttgcatttcctgttgtatttattctcagccattttgggcatatgtatctttataatcagactggaaacgggactttctattaatatcatcttcagaataaaaaataggataatttaacctaccagcccttctcccccaataactgtggtctatacagagtcaatatattttttcagagaaagttattcgctcgattttttctgaatcataattaaactttatgataaaata

SEQ ID NO: 292802 - DNA, 1108 bp, Homo sapiens
ctaatttcttttcatttatatttttttttgtagagatggggtcttgctatgttgcccaggctggaatgcagtggcgtaaccttggttcactacagcctcgacctcctaggcccaaacgatcctcccatctcagcctctccagtggttgggactataggcatgcgccactacgcctggctaattttatttttcatagagatgaggtctcactgttgcccaggctggtagagactaggggtgtggactcaggtggtgtatagacttaaccaccaccatgtcgagcaaaagaacaaagaccaagaccaagaagcgccctcagcgtgcaacatccaatgtgtttgctatgtttgaccagtcacagattcaggagttcaaagaggccttcaacatgattgatcagaacagagatggtttcatcgacaaggaagatttgcatgatatgcttgcttcattggggaagaatccaactgatgagtatctagatgccatgatgaatgaggctccaggccccatcaatttcaccatgttcctcaccatgtttggtgagaagttaaatggcacagatcctgaagatgtcatcagaaatgcctttgcttgctttgatgaagaagcaactggcaccatacaggaagattacttgagagagctgctgacaaccatgggggatcggtttacagatgaggaagtggatgagctgtacagagaagcacctattgataaaaaggggaatttcaattacatcgagttcacacgcatcctgaaacatggagccaaagacaaagatgactgaaataacttcaaattccagccaaacgttccttgttgccactttgggtattctgagattttctcttgcatgcccttagctttacagcttttgcatttcctgttgtatttattctcagccattttgggcatatgtatctttataatcagactggaaacgggactttctattaatatcatcttcagaataaaaaataggataatttaacctaccagcccttctcccccaataactgtggtctatacagagtcaatatattttttcagagaaagttattcgctcgattttttctgaatcataattaaactttatgataaaata

SEQ ID NO: 292803 - DNA, 1117 bp, Homo sapiens
ggagtagtgcctattttagacctgcttggaagaatataactcaatgcagtgtcttacttttgctgctgagcggtttgcagactaccatcttccctgcaactctgaaggatggtatggtagaattttattgtctgatgactgagatttttaacttgaaacaaatttttgtagtttttaacagattgagtattgaaaattgcctttttattttaggtattattagacattctttttaattttaacttaaattttaccgggataaatttaggacttaaccaccaccatgtcgagcaaaagaacaaagaccaagaccaagaagcgccctcagcgtgcaacatccaatgtgtttgctatgtttgaccagtcacagattcaggagttcaaagaggccttcaacatgattgatcagaacagagatggtttcatcgacaaggaagatttgcatgatatgcttgcttcattggggaagaatccaactgatgagtatctagatgccatgatgaatgaggctccaggccccatcaatttcaccatgttcctcaccatgtttggtgagaagttaaatggcacagatcctgaagatgtcatcagaaatgcctttgcttgctttgatgaagaagcaactggcaccatacaggaagattacttgagagagctgctgacaaccatgggggatcggtttacagatgaggaagtggatgagctgtacagagaagcacctattgataaaaaggggaatttcaattacatcgagttcacacgcatcctgaaacatggagccaaagacaaagatgactgaaataacttcaaattccagccaaacgttccttgttgccactttgggtattctgagattttctcttgcatgcccttagctttacagcttttgcatttcctgttgtatttattctcagccattttgggcatatgtatctttataatcagactggaaacgggactttctattaatatcatcttcagaataaaaaataggataatttaacctaccagcccttctcccccaataactgtggtctatacagagtcaatatattttttcagagaaagttattcgctcgattttttctgaatcataattaaactttatgataaaata

SEQ ID NO: 292804 - DNA, 1035 bp, Homo sapiens
atgatctcggctcactgcaacctccatctcctgggttcaagcgaatctcctgcctcagcctcttgagtagctggaattactcctgacctcaagtgatccgcccacctcacgcctgtaattccagcactttgggaggccgaggcaggtggatcacgaagtcaggagttcaagaccagcctgcacaaggacttaaccaccaccatgtcgagcaaaagaacaaagaccaagaccaagaagcgccctcagcgtgcaacatccaatgtgtttgctatgtttgaccagtcacagattcaggagttcaaagaggccttcaacatgattgatcagaacagagatggtttcatcgacaaggaagatttgcatgatatgcttgcttcattggggaagaatccaactgatgagtatctagatgccatgatgaatgaggctccaggccccatcaatttcaccatgttcctcaccatgtttggtgagaagttaaatggcacagatcctgaagatgtcatcagaaatgcctttgcttgctttgatgaagaagcaactggcaccatacaggaagattacttgagagagctgctgacaaccatgggggatcggtttacagatgaggaagtggatgagctgtacagagaagcacctattgataaaaaggggaatttcaattacatcgagttcacacgcatcctgaaacatggagccaaagacaaagatgactgaaataacttcaaattccagccaaacgttccttgttgccactttgggtattctgagattttctcttgcatgcccttagctttacagcttttgcatttcctgttgtatttattctcagccattttgggcatatgtatctttataatcagactggaaacgggactttctattaatatcatcttcagaataaaaaataggataatttaacctaccagcccttctcccccaataactgtggtctatacagagtcaatatattttttcagagaaagttattcgctcgattttttctgaatcataattaaactttatgataaaata

SEQ ID NO: 292805 - DNA, 984 bp, Homo sapiens
aacgagtcggttcactagtacggtcgcagttgtgctggaacttcggcttacgggtgaggtacagctacgagaatccgagcacctctccgagcccctcgctgccgctatcacaccaccctgctacccagagagccggacttaaccaccaccatgtcgagcaaaagaacaaagaccaagaccaagaagcgccctcagcgtgcaacatccaatgtgtttgctatgtttgaccagtcacagattcaggagttcaaagaggccttcaacatgattgatcagaacagagatggtttcatcgacaaggaagatttgcatgatatgcttgcttcattggggaagaatccaactgatgagtatctagatgccatgatgaatgaggctccaggccccatcaatttcaccatgttcctcaccatgtttggtgagaagttaaatggcacagatcctgaagatgtcatcagaaatgcctttgcttgctttgatgaagaagcaactggcaccatacaggaagattacttgagagagctgctgacaaccatgggggatcggtttacagatgaggaagtggatgagctgtacagagaagcacctattgataaaaaggggaatttcaattacatcgagttcacacgcatcctgaaacatggagccaaagacaaagatgactgaaataacttcaaattccagccaaacgttccttgttgccactttgggtattctgagattttctcttgcatgcccttagctttacagcttttgcatttcctgttgtatttattctcagccattttgggcatatgtatctttataatcagactggaaacgggactttctattaatatcatcttcagaataaaaaataggataatttaacctaccagcccttctcccccaataactgtggtctatacagagtcaatatattttttcagagaaagttattcgctcgattttttctgaatcataattaaactttatgataaaata

SEQ ID NO: 292806 - DNA, 943 bp, Homo sapiens
aaaagaacggctgatgagtctgaaagattgtcgatgggtgcttcttgttctagaagctgcgccgggacttaacgagggttatgtctagctgatggacttaaccaccaccatgtcgagcaaaagaacaaagaccaagaccaagaagcgccctcagcgtgcaacatccaatgtgtttgctatgtttgaccagtcacagattcaggagttcaaagaggccttcaacatgattgatcagaacagagatggtttcatcgacaaggaagatttgcatgatatgcttgcttcattggggaagaatccaactgatgagtatctagatgccatgatgaatgaggctccaggccccatcaatttcaccatgttcctcaccatgtttggtgagaagttaaatggcacagatcctgaagatgtcatcagaaatgcctttgcttgctttgatgaagaagcaactggcaccatacaggaagattacttgagagagctgctgacaaccatgggggatcggtttacagatgaggaagtggatgagctgtacagagaagcacctattgataaaaaggggaatttcaattacatcgagttcacacgcatcctgaaacatggagccaaagacaaagatgactgaaataacttcaaattccagccaaacgttccttgttgccactttgggtattctgagattttctcttgcatgcccttagctttacagcttttgcatttcctgttgtatttattctcagccattttgggcatatgtatctttataatcagactggaaacgggactttctattaatatcatcttcagaataaaaaataggataatttaacctaccagcccttctcccccaataactgtggtctatacagagtcaatatattttttcagagaaagttattcgctcgattttttctgaatcataattaaactttatgataaaata

SEQ ID NO: 292807 - DNA, 963 bp, Homo sapiens
  misc_feature (42)..(42): n is a, c, g, or t
gagacccactctgcgggccaagaaaggtgaccgggcttcctnccggcttgctaagcagaggccggaagcggtggtttttagcggctctctgggtagcagggtggtgtgatagcggcagcgaggggctcggagaggtgctcggattctcgtagctgtgccgggacttaaccaccaccatgtcgagccaatgtgtttgctatgtttgaccagtcacagattcaggagttcaaagaggccttcaacatgattgatcagaacagagatggtttcatcgacaaggaagatttgcatgatatgcttgcttcattggggaagaatccaactgatgagtatctagatgccatgatgaatgaggctccaggccccatcaatttcaccatgttcctcaccatgtttggtgagaagttaaatggcacagatcctgaagatgtcatcagaaatgcctttgcttgctttgatgaagaagcaactggcaccatacaggaagattacttgagagagctgctgacaaccatgggggatcggtttacagatgaggaagtggatgagctgtacagagaagcacctattgataaaaaggggaatttcaattacatcgagttcacacgcatcctgaaacatggagccaaagacaaagatgactgaaataacttcaaattccagccaaacgttccttgttgccactttgggtattctgagattttctcttgcatgcccttagctttacagcttttgcatttcctgttgtatttattctcagccattttgggcatatgtatctttataatcagactggaaacgggactttctattaatatcatcttcagaataaaaaataggataatttaacctaccagcccttctcccccaataactgtggtctatacagagtcaatatattttttcagagaaagttattcgctcgattttttctgaatcataattaaactttatgataaaata

SEQ ID NO: 292808 - DNA, 857 bp, Homo sapiens
aacgagtcggttcactagtacggtcgcagttgtgctggaacttcggcttacgggtgaggtacagctacgagaatccgagcaatgtgtttgctatgtttgaccagtcacagattcaggagttcaaagaggccttcaacatgattgatcagaacagagatggtttcatcgacaaggaagatttgcatgatatgcttgcttcattggggaagaatccaactgatgagtatctagatgccatgatgaatgaggctccaggccccatcaatttcaccatgttcctcaccatgtttggtgagaagttaaatggcacagatcctgaagatgtcatcagaaatgcctttgcttgctttgatgaagaagcaactggcaccatacaggaagattacttgagagagctgctgacaaccatgggggatcggtttacagatgaggaagtggatgagctgtacagagaagcacctattgataaaaaggggaatttcaattacatcgagttcacacgcatcctgaaacatggagccaaagacaaagatgactgaaataacttcaaattccagccaaacgttccttgttgccactttgggtattctgagattttctcttgcatgcccttagctttacagcttttgcatttcctgttgtatttattctcagccattttgggcatatgtatctttataatcagactggaaacgggactttctattaatatcatcttcagaataaaaaataggataatttaacctaccagcccttctcccccaataactgtggtctatacagagtcaatatattttttcagagaaagttattcgctcgattttttctgaatcataattaaactttatgataaaata

SEQ ID NO: 292809 - DNA, 573 bp, Homo sapiens
tactgtgcagctcggtaccctgatttggatcctgaagatgtcatcagaaatgcctttgcttgctttgatgaagaagcaactggcaccatacaggaagattacttgagagagctgctgacaaccatgggggatcggtttacagatgaggaagtggatgagctgtacagagaagcacctattgataaaaaggggaatttcaattacatcgagttcacacgcatcctgaaacatggagccaaagacaaagatgactgaaataacttcaaattccagccaaacgttccttgttgccactttgggtattctgagattttctcttgcatgcccttagctttacagcttttgcatttcctgttgtatttattctcagccattttgggcatatgtatctttataatcagactggaaacgggactttctattaatatcatcttcagaataaaaaataggataatttaacctaccagcccttctcccccaataactgtggtctatacagagtcaatatattttttcagagaaagttattcgctcgattttttctgaatcataattaaactttatgataaaata

SEQ ID NO: 292810 - DNA, 647 bp, Homo sapiens
  misc_feature (39)..(39): n is a, c, g, or t
agctggacccgtcaccttctatcagaaagtaaacctcgntcagaagtctggtttcctgctctctccctcatgcacatcttcagaatccaaatcatgatttggatcctgaagatgtcatcagaaatgcctttgcttgctttgatgaagaagcaactggcaccatacaggaagattacttgagagagctgctgacaaccatgggggatcggtttacagatgaggaagtggatgagctgtacagagaagcacctattgataaaaaggggaatttcaattacatcgagttcacacgcatcctgaaacatggagccaaagacaaagatgactgaaataacttcaaattccagccaaacgttccttgttgccactttgggtattctgagattttctcttgcatgcccttagctttacagcttttgcatttcctgttgtatttattctcagccattttgggcatatgtatctttataatcagactggaaacgggactttctattaatatcatcttcagaataaaaaataggataatttaacctaccagcccttctcccccaataactgtggtctatacagagtcaatatattttttcagagaaagttattcgctcgattttttctgaatcataattaaactttatgataaaata

SEQ ID NO: 292811 - DNA, 891 bp, Homo sapiens
  misc_feature (42)..(42): n is a, c, g, or t
gagacccactctgcgggccaagaaaggtgaccgggcttcctnccggcttgctaagcagaggccggaagcggtggtttttagcggctctctgggtagcagggtggtgtgatagcggcagcgaggggctcggagaggtgctcggattctcgtagctgtgccgggacttaaccaccaccatgtcgagcaaaagaacaaagaccaagaccaagaagcgccctcagcgtgcaacatccaatgtgtttgctatgtttgaccagtcacagattcaggagttcaaagaggccttcaacatgattgatcagaacagagatggtttcatcgacaaggaagatttgcatgatatgcttgcttcattggggaagaatccaactgatgagtatctagatgccatgatgaatgaggctccaggccccatcaatttcaccatgttcctcaccatgtttggtgagaagttaaatggcacagatcctgaagatgtcatcagaaatgcctttgcttgctttgatgaagaagcaactggcaccatacaggaagattacttgagagagctgctgacaaccatgggggatcggtttacagatgaggaagtggatgagctgtacagagaagcacctattgataaaaaggggaatttcaattacatcgagttcacacgcatcctgaaacatggagccaaagacaaagatgactgaaataacttcaaattccagccaaacgttccttgttgccactttgggtattctgagattttctcttgcatgcccttagctttacagcttttgcatttcctgttgtatttattctcagccattttgggcatatgtatctttataatcgatactgagatcttcgcctggttcggcgccatcttcagaatccaaacagggtacg

SEQ ID NO: 292812 - DNA, 847 bp, Homo sapiens
  misc_feature (42)..(42): n is a, c, g, or t
gagacccactctgcgggccaagaaaggtgaccgggcttcctnccggcttgctaagcagaggccggaagcggtggtttttagcggctctctgggtagcagggtggtgtgatagcggcagcgaggggctcggagaggtgctcggattctcgtagctgtgccgggacttaaccaccaccatgtcgagcaaaagaacaaagaccaagaccaagaagcgccctcagcgtgcaacatccaatgtgtttgctatgtttgaccagtcacagattcaggagttcaaagaggccttcaacatgattgatcagaacagagatggtttcatcgacaaggaagatttgcatgatatgcttgcttcattggggaagaatccaactgatgagtatctagatgccatgatgaatgaggctccaggccccatcaatttcaccatgttcctcaccatgtttggtgagaagttaaatggcacagatcctgaagatgtcatcagaaatgcctttgcttgctttgatgaagaagcaactggcaccatacaggaagattacttgagagagctgctgacaaccatgggggatcggtttacagatgaggaagtggatgagctgtacagagaagcacctattgataaaaaggggaatttcaattacatcgagttcacacgcatcctgaaacatggagccaaagacaaagatgactgaaataacttcaaattccagccaaacgttccttgttgccactttgggtattctgagaatcggtcaccctgaagtttatattcttatcctaccaggcttcggaataatctcccatatagtaacttactaatccggaaaaaaagaacatttggatcata

SEQ ID NO: 292813 - DNA, 947 bp, Homo sapiens
  misc_feature (42)..(42): n is a, c, g, or t
gagacccactctgcgggccaagaaaggtgaccgggcttcctnccggcttgctaagcagaggccggaagcggtggtttttagcggctctctgggtagcagggtggtgtgatagcggcagcgaggggctcggagaggtgctcggattctcgtagctgtgccgggacttaaccaccaccatgtcgagcaaaagaacaaagaccaagaccaagaagcgccctcagcgtgcaacatccaatgtgtttgctatgtttgaccagtcacagattcaggagttcaaagaggccttcaacatgattgatcagaacagagatggtttcatcgacaaggaagatttgcatgatatgcttgcttcattggggaagaatccaactgatgagtatctagatgccatgatgaatgaggctccaggccccatcaatttcaccatgttcctcaccatgtttggtgagaagttaaatggcacagatcctgaagatgtcatcagaaatgcctttgcttgctttgatgaagaagcaactggcaccatacaggaagattacttgagagagctgctgacaaccatgggggatcggtttacagatgaggaagtggatgagctgtacagagaagcacctaacaaagatgactgaaataacttcaaattccagccaaacgttccttgttgccactttgggtattctgagattttctcttgcatgcccttagctttacagcttttgcatttcctgttgtatttattctcagccattttgggcatatgtatctttataatcagactggaaacgggactttctattaatatcatcttcagaataaaaaataggataatttaacctaccagcccttctcccccaataactgtggtctatacagagtcaatatattttttcagagaaagttattcgctcgattttttctgaatcataattaaactttatgataaaata

SEQ ID NO: 292814 - DNA, 1287 bp, Homo sapiens
  misc_feature (42)..(42): n is a, c, g, or t
gagacccactctgcgggccaagaaaggtgaccgggcttcctnccggcttgctaagcagaggccggaagcggtggtttttagcggctctctgggtagcagggtggtgtgatagcggcagcgaggggctcggagaggtgctcggattctcgtagctgtgccgggacttaaccaccaccatgtcgagcaaaagaacaaagaccaagaccaagaagcgccctcagcgtgcaacatccaatgtgtttgctatgtttgaccagtcacagattcaggagttcaaagaggccttcaacatgattgatcagaacagagatggtttcatcgacaaggaagatttgcatgatatgcttgcttcattggggaagaatccaactgatgagtatctagatgccatgatgaatgaggctccaggccccatcaatttcaccatgttcctcaccatgtttggtgagaagttaaatggcacagatcctgaagatgtcatcagaaatgcctttgcttgctttgatgaagaagcaactggcaccatacaggaagattacttgagagagctgctgacaaccatgggggatcggtttacagatgaggaagtggatgagctgtacagagaagcacctaacaaagatgactgaaataacttcaaattccagccaaacgttccttgttgccactttgggtattctgagattttctcttgcatgcccttagctttacagcttttgcatttcctgttgtatttattctcagccattttgggcatatgtatctttataatcagactggaaacgggactttctattaatatcatcttcagaataaaaaataggataatttaacctaccagcccttctcccccaataactgtggtctatacagagtcaatatattttttcagagaaagttattcgctcgattttttctgaatcataattaaactttatgataaaataaaaaaaaaaaaaaaaaaaaaaattttccgtgcgaccgcaatctgagttgactagtccaatctatcctatagtgagtcacattacactgcactggcctttacatcacaacgactggaatgacaatgccgtgacctactcaactgaattgccttgcatcccattctcgtctggtgaggtgatgtaatagagaacaggcccgaccgatctcccttccaacagtagcctaactgaaagcggatgtaaatcggagctttatgttagttaaagtcaagttatttttagtaatcatttatttctagcgactggccgagtgcccctccttttaatgaaagactgccgg

SEQ ID NO: 292815 - DNA, 1025 bp, Homo sapiens
  misc_feature (42)..(42): n is a, c, g, or t
gagacccactctgcgggccaagaaaggtgaccgggcttcctnccggcttgctaagcagaggccggaagcggtggtttttagcggctctctgggtagcagggtggtgtgatagcggcagcgaggggctcggagaggtgctcggattctcgtagctgtgccgggacttaaccaccaccatgtcgagcaaaagaacaaagaccaagaccaagaagcgccctcagcgtgcaacatccaatgtgtttgctatgtttgaccagtcacagattcaggagttcaaagaggccttcaacatgattgatcagaacagagatggtttcatcgacaaggaagatttgcatgatatgcttgcttcattggggaagaatccaactgatgagtatctagatgccatgatgaatgaggctccaggccccatcaatttcaccatgttcctcaccatgtttggtgagaagttaaatggcacagatcctgaagatgtcatcagaaatgcctttgcttgctttgatgaagaagcaactggcaccatacaggaagattacttgagagagctgctgacaaccatgggggatcggtttacagatgaggaagtggatgagctgtacagagaagcacctattgataaaaaggggaatttcaattacatcgagttcacacgcatcctgaaacatggagccaaagacaaagatgactgaaataactttagctaaaatcttccagttacattgtcttactctcttttacttctcagacacttcccccaccctcatagaacctgttgcatgcaacttagtttcacagctttgcctcttctttttgatgtatttattccagacctttctgccacttagcacttgtataatcagactggaaatggggatgagggtgtaaattgtattgaaaaagatcgcgaataaaaatcaacaaatgtgaaagcccagaaaaatatattcgtatctctggttttgctggatttttacatttttatatcataaacatgtcattttgaacacaccccaactccccct

SEQ ID NO: 292816 - DNA, 1030 bp, Homo sapiens
gtaaaaatctcattttacatctgagaaaaccaaagtcagggatgaagtgaaatgcctgaaataaaatagcttcttaaaactgggcctcaagcttccagtattctttccactgtaccactttattgatgtgtatgatgtagtgttgattttagcctggcaggtaaatgttacttgtttgtagaataagatgtgaccattcatgccacttgaaggaaccgtaaggcttagattctttaaccatactttttattactttgtttaggcataggtttagtctctcttatcaagagatcagaagctgaatgtggaggcagaatgatagagcaaatgatagagcggagcagtgctgctaagcagctaggcatttttctaggcacttctctgctgaggctgttttaagtaggtggacaccctgtagttcatatatttgcatgtttatagtttgtaacatacagaacatgcttagtcaagtatagatattctttgtaattaaccctcagaatagtatgtattctgatcccttgttctttattctccaggcaccatacaggaagattacttgagagagctgctgacaaccatgggggatcggtttacagatgaggaagtggatgagctgtacagagaagcacctattgataaaaaggggaatttcaattacatcgagttcacacgcatcctgaaacatggagccaaagacaaagatgactgaaataacttcaaattccagccaaacgttccttgttgccactttgggtattctgagattttctcttgcatgcccttagctttacagcttttgcatttcctgttgtatttattctcagccattttgggcatatgtatctttataatcagactggaaacgggactttctattaatatcatcttcagaataaaaaataggataatttaacctaccagcccttctcccccaataactgtggtctatacagagtcaatatattttttcagagaaagttattcgctcgattttttctgaatcataattaaactttatgataaaata

SEQ ID NO: 292817 - DNA, 664 bp, Homo sapiens
  misc_feature (42)..(42): n is a, c, g, or t
gagacccactctgcgggccaagaaaggtgaccgggcttcctnccggcttgctaagcagaggccggaagcggtggtttttagcggctctctgggtagcagggtggtgtgatagcggcagcgaggggctcggagaggtgctcggattctcgtagctgtgccgggacttaaccaccaccatgtcgagcaaaagaacaaagaccaagaccaagaagcgccctcagcgtgcaacatccaatgtgtttgctatgtttgaccagtcacagattcaggagttcaaagaggccttcaacatgattgatcagaacagagatggtttcatcgacaaggaagatttgcatgatatgcttgcttcattggggaagaatccaactgatgagtatctagatgccatgatgaatgaggctccaggccccatcaatttcaccatgttcctcaccatgtttggtgagaagttaaatggcacagatcctgaagatgtcatcagaaatgcctttgcttgctttgatgaagaagcaactggcaccatacaggaagattacttgagagagctgctgacaaccatgggggatcggtttacagatgaggaagtggatgagctgtacagagaagcacctactacccgtaagccgattccacaactgcgccgtactagttcacgagctgg

SEQ ID NO: 292818 - DNA, 1085 bp, Homo sapiens
  misc_feature (1057)..(1057): n is a, c, g, or t
  misc_feature (1059)..(1059): n is a, c, g, or t
  misc_feature (1074)..(1074): n is a, c, g, or t
  misc_feature (1082)..(1082): n is a, c, g, or t
gtaaaaatctcattttacatctgagaaaaccaaagtcagggatgaagtgaaatgcctgaaataaaatagcttcttaaaactgggcctcaagcttccagtattctttccactgtaccactttattgatgtgtatgatgtagtgttgattttagcctggcaggtaaatgttacttgtttgtagaataagatgtgaccattcatgccacttgaaggaaccgtaaggcttagattctttaaccatactttttattactttgtttaggcataggtttagtctctcttatcaagagatcagaagctgaatgtggaggcagaatgatagagcaaatgatagagcggagcagtgctgctaagcagctaggcatttttctaggcacttctctgctgaggctgttttaagtaggtggacaccctgtagttcatatatttgcatgtttatagtttgtaacatacagaacatgcttagtcaagtatagatattctttgtaattaaccctcagaatagtatgtattctgatcccttgttctttattctccaggcaccatacaggaagattacttgagagagctgctgacaaccatgggggatcggtttacagatgaggaagtggatgagctgtacagagaagcacctattgataaaaaggggaatttcaattacatcgagttcacacgcatcctgaaacatggagccaaagacaaagatgactgaaataacttcaaattccagccaaacgttccttgttgccactttgggtattctgagattttctcttgcatgcccttagctttacagcttttgcatttcctgttgtatttattctcagccattttgggcatatgtatctttataatcagactggaaacgggactttctattaatatcatcttcagaataaaaaataggataatttaacctaccagcccttctcccccaataactgtggtctatacagagtcaatatattttttcagagaaagttattcgctcgattttttctgaatcataattaaactttatgataaaataaaaaaaaaaaaaaaaaaaaaaaaaaananaaaaaaaaaaaaaanagaaaacnaca

SEQ ID NO: 292819 - DNA, 586 bp, Homo sapiens
  misc_feature (42)..(42): n is a, c, g, or t
gagacccactctgcgggccaagaaaggtgaccgggcttcctnccggcttgctaagcagaggccggaagcggtggtttttagcggctctctgggtagcagggtggtgtgatagcggcagcgaggggctcggagaggtgctcggattctcgtagctgtgccgggacttaaccaccaccatgtcgagcaaaagaacaaagaccaagaccaagaagcgccctcagcgtgcaacatccaatgtgtttgctatgtttgaccagtcacagattcaggagttcaaagaggccttcaacatgattgatcagaacagagatggtttcatcgacaaggaagatttgcatgatatgcttgcttcattggggaagaatccaactgatgagtatctagatgccatgatgaatgaggctccaggccccatcaatttcaccatgttcctcaccatgtttggtgagaagttaaatggcacagatcctgaagatgtcatcagaaatgcctttgcttgctttgatgaagaagcaactggcaccatacaggaagattacttgagagagctgctgacagtatgatactcggcgtgtggtccggcctg

SEQ ID NO: 292820 - DNA, 972 bp, Homo sapiens
atgatctcggctcactgcaacctccatctcctgggttcaagcgaatctcctgcctcagcctcttgagtagctggaattactcctgacctcaagtgatccgcccacctcacgcctgtaattccagcactttgggaggccgaggcaggtggatcacgaagtcaggagttcaagaccagcctgcacaaggacttaaccaccaccatgtcgagcaaaagaacaaagaccaagaccaagaagcgccctcagcgtgcaacatccaatgtgtttgctatgtttgaccagtcacagattcaggagttcaaagaggccttcaacatgattgatcagaacagagatggtttcatcgacaaggaagatttgcatgatatgcttgcttcattggggaagaatccaactgatgagtatctagatgccatgatgaatgaggctccaggccccatcaatttcaccatgttcctcaccatgtttggtgagaagttaaatggcacagatcctgaagatgtcatcagaaatgcctttgcttgctttgatgaagaagcaactggcaccatacaggaagattacttgagagagctgctgacaaccatgggggatcggtttacagatgaggaagtggatgagctgtacagagaagcacctaacaaagatgactgaaataacttcaaattccagccaaacgttccttgttgccactttgggtattctgagattttctcttgcatgcccttagctttacagcttttgcatttcctgttgtatttattctcagccattttgggcatatgtatctttataatcagactggaaacgggactttctattaatatcatcttcagaataaaaaataggataatttaacctaccagcccttctcccccaataactgtggtctatacagagtcaatatattttttcagagaaagttattcgctcgattttttctgaatcataattaaactttatgataaaata

SEQ ID NO: 292821 - DNA, 693 bp, Homo sapiens
  misc_feature (42)..(42): n is a, c, g, or t
gagacccactctgcgggccaagaaaggtgaccgggcttcctnccggcttgctaagcagaggccggaagcggtggtttttagcggctctctgggtagcagggtggtgtgatagcggcagcgaggggctcggagaggtgctcggattctcgtagctgtgccgggacttaaccaccaccatgtcgagccaatgtgtttgctatgtttgaccagtcacagattcaggagttcaaagaggccttcaacatgattgatcagaacagagatggtttcatcgacaaggaagatttgcatgatatgcttgcttcattggggaagaatccaactgatgagtatctagatgccatgatgaatgaggctccaggccccatcaatttcaccatgttcctcaccatgtttggtgagaagttaaatggcacagatcctgaagatgtcatcagaaatgcctttgcttgctttgatgaagaagcaactgtttccattcaggtagatttcttgagagagctgttgtcaaccttgtgggattgttttttatttgtttattttaattagccttacgtcttttttttttttgttattatcttttatttattttctgttgtctcataccctccctcatcattggcaccacccccgcgggtctttttttttcttttttttcttgtactctttctttttctctcttttctttttatt

SEQ ID NO: 292822 - DNA, 1010 bp, Homo sapiens
  misc_feature (42)..(42): n is a, c, g, or t
gagacccactctgcgggccaagaaaggtgaccgggcttcctnccggcttgctaagcagaggccggaagcggtggtttttagcggctctctgggtagcagggtggtgtgatagcggcagcgaggggctcggagaggtgctcggattctcgtagctgtgccgggacttaaccaccaccatgtcgagcaaaagaacaaagaccaagaccaagaagcgccctcagcgtgcaacatccaatgtgtttgctatgtttgaccagtcacagattcaggagttcaaagaggccttcaacatgattgatcagaacagagatggtttcatcgacaaggaagatttgcatgatatgcttgcttcattggggaagaatccaactgatgagtatctagatgccatgatgaatgaggctccaggccccatcaatttcaccatgttcctcaccatgtttggtgagaagttaaatggcacagatcctgaagatgtcatcagaaatgcctttgcttgctttgatgaagaagcaactggcaccatacaggaagattacttgagagagctgctgacaaccatgggggatcggtttacagatgaggaagtggatgagctgtacagagaagcacctattgataaaaaggggaatttcaattacatcgagttcacacgcatcctgaaacatggagccaaagacaaagatgactgaaataacttcaaattccagccaaacgttccttgttgccactttgggtattctgagattttctcttgcatgcccttagctttacagcttttgcatttcctgttgtatttattctcagccattttgggcatatgtatctttataatcagactggaaacgggactttctattaatatcatcttcagaataaaaaataggataatttaacctaccagcccttctcccccaataactgtggtctatacagagtcaatatattttttcagagaaagttattcgctcgattttttctgaatcataattaaactttatgataaaata

SEQ ID NO: 292823 - DNA, 999 bp, Homo sapiens
  misc_feature (42)..(42): n is a, c, g, or t
  misc_feature (906)..(907): n is a, c, g, or t
  misc_feature (910)..(910): n is a, c, g, or t
  misc_feature (914)..(916): n is a, c, g, or t
  misc_feature (918)..(919): n is a, c, g, or t
  misc_feature (935)..(935): n is a, c, g, or t
  misc_feature (945)..(945): n is a, c, g, or t
  misc_feature (949)..(949): n is a, c, g, or t
  misc_feature (951)..(951): n is a, c, g, or t
  misc_feature (968)..(969): n is a, c, g, or t
  misc_feature (971)..(972): n is a, c, g, or t
  misc_feature (979)..(979): n is a, c, g, or t
  misc_feature (984)..(984): n is a, c, g, or t
  misc_feature (988)..(988): n is a, c, g, or t
  misc_feature (993)..(993): n is a, c, g, or t
gagacccactctgcgggccaagaaaggtgaccgggcttcctnccggcttgctaagcagaggccggaagcggtggtttttagcggctctctgggtagcagggtggtgtgatagcggcagcgaggggctcggagaggtgctcggattctcgtagctgtgccgggacttaaccaccaccatgtcgagcaaaagaacaaagaccaagaccaagaagcgccctcagcgtgcaacatccaatgtgtttgctatgtttgaccagtcacagattcaggagttcaaagaggccttcaacatgattgatcagaacagagatggtttcatcgacaaggaagatttgcatgatatgcttgcttcattggggaagaatccaactgatgagtatctagatgccatgatgaatgaggctccaggccccatcaatttcaccatgttcctcaccatgtttggtgagaagttaaatggcacagatcctgaagatgtcatcagaaatgcctttgcttgctttgatgaagaagcaactggcaccatacaggaagattacttgagagagctgctgacaaccatgggggatcggtttacagatgaggaagtggatgagctgtacagagaagcacctattgataaaaaggggaatttcaattacatcgagttcacacgcatcctgaaacatggagccaaagacaaagatgactgaaataacttcaaattccagccaaacgttccttgttgccactttgggtattctgagattttctcttgcatgcccttagctttacagcttttgcatttcctgttgtatttattctcagccattttgggcatatgtatctttataatcagactggaaacgggactttctattaatatcatcttcagaataaaaaataggataatttaacctaccagcnntanaagnnntnnaaaaaataaatgtggntttaaagggnaatntntttttaagggaagtttnngnngtttttntggtnatantaaanttttgt

SEQ ID NO: 292824 - DNA, 613 bp, Homo sapiens
  misc_feature (7)..(7): n is a, c, g, or t
  misc_feature (585)..(585): n is a, c, g, or t
  misc_feature (587)..(587): n is a, c, g, or t
  misc_feature (602)..(602): n is a, c, g, or t
  misc_feature (610)..(610): n is a, c, g, or t
actggcngactctagtaggatcccctgatttggatcctgaagatgtcatcagaaatgcctttgcttgctttgatgaagaagcaactggcaccatacaggaagattacttgagagagctgctgacaaccatgggggatcggtttacagatgaggaagtggatgagctgtacagagaagcacctattgataaaaaggggaatttcaattacatcgagttcacacgcatcctgaaacatggagccaaagacaaagatgactgaaataacttcaaattccagccaaacgttccttgttgccactttgggtattctgagattttctcttgcatgcccttagctttacagcttttgcatttcctgttgtatttattctcagccattttgggcatatgtatctttataatcagactggaaacgggactttctattaatatcatcttcagaataaaaaataggataatttaacctaccagcccttctcccccaataactgtggtctatacagagtcaatatattttttcagagaaagttattcgctcgattttttctgaatcataattaaactttatgataaaataaaaaaananaaaaaaaaaaaaaanagaaaacnaca

SEQ ID NO: 292825 - DNA, 874 bp, Homo sapiens
  misc_feature (774)..(774): n is a, c, g, or t
ggagtagtgcctattttagacctgcttggaagaatataactcaatgcagtgtcttacttttgctgctgagcggtttgcagactaccatcttccctgcaactctgaaggatggacttaaccaccaccatgtcgagcaaaagaacaaagaccaagaccaagaagcgccctcagcgtgcaacatccaatgtgtttgctatgtttgaccagtcacagattcaggagttcaaagaggccttcaacatgattgatcagaacagagatggtttcatcgacaaggaagatttgcatgatatgcttgcttcattggggaagaatccaactgatgagtatctagatgccatgatgaatgaggctccaggccccatcaatttcaccatgttcctcaccatgtttggtgagaagttaaatggcacagatcctgaagatgtcatcagaaatgcctttgcttgctttgatgaagaagcaactggcaccatacaggaagattacttgagagagctgctgacaaccatgggggatcggtttacagatgaggaagtggatgagctgtacagagaagcacctattgataaaaaggggaatttcaattacatcgagttcacacgcatcctgaaacatggagccaaagacaaagatgactgaaataacttcaaattccagccaaacgttccttgttgccactttgggtattctgagattttctcttgcatgcccttagttaaagttggattcctgtggattatctccagcatgggtatgttttttacaacggangggtttatattgaaaaaggattttctaaaaaaaaaatggggggcaaataaaaagggggggaagaagagtaaaggagtgtaaaggggaaggttagaaaaag

SEQ ID NO: 292826 - DNA, 1065 bp, Homo sapiens
  misc_feature (42)..(42): n is a, c, g, or t
  misc_feature (1037)..(1037): n is a, c, g, or t
  misc_feature (1039)..(1039): n is a, c, g, or t
  misc_feature (1054)..(1054): n is a, c, g, or t
  misc_feature (1062)..(1062): n is a, c, g, or t
gagacccactctgcgggccaagaaaggtgaccgggcttcctnccggcttgctaagcagaggccggaagcggtggtttttagcggctctctgggtagcagggtggtgtgatagcggcagcgaggggctcggagaggtgctcggattctcgtagctgtgccgggacttaaccaccaccatgtcgagcaaaagaacaaagaccaagaccaagaagcgccctcagcgtgcaacatccaatgtgtttgctatgtttgaccagtcacagattcaggagttcaaagaggccttcaacatgattgatcagaacagagatggtttcatcgacaaggaagatttgcatgatatgcttgcttcattggggaagaatccaactgatgagtatctagatgccatgatgaatgaggctccaggccccatcaatttcaccatgttcctcaccatgtttggtgagaagttaaatggcacagatcctgaagatgtcatcagaaatgcctttgcttgctttgatgaagaagcaactggcaccatacaggaagattacttgagagagctgctgacaaccatgggggatcggtttacagatgaggaagtggatgagctgtacagagaagcacctattgataaaaaggggaatttcaattacatcgagttcacacgcatcctgaaacatggagccaaagacaaagatgactgaaataacttcaaattccagccaaacgttccttgttgccactttgggtattctgagattttctcttgcatgcccttagctttacagcttttgcatttcctgttgtatttattctcagccattttgggcatatgtatctttataatcagactggaaacgggactttctattaatatcatcttcagaataaaaaataggataatttaacctaccagcccttctcccccaataactgtggtctatacagagtcaatatattttttcagagaaagttattcgctcgattttttctgaatcataattaaactttatgataaaataaaaaaaaaaaaaaaaaaaaaaaaaaananaaaaaaaaaaaaaanagaaaacnaca

SEQ ID NO: 292827 - DNA, 1045 bp, Homo sapiens
  misc_feature (42)..(42): n is a, c, g, or t
  misc_feature (1017)..(1017): n is a, c, g, or t
  misc_feature (1019)..(1019): n is a, c, g, or t
  misc_feature (1034)..(1034): n is a, c, g, or t
  misc_feature (1042)..(1042): n is a, c, g, or t
gagacccactctgcgggccaagaaaggtgaccgggcttcctnccggcttgctaagcagaggccggaagcggtggtttttagcggctctctgggtagcagggtggtgtgatagcggcagcgaggggctcggagaggtgctcggattctcgtagctgtgccgggacttaaccaccaccatgtcgagcaaaagaacaaagaccaagaccaagaagcgccctcagcgtgcaacatccaatgtgtttgctatgtttgaccagtcacagattcaggagttcaaagaggccttcaacatgattgatcagaacagagatggtttcatcgacaaggaagatttgcatgatatgcttgcttcattggggaagaatccaactgatgagtatctagatgccatgatgaatgaggctccaggccccatcaatttcaccatgttcctcaccatgtttggtgagaagttaaatggcacagatcctgaagatgtcatcagaaatgcctttgcttgctttgatgaagaagcaactggcaccatacaggaagattacttgagagagctgctgacaaccatgggggatcggtttacagatgaggaagtggatgagctgtacagagaagcacctattgataaaaaggggaatttcaattacatcgagttcacacgcatcctgaaacatggagccaaagacaaagatgactgaaataacttcaaattccagccaaacgttccttgttgccactttgggtattctgagattttctcttgcatgcccttagctttacagcttttgcatttcctgttgtatttattctcagccattttgggcatatgtatctttataatcagactggaaacgggactttctattaatatcatcttcagaataaaaaataggataatttaacctaccagcccttctcccccaataactgtggtctatacagagtcaatatattttttcagagaaagttattcgctcgattttttctgaatcataattaaactttatgataaaataaaaaaananaaaaaaaaaaaaaanagaaaacnaca

SEQ ID NO: 292828 - DNA, 533 bp, Homo sapiens
tgatctccctctcttctggcagcgagccttcaatgccacctcgttcctgcgccacatccggaagctggggcagatcccagagggcgagggggcctctgagcagggcatggcccgccacagccactcaggcctccgtgctggccagccccccaagtggtgatgcccagttgagaatgggacccagagtagatgctgacctgggcactccaccattccggggccaccacagagatgccagcaggatgccactttgccagcccgacacacggacctttgtaaagaacagcaacaggcaggagaggcagcgtgtgaccagattgtgtcccgtcattgggtggcatatgttaactagctgccaaacaacttcaacccgtgtaattcatgtacatttgcaacagccagcccggtacagcctgtgtgacttctctgtatgtgtgtgtgtgtcgtgaccagcctaagtagttagcataactcaagatgctgatgtgcagtcacccatcagagaaaataaaaatggaaaccacgttcacagc

SEQ ID NO: 292829 - DNA, 1706 bp, Homo sapiens
ggcggggcgcgggcggggggcttggcgctgcggccactgcgcggcacgacgctgcggcacccgctccagacatgctgctgctgaagaaacacacggaggacatcagcagcgtctacgagatccgcgagaggctcggctcgggtgccttctccgaggtggtgctggcccaggagcggggctccgcacacctcgtggccctcaagtgcatccccaagaaggccctccggggcaaggaggccctggtggagaacgagatcgcagtgctccgtaggatcagtcaccccaacatcgtcgctctggaggatgtccacgagagcccttcccacctctacctggccatggaactggtgacgggtggcgagctgtttgaccgcatcatggagcgcggctcctacacagagaaggatgccagccatctggtgggtcaggtccttggcgccgtctcctacctgcacagcctggggatcgtgcaccgggacctcaagcccgaaaacctcctgtatgccacgccctttgaggactcgaagatcatggtctctgactttggactctccaaaatccaggctgggaacatgctaggcaccgcctgtgggacccctggatatgtgggtgagggacgacaccctgaggcttgctgggagtggggtggcctgggggaccctagacagccgggaaggctgttgtgcccgttgcctttgtgtgggccattcctgggcttgagtaggccgagccagtgacactgagcggcatggctgcgtgtgtgcctgtgcgtgcgtctgtctgtctctggcccccagccccagagctcttggagcagaaaccctacgggaaggccgtagatgtgtgggccctgggcgtcatctcctacatcctgctgtgtgggtacccccccttctacgacgagagcgaccctgagctcttcagccagatcctgagggccagctatgagtttgactctcctttctgggatgacatctcagaatcagccaaagacttcatccggcaccttctggagcgagacccccagaagaggttcacctgccaacaggccttgcggcacctttggatctctggggacacagccttcgacagggacatcttaggctctgtcagtgagcagatccggaagaactttgctcggacacactggaagcgagccttcaatgccacctcgttcctgcgccacatccggaagctggggcagatcccagagggcgagggggcctctgagcagggcatggcccgccacagccactcaggcctccgtgctggccagccccccaagtggtgatgcccaggcagatgccgaggccaagtggactgacccccagatttccttcccttggatgctttcggtcccctcccccaacccctccccctggggctggcctctgctggattttgagatttgagggtgtggcgcatggcgctggggttggaatggggcacccccaagtctgtccccaggctctgccctgcctgggggcagtggctcccctcccctgttgcctctcccgcccctgccccccccgccccgccaaaagccgagggggtgctggcaggcgggcctcaggggctgtctttcctgcacggctgttgtgtgcttcgctgagtgtgggtggtcctgcttgtgtcatggtcatggccttccagccccctccagttttccccaaaccaataaagaaagatacagcaaaaaaaaagtg

SEQ ID NO: 292830 - DNA, 1215 bp, Homo sapiens
ggcggggcgcgggcggggggcttggcgctgcggccactgcgcggcacgacgctgcggcacccgctccagacatgctgctgctgaagaaacacacggaggacatcagcagcgtctacgagatccgcgagaggctcggctcgggtgccttctccgaggtggtgctggcccaggagcggggctccgcacacctcgtggccctcaagtgcatccccaagaaggccctccggggcaaggaggccctggtggagaacgagatcgcagtgctccgtaggatcagtcaccccaacatcgtcgctctggaggatgtccacgagagcccttcccacctctacctggccatggaactggtgacgggtggcgagctgtttgaccgcatcatggagcgcggctcctacacagagaaggatgccagccatctggtgggtcaggtccttggcgccgtctcctacctgcacagcctggggatcgtgcaccgggacctcaagcccgaaaacctcctgtatgccacgccctttgaggactcgaagatcatggtctctgactttggactctccaaaatccaggctgggaacatgctaggcaccgcctgtgggacccctggatatgtggccccagagctcttggagcagaaaccctacgggaaggccgtagatgtgtgggccctgggcgtcatctcctacatcctgctgtgtgggtacccccccttctacgacgagagcgaccctgagctcttcagccagatcctgagggccagctatgagtttgactctcctttctgggatgacatctcagaatcagccaaagacttcatccggcaccttctggagcgagacccccagaagaggttcacctgccaacaggccttgcggcacctttggatctctggggacacagccttcgacagggacatcttaggctctgtcagtgagcagatccggaagaactttgctcggacacactggaagcgagccttcaatgccacctcgttcctgcgccacatccggaagctggggcagatcccagagggcgagggggcctctgagcagggcatggcccgccacagccactcaggcgggcctcaggggctgtctttcctgcacggctgttgtgtgcttcgctgagtgtgggtggtcctgcttgtgtcatggtcatggccttccagccccctccagttttccccaaaccaataaagaaagatacagcaaaaaaaaagtg

SEQ ID NO: 292831 - DNA, 2027 bp, Homo sapiens
ggagccttctggaaagcggccggatgtgtggaggcagagaggcagcatccaggcgctggtcgccttcggggtgcggacatgctgctgctgaagaaacacacggaggacatcagcagcgtctacgagatccgcgagaggctcggctcgggtgccttctccgaggtggtgctggcccaggagcggggctccgcacacctcgtggccctcaagtgcatccccaagaaggccctccggggcaaggaggccctggtggagaacgagatcgcagtgctccgtaggatcagtcaccccaacatcgtcgctctggaggatgtccacgagagcccttcccacctctacctggccatggaactgtgaggagggcctgggcaggctgtgggagccggggagggactgagcagtgagtggggctgaaggccaggctgagtgcctgggtcagccaaacccctggcacccccagggtgacgggtggcgagctgtttgaccgcatcatggagcgcggctcctacacagagaaggatgccagccatctggtgggtcaggtccttggcgccgtctcctacctgcacagcctggggatcgtgcaccgggacctcaaggtgcctggctggggcctctgcaccccaccctcccacctgcccacctggccctgcctttgttttcccgggagcacggctggggcctttcttgatctcctgctccaccaaggctctggggaacctgagagtgcctagtccccatcctgtcccagcaccggcaccgcgtcaggactgactggcccttttcccggtgtccgtgtgtcacagcccgaaaacctcctgtatgccacgccctttgaggactcgaagatcatggtctctgactttggactctccaaaatccaggctgggaacatgctaggcaccgcctgtgggacccctggatatgtgggtgagggacgacaccctgaggcttgctgggagtggggtggcctgggggaccctagacagccgggaaggctgttgtgcccgttgcctttgtgtgggccattcctgggcttgagtaggccgagccagtgacactgagcggcatggctgcgtgtgtgcctgtgcgtgcgtctgtctgtctctggcccccagccccagagctcttggagcagaaaccctacgggaaggccgtagatgtgtgggccctgggcgtcatctcctacatcctgctgtgtgggtacccccccttctacgacgagagcgaccctgagctcttcagccagatcctgagggccagctatgagtttgactctcctttctgggatgacatctcagaatcagccaaagacttcatccggcaccttctggagcgagacccccagaagaggttcacctgccaacaggccttgcggcacctttggatctctggggacacagccttcgacagggacatcttaggctctgtcagtgagcagatccggaagaactttgctcggacacactggaagcgagccttcaatgccacctcgttcctgcgccacatccggaagctggggcagatcccagagggcgagggggcctctgagcagggcatggcccgccacagccactcaggcctccgtgctggccagccccccaagtggtgatgcccaggcagatgccgaggccaagtggactgacccccagatttccttcccttggatgctttcggtcccctcccccaacccctccccctggggctggcctctgctggattttgagatttgagggtgtggcgcatggcgctggggttggaatggggcacccccaagtctgtccccaggctctgccctgcctgggggcagtggctcccctcccctgttgcctctcccgcccctgccccccccgccccgccaaaagccgagggggtgctggcaggcgggcctcaggggctgtctttcctgcacggctgttgtgtgcttcgctgagtgtgggtggtcctgcttgtgtcatggtcatggccttccagccccctccagttttccccaaaccaataaagaaagatacagcaaaaaaaaagtg

SEQ ID NO: 292832 - DNA, 1683 bp, Homo sapiens
cgcggggcgggggcgcaccggatccggcccgcggccgccgcagccttgcgcgtccgcagcacacctgtcacgcctggcgcgccccctgcccgcacgcgctcggtccacgcagctcgggacgcgggcggcccaggctgccaggtccccctgctccgcggcgccgagggctgggctgcgtctgcggccgcgtgggtggccgcggtcttggcaggtggctgcgcgcgggggtcgcagacatgctgctgctgaagaaacacacggaggacatcagcagcgtctacgagatccgcgagaggctcggctcgggtgccttctccgaggtggtgctggcccaggagcggggctccgcacacctcgtggccctcaagtgcatccccaagaaggccctccggggcaaggaggccctggtggagaacgagatcgcagtgctccgtaggatcagtcaccccaacatcgtcgctctggaggatgtccacgagagcccttcccacctctacctggccatggaactggtgacgggtggcgagctgtttgaccgcatcatggagcgcggctcctacacagagaaggatgccagccatctggtgggtcaggtccttggcgccgtctcctacctgcacagcctggggatcgtgcaccgggacctcaagcccgaaaacctcctgtatgccacgccctttgaggactcgaagatcatggtctctgactttggactctccaaaatccaggctgggaacatgctaggcaccgcctgtgggacccctggatatgtggccccagagctcttggagcagaaaccctacgggaaggccgtagatgtgtgggccctgggcgtcatctcctacatcctgctgtgtgggtacccccccttctacgacgagagcgaccctgagctcttcagccagatcctgagggccagctatgagtttgactctcctttctgggatgacatctcagaatcagccaaagacttcatccggcaccttctggagcgagacccccagaagaggttcacctgccaacaggccttgcggcacctttggatctctggggacacagccttcgacagggacatcttaggctctgtcagtgagcagatccggaagaactttgctcggacacactggaagcgagccttcaatgccacctcgttcctgcgccacatccggaagctggggcagatcccagagggcgagggggcctctgagcagggcatggcccgccacagccactcaggcctccgtgctggccagccccccaagtggtgatgcccaggcagatgccgaggccaagtggactgacccccagatttccttcccttggatgctttcggtcccctcccccaacccctccccctggggctggcctctgctggattttgagatttgagggtgtggcgcatggcgctggggttggaatggggcacccccaagtctgtccccaggctctgccctgcctgggggcagtggctcccctcccctgttgcctctcccgcccctgccccccccgccccgccaaaagccgagggggtgctggcaggcgggcctcaggggctgtctttcctgcacggctgttgtgtgcttcgctgagtgtgggtggtcctgcttgtgtcatggtcatggccttccagccccctccagttttccccaaaccaataaagaaagatacagcaaaaaaaaagtg

SEQ ID NO: 292833 - DNA, 2041 bp, Homo sapiens
caggcagatatctgatcgaagaacattccaggcaggggagcaaaggctagggccgtcaggaggccagtgtggccggggaagaggtggaggaggaggggccagggcagtcgttaggccgccccctaaggactcatgctttgacttggattgacatagagagctgcaggagggtgacatgatctcaataaaaggaatgctctggctgctgggtagagaagaaagcgagggtgagggattaatggtggagccagagggagcccagtgagtgccgggagcccagggtggcagagctgtggtgcagggttgcagggtcctggagctaggcatggaggctgctttcgggcaagtggccgggtcagcctgtcctcggagaggcggtgaaggcagagactggaaggcagagagccttgccgacctgtggccgaagagctctccgggagacagccaccggtggtgcaaaggccctggggccggcccagccgggccgcagctccgggaggcggcgcgagcgagcagtgggctgggcggtggcggccggcacccgagccggatcccggcgattgccttacaagacatgctgctgctgaagaaacacacggaggacatcagcagcgtctacgagatccgcgagaggctcggctcgggtgccttctccgaggtggtgctggcccaggagcggggctccgcacacctcgtggccctcaagtgcatccccaagaaggccctccggggcaaggaggccctggtggagaacgagatcgcagtgctccgtaggcgcttccttgccattgcaggatcagtcaccccaacatcgtcgctctggaggatgtccacgagagcccttcccacctctacctggccatggaactggtgacgggtggcgagctgtttgaccgcatcatggagcgcggctcctacacagagaaggatgccagccatctggtgggtcaggtccttggcgccgtctcctacctgcacagcctggggatcgtgcaccgggacctcaagcccgaaaacctcctgtatgccacgccctttgaggactcgaagatcatggtctctgactttggactctccaaaatccaggctgggaacatgctaggcaccgcctgtgggacccctggatatgtggccccagagctcttggagcagaaaccctacgggaaggccgtagatgtgtgggccctgggcgtcatctcctacatcctgctgtgtgggtacccccccttctacgacgagagcgaccctgagctcttcagccagatcctgagggccagctatgagtttgactctcctttctgggatgacatctcagaatcagccaaagacttcatccggcaccttctggagcgagacccccagaagaggttcacctgccaacaggccttgcggcacctttggatctctggggacacagccttcgacagggacatcttaggctctgtcagtgagcagatccggaagaactttgctcggacacactggaagcgagccttcaatgccacctcgttcctgcgccacatccggaagctggggcagatcccagagggcgagggggcctctgagcagggcatggcccgccacagccactcaggcctccgtgctggccagccccccaagtggtgatgcccaggcagatgccgaggccaagtggactgacccccagatttccttcccttggatgctttcggtcccctcccccaacccctccccctggggctggcctctgctggattttgagatttgagggtgtggcgcatggcgctggggttggaatggggcacccccaagtctgtccccaggctctgccctgcctgggggcagtggctcccctcccctgttgcctctcccgcccctgccccccccgccccgccaaaagccgagggggtgctggcaggcgggcctcaggggctgtctttcctgcacggctgttgtgtgcttcgctgagtgtgggtggtcctgcttgtgtcatggtcatggccttccagccccctccagttttccccaaaccaataaagaaagatacagcaaaaaaaaagtg

SEQ ID NO: 292834 - DNA, 2134 bp, Homo sapiens
ggctgaggcctgcctggcagggggtggaggaggaagctgcccttgcccccggcggggcggggagagacccccatcacctctcccctgcccctgcagacatgctgctgctgaagaaacacacggaggacatcagcagcgtctacgagatccgcgagaggctcggctcggggccctccccgctccactctctctccctcctgcctctcctctcttcccacttccttcccacctcccaccgccccgtctgcggcaggggtgccttctccgaggtggtgctggcccaggagcggggctccgcacacctcgtggccctcaagtgcatccccaagaaggccctccggggcaaggaggccctggtggagaacgagatcgcagtgctccgtaggatcagtcaccccaacatcgtcgctctggaggatgtccacgagagcccttcccacctctacctggccatggaactgtgaggagggcctgggcaggctgtgggagccggggagggactgagcagtgagtggggctgaaggccaggctgagtgcctgggtcagccaaacccctggcacccccagggtgacgggtggcgagctgtttgaccgcatcatggagcgcggctcctacacagagaaggatgccagccatctggtgggtcaggtccttggcgccgtctcctacctgcacagcctggggatcgtgcaccgggacctcaaggtgcctggctggggcctctgcaccccaccctcccacctgcccacctggccctgcctttgttttcccgggagcacggctggggcctttcttgatctcctgctccaccaaggctctggggaacctgagagtgcctagtccccatcctgtcccagcaccggcaccgcgtcaggactgactggcccttttcccggtgtccgtgtgtcacagcccgaaaacctcctgtatgccacgccctttgaggactcgaagatcatggtctctgactttggactctccaaaatccaggctgggaacatgctaggcaccgcctgtgggacccctggatatgtgggtgagggacgacaccctgaggcttgctgggagtggggtggcctgggggaccctagacagccgggaaggctgttgtgcccgttgcctttgtgtgggccattcctgggcttgagtaggccgagccagtgacactgagcggcatggctgcgtgtgtgcctgtgcgtgcgtctgtctgtctctggcccccagccccagagctcttggagcagaaaccctacgggaaggccgtagatgtgtgggccctgggcgtcatctcctacatcctgctgtgtgggtacccccccttctacgacgagagcgaccctgagctcttcagccagatcctgagggccagctatgagtttgactctcctttctgggatgacatctcagaatcagccaaagacttcatccggcaccttctggagcgagacccccagaagaggttcacctgccaacaggccttgcggcacctttggatctctggggacacagccttcgacagggacatcttaggctctgtcagtgagcagatccggaagaactttgctcggacacactggaagcgagccttcaatgccacctcgttcctgcgccacatccggaagctggggcagatcccagagggcgagggggcctctgagcagggcatggcccgccacagccactcaggcctccgtgctggccagccccccaagtggtgatgcccaggcagatgccgaggccaagtggactgacccccagatttccttcccttggatgctttcggtcccctcccccaacccctccccctggggctggcctctgctggattttgagatttgagggtgtggcgcatggcgctggggttggaatggggcacccccaagtctgtccccaggctctgccctgcctgggggcagtggctcccctcccctgttgcctctcccgcccctgccccccccgccccgccaaaagccgagggggtgctggcaggcgggcctcaggggctgtctttcctgcacggctgttgtgtgcttcgctgagtgtgggtggtcctgcttgtgtcatggtcatggccttccagccccctccagttttccccaaaccaataaagaaagatacagcaaaaaaaaagtg

SEQ ID NO: 292835 - DNA, 2047 bp, Homo sapiens
ggctgaggcctgcctggcagggggtggaggaggaagctgcccttgcccccggcggggcggggagagacccccatcacctctcccctgcccctgcagacatgctgctgctgaagaaacacacggaggacatcagcagcgtctacgagatccgcgagaggctcggctcgggtgccttctccgaggtggtgctggcccaggagcggggctccgcacacctcgtggccctcaagtgcatccccaagaaggccctccggggcaaggaggccctggtggagaacgagatcgcagtgctccgtaggatcagtcaccccaacatcgtcgctctggaggatgtccacgagagcccttcccacctctacctggccatggaactgtgaggagggcctgggcaggctgtgggagccggggagggactgagcagtgagtggggctgaaggccaggctgagtgcctgggtcagccaaacccctggcacccccagggtgacgggtggcgagctgtttgaccgcatcatggagcgcggctcctacacagagaaggatgccagccatctggtgggtcaggtccttggcgccgtctcctacctgcacagcctggggatcgtgcaccgggacctcaaggtgcctggctggggcctctgcaccccaccctcccacctgcccacctggccctgcctttgttttcccgggagcacggctggggcctttcttgatctcctgctccaccaaggctctggggaacctgagagtgcctagtccccatcctgtcccagcaccggcaccgcgtcaggactgactggcccttttcccggtgtccgtgtgtcacagcccgaaaacctcctgtatgccacgccctttgaggactcgaagatcatggtctctgactttggactctccaaaatccaggctgggaacatgctaggcaccgcctgtgggacccctggatatgtgggtgagggacgacaccctgaggcttgctgggagtggggtggcctgggggaccctagacagccgggaaggctgttgtgcccgttgcctttgtgtgggccattcctgggcttgagtaggccgagccagtgacactgagcggcatggctgcgtgtgtgcctgtgcgtgcgtctgtctgtctctggcccccagccccagagctcttggagcagaaaccctacgggaaggccgtagatgtgtgggccctgggcgtcatctcctacatcctgctgtgtgggtacccccccttctacgacgagagcgaccctgagctcttcagccagatcctgagggccagctatgagtttgactctcctttctgggatgacatctcagaatcagccaaagacttcatccggcaccttctggagcgagacccccagaagaggttcacctgccaacaggccttgcggcacctttggatctctggggacacagccttcgacagggacatcttaggctctgtcagtgagcagatccggaagaactttgctcggacacactggaagcgagccttcaatgccacctcgttcctgcgccacatccggaagctggggcagatcccagagggcgagggggcctctgagcagggcatggcccgccacagccactcaggcctccgtgctggccagccccccaagtggtgatgcccaggcagatgccgaggccaagtggactgacccccagatttccttcccttggatgctttcggtcccctcccccaacccctccccctggggctggcctctgctggattttgagatttgagggtgtggcgcatggcgctggggttggaatggggcacccccaagtctgtccccaggctctgccctgcctgggggcagtggctcccctcccctgttgcctctcccgcccctgccccccccgccccgccaaaagccgagggggtgctggcaggcgggcctcaggggctgtctttcctgcacggctgttgtgtgcttcgctgagtgtgggtggtcctgcttgtgtcatggtcatggccttccagccccctccagttttccccaaaccaataaagaaagatacagcaaaaaaaaagtg

SEQ ID NO: 292836 - DNA, 1978 bp, Homo sapiens
cgcggggcgggggcgcaccggatccggcccgcggccgccgcagccttgcgcgtccgcagcacacctgtcacgcctggcgcgccccctgcccgcacgcgctcggtccacgcagctcgggacgcgggcggcccaggctgccaggtccccctgctccgcggcgccgagggctgggctgcgtctgcggccgcgtgggtggccgcggtcttggcaggtggctgcgcgcgggggtcgcagacatgctgctgctgaagaaacacacggaggacatcagcagcgtctacgagatccgcgagaggctcggctcgggtgccttctccgaggtggtgctggcccaggagcggggctccgcacacctcgtggccctcaagtgcatccccaagaaggccctccggggcaaggaggccctggtggagaacgagatcgcagtgctccgtaggatcagtcaccccaacatcgtcgctctggaggatgtccacgagagcccttcccacctctacctggccatggaactgtgaggagggcctgggcaggctgtgggagccggggagggactgagcagtgagtggggctgaaggccaggctgagtgcctgggtcagccaaacccctggcacccccagggtgacgggtggcgagctgtttgaccgcatcatggagcgcggctcctacacagagaaggatgccagccatctggtgggtcaggtccttggcgccgtctcctacctgcacagcctggggatcgtgcaccgggacctcaagcccgaaaacctcctgtatgccacgccctttgaggactcgaagatcatggtctctgactttggactctccaaaatccaggctgggaacatgctaggcaccgcctgtgggacccctggatatgtgggtgagggacgacaccctgaggcttgctgggagtggggtggcctgggggaccctagacagccgggaaggctgttgtgcccgttgcctttgtgtgggccattcctgggcttgagtaggccgagccagtgacactgagcggcatggctgcgtgtgtgcctgtgcgtgcgtctgtctgtctctggcccccagccccagagctcttggagcagaaaccctacgggaaggccgtagatgtgtgggccctgggcgtcatctcctacatcctgctgtgtgggtacccccccttctacgacgagagcgaccctgagctcttcagccagatcctgagggccagctatgagtttgactctcctttctgggatgacatctcagaatcagccaaagacttcatccggcaccttctggagcgagacccccagaagaggttcacctgccaacaggccttgcggcacctttggatctctggggacacagccttcgacagggacatcttaggctctgtcagtgagcagatccggaagaactttgctcggacacactggaagcgagccttcaatgccacctcgttcctgcgccacatccggaagctggggcagatcccagagggcgagggggcctctgagcagggcatggcccgccacagccactcaggcctccgtgctggccagccccccaagtggtgatgcccaggcagatgccgaggccaagtggactgacccccagatttccttcccttggatgctttcggtcccctcccccaacccctccccctggggctggcctctgctggattttgagatttgagggtgtggcgcatggcgctggggttggaatggggcacccccaagtctgtccccaggctctgccctgcctgggggcagtggctcccctcccctgttgcctctcccgcccctgccccccccgccccgccaaaagccgagggggtgctggcaggcgggcctcaggggctgtctttcctgcacggctgttgtgtgcttcgctgagtgtgggtggtcctgcttgtgtcatggtcatggccttccagccccctccagttttccccaaaccaataaagaaagatacagcaaaaaaaaagtg

SEQ ID NO: 292837 - DNA, 1518 bp, Homo sapiens
ggcggggcgcgggcggggggcttggcgctgcggccactgcgcggcacgacgctgcggcacccgctccagacatgctgctgctgaagaaacacacggaggacatcagcagcgtctacgagatccgcgagaggctcggctcgggtgccttctccgaggtggtgctggcccaggagcggggctccgcacacctcgtggccctcaagtgcatccccaagaaggccctccggggcaaggaggccctggtggagaacgagatcgcagtgctccgtaggatcagtcaccccaacatcgtcgctctggaggatgtccacgagagcccttcccacctctacctggccatggaactggtgacgggtggcgagctgtttgaccgcatcatggagcgcggctcctacacagagaaggatgccagccatctggtgggtcaggtccttggcgccgtctcctacctgcacagcctggggatcgtgcaccgggacctcaagcccgaaaacctcctgtatgccacgccctttgaggactcgaagatcatggtctctgactttggactctccaaaatccaggctgggaacatgctaggcaccgcctgtgggacccctggatatgtggccccagagctcttggagcagaaaccctacgggaaggccgtagatgtgtgggccctgggcgtcatctcctacatcctgctgtgtgggtacccccccttctacgacgagagcgaccctgagctcttcagccagatcctgagggccagctatgagtttgactctcctttctgggatgacatctcagaatcagccaaagacttcatccggcaccttctggagcgagacccccagaagaggttcacctgccaacaggccttgcggcacctttggatctctggggacacagccttcgacagggacatcttaggctctgtcagtgagcagatccggaagaactttgctcggacacactggaagcgagccttcaatgccacctcgttcctgcgccacatccggaagctggggcagatcccagagggcgagggggcctctgagcagggcatggcccgccacagccactcaggcctccgtgctggccagccccccaagtggtgatgcccaggcagatgccgaggccaagtggactgacccccagatttccttcccttggatgctttcggtcccctcccccaacccctccccctggggctggcctctgctggattttgagatttgagggtgtggcgcatggcgctggggttggaatggggcacccccaagtctgtccccaggctctgccctgcctgggggcagtggctcccctcccctgttgcctctcccgcccctgccccccccgccccgccaaaagccgagggggtgctggcaggcgggcctcaggggctgtctttcctgcacggctgttgtgtgcttcgctgagtgtgggtggtcctgcttgtgtcatggtcatggccttccagccccctccagttttccccaaaccaataaagaaagatacagcaaaaaaaaagtg

SEQ ID NO: 292838 - DNA, 1800 bp, Homo sapiens
ggcggggcgcgggcggggggcttggcgctgcggccactgcgcggcacgacgctgcggcacccgctccagacatgctgctgctgaagaaacacacggaggacatcagcagcgtctacgagatccgcgagaggctcggctcgggtgccttctccgaggtggtgctggcccaggagcggggctccgcacacctcgtggccctcaagtgcatccccaagaaggccctccggggcaaggaggccctggtggagaacgagatcgcagtgctccgtaggatcagtcaccccaacatcgtcgctctggaggatgtccacgagagcccttcccacctctacctggccatggaactggtgacgggtggcgagctgtttgaccgcatcatggagcgcggctcctacacagagaaggatgccagccatctggtgggtcaggtccttggcgccgtctcctacctgcacagcctggggatcgtgcaccgggacctcaagcccgaaaacctcctgtatgccacgccctttgaggactcgaagatcatggtctctgactttggactctccaaaatccaggctgggaacatgctaggcaccgcctgtgggacccctggatatgtgggtgagggacgacaccctgaggcttgctgggagtggggtggcctgggggaccctagacagccgggaaggctgttgtgcccgttgcctttgtgtgggccattcctgggcttgagtaggccgagccagtgacactgagcggcatggctgcgtgtgtgcctgtgcgtgcgtctgtctgtctctggcccccagccccagagctcttggagcagaaaccctacgggaaggccgtagatgtgtgggccctgggcgtcatctcctacatcctgtgagtgaccgctgggaaggcttgtctcctgcctgcctgcccctgctgggttggggagggtgggacagctggatgattcatctgtgggtgccaggctgtgtgggtacccccccttctacgacgagagcgaccctgagctcttcagccagatcctgagggccagctatgagtttgactctcctttctgggatgacatctcagaatcagccaaagacttcatccggcaccttctggagcgagacccccagaagaggttcacctgccaacaggccttgcggcacctttggatctctggggacacagccttcgacagggacatcttaggctctgtcagtgagcagatccggaagaactttgctcggacacactggaagcgagccttcaatgccacctcgttcctgcgccacatccggaagctggggcagatcccagagggcgagggggcctctgagcagggcatggcccgccacagccactcaggcctccgtgctggccagccccccaagtggtgatgcccaggcagatgccgaggccaagtggactgacccccagatttccttcccttggatgctttcggtcccctcccccaacccctccccctggggctggcctctgctggattttgagatttgagggtgtggcgcatggcgctggggttggaatggggcacccccaagtctgtccccaggctctgccctgcctgggggcagtggctcccctcccctgttgcctctcccgcccctgccccccccgccccgccaaaagccgagggggtgctggcaggcgggcctcaggggctgtctttcctgcacggctgttgtgtgcttcgctgagtgtgggtggtcctgcttgtgtcatggtcatggccttccagccccctccagttttccccaaaccaataaagaaagatacagcaaaaaaaaagtg

SEQ ID NO: 292839 - DNA, 1525 bp, Homo sapiens
ggagccttctggaaagcggccggatgtgtggaggcagagaggcagcatccaggcgctggtcgccttcggggtgcggacatgctgctgctgaagaaacacacggaggacatcagcagcgtctacgagatccgcgagaggctcggctcgggtgccttctccgaggtggtgctggcccaggagcggggctccgcacacctcgtggccctcaagtgcatccccaagaaggccctccggggcaaggaggccctggtggagaacgagatcgcagtgctccgtaggatcagtcaccccaacatcgtcgctctggaggatgtccacgagagcccttcccacctctacctggccatggaactggtgacgggtggcgagctgtttgaccgcatcatggagcgcggctcctacacagagaaggatgccagccatctggtgggtcaggtccttggcgccgtctcctacctgcacagcctggggatcgtgcaccgggacctcaagcccgaaaacctcctgtatgccacgccctttgaggactcgaagatcatggtctctgactttggactctccaaaatccaggctgggaacatgctaggcaccgcctgtgggacccctggatatgtggccccagagctcttggagcagaaaccctacgggaaggccgtagatgtgtgggccctgggcgtcatctcctacatcctgctgtgtgggtacccccccttctacgacgagagcgaccctgagctcttcagccagatcctgagggccagctatgagtttgactctcctttctgggatgacatctcagaatcagccaaagacttcatccggcaccttctggagcgagacccccagaagaggttcacctgccaacaggccttgcggcacctttggatctctggggacacagccttcgacagggacatcttaggctctgtcagtgagcagatccggaagaactttgctcggacacactggaagcgagccttcaatgccacctcgttcctgcgccacatccggaagctggggcagatcccagagggcgagggggcctctgagcagggcatggcccgccacagccactcaggcctccgtgctggccagccccccaagtggtgatgcccaggcagatgccgaggccaagtggactgacccccagatttccttcccttggatgctttcggtcccctcccccaacccctccccctggggctggcctctgctggattttgagatttgagggtgtggcgcatggcgctggggttggaatggggcacccccaagtctgtccccaggctctgccctgcctgggggcagtggctcccctcccctgttgcctctcccgcccctgccccccccgccccgccaaaagccgagggggtgctggcaggcgggcctcaggggctgtctttcctgcacggctgttgtgtgcttcgctgagtgtgggtggtcctgcttgtgtcatggtcatggccttccagccccctccagttttccccaaaccaataaagaaagatacagcaaaaaaaaagtg

SEQ ID NO: 292840 - DNA, 2021 bp, Homo sapiens
caggcagatatctgatcgaagaacattccaggcaggggagcaaaggctagggccgtcaggaggccagtgtggccggggaagaggtggaggaggaggggccagggcagtcgttaggccgccccctaaggactcatgctttgacttggattgacatagagagctgcaggagggtgacatgatctcaataaaaggaatgctctggctgctgggtagagaagaaagcgagggtgagggattaatggtggagccagagggagcccagtgagtgccgggagcccagggtggcagagctgtggtgcagggttgcagggtcctggagctaggcatggaggctgctttcgggcaagtggccgggtcagcctgtcctcggagaggcggtgaaggcagagactggaaggcagagagccttgccgacctgtggccgaagagctctccgggagacagccaccggtggtgcaaaggccctggggccggcccagccgggccgcagctccgggaggcggcgcgagcgagcagtgggctgggcggtggcggccggcacccgagccggatcccggcgattgccttacaagacatgctgctgctgaagaaacacacggaggacatcagcagcgtctacgagatccgcgagaggctcggctcgggtgccttctccgaggtggtgctggcccaggagcggggctccgcacacctcgtggccctcaagtgcatccccaagaaggccctccggggcaaggaggccctggtggagaacgagatcgcagtgctccgtaggatcagtcaccccaacatcgtcgctctggaggatgtccacgagagcccttcccacctctacctggccatggaactggtgacgggtggcgagctgtttgaccgcatcatggagcgcggctcctacacagagaaggatgccagccatctggtgggtcaggtccttggcgccgtctcctacctgcacagcctggggatcgtgcaccgggacctcaagcccgaaaacctcctgtatgccacgccctttgaggactcgaagatcatggtctctgactttggactctccaaaatccaggctgggaacatgctaggcaccgcctgtgggacccctggatatgtggccccagagctcttggagcagaaaccctacgggaaggccgtagatgtgtgggccctgggcgtcatctcctacatcctgctgtgtgggtacccccccttctacgacgagagcgaccctgagctcttcagccagatcctgagggccagctatgagtttgactctcctttctgggatgacatctcagaatcagccaaagacttcatccggcaccttctggagcgagacccccagaagaggttcacctgccaacaggccttgcggcacctttggatctctggggacacagccttcgacagggacatcttaggctctgtcagtgagcagatccggaagaactttgctcggacacactggaagcgagccttcaatgccacctcgttcctgcgccacatccggaagctggggcagatcccagagggcgagggggcctctgagcagggcatggcccgccacagccactcaggcctccgtgctggccagccccccaagtggtgatgcccaggcagatgccgaggccaagtggactgacccccagatttccttcccttggatgctttcggtcccctcccccaacccctccccctggggctggcctctgctggattttgagatttgagggtgtggcgcatggcgctggggttggaatggggcacccccaagtctgtccccaggctctgccctgcctgggggcagtggctcccctcccctgttgcctctcccgcccctgccccccccgccccgccaaaagccgagggggtgctggcaggcgggcctcaggggctgtctttcctgcacggctgttgtgtgcttcgctgagtgtgggtggtcctgcttgtgtcatggtcatggccttccagccccctccagttttccccaaaccaataaagaaagatacagcaaaaaaaaagtg

SEQ ID NO: 292841 - DNA, 2178 bp, Homo sapiens
caggcagatatctgatcgaagaacattccaggcaggggagcaaaggctagggccgtcaggaggccagtgtggccggggaagaggtggaggaggaggggccagggcagtcgttaggccgccccctaaggactcatgctttgacttggattgacatagagagctgcaggagggtgacatgatctcaataaaaggaatgctctggctgctgggtagagaagaaagcgaggacatgctgctgctgaagaaacacacggaggacatcagcagcgtctacgagatccgcgagaggctcggctcgggtgccttctccgaggtggtgctggcccaggagcggggctccgcacacctcgtggccctcaagtgcatccccaagaaggccctccggggcaaggaggccctggtggagaacgagatcgcagtgctccgtaggatcagtcaccccaacatcgtcgctctggaggatgtccacgagagcccttcccacctctacctggccatggaactgtgaggagggcctgggcaggctgtgggagccggggagggactgagcagtgagtggggctgaaggccaggctgagtgcctgggtcagccaaacccctggcacccccagggtgacgggtggcgagctgtttgaccgcatcatggagcgcggctcctacacagagaaggatgccagccatctggtgggtcaggtccttggcgccgtctcctacctgcacagcctggggatcgtgcaccgggacctcaaggtgcctggctggggcctctgcaccccaccctcccacctgcccacctggccctgcctttgttttcccgggagcacggctggggcctttcttgatctcctgctccaccaaggctctggggaacctgagagtgcctagtccccatcctgtcccagcaccggcaccgcgtcaggactgactggcccttttcccggtgtccgtgtgtcacagcccgaaaacctcctgtatgccacgccctttgaggactcgaagatcatggtctctgactttggactctccaaaatccaggctgggaacatgctaggcaccgcctgtgggacccctggatatgtgggtgagggacgacaccctgaggcttgctgggagtggggtggcctgggggaccctagacagccgggaaggctgttgtgcccgttgcctttgtgtgggccattcctgggcttgagtaggccgagccagtgacactgagcggcatggctgcgtgtgtgcctgtgcgtgcgtctgtctgtctctggcccccagccccagagctcttggagcagaaaccctacgggaaggccgtagatgtgtgggccctgggcgtcatctcctacatcctgctgtgtgggtacccccccttctacgacgagagcgaccctgagctcttcagccagatcctgagggccagctatgagtttgactctcctttctgggatgacatctcagaatcagccaaagacttcatccggcaccttctggagcgagacccccagaagaggttcacctgccaacaggccttgcggcacctttggatctctggggacacagccttcgacagggacatcttaggctctgtcagtgagcagatccggaagaactttgctcggacacactggaagcgagccttcaatgccacctcgttcctgcgccacatccggaagctggggcagatcccagagggcgagggggcctctgagcagggcatggcccgccacagccactcaggcctccgtgctggccagccccccaagtggtgatgcccaggcagatgccgaggccaagtggactgacccccagatttccttcccttggatgctttcggtcccctcccccaacccctccccctggggctggcctctgctggattttgagatttgagggtgtggcgcatggcgctggggttggaatggggcacccccaagtctgtccccaggctctgccctgcctgggggcagtggctcccctcccctgttgcctctcccgcccctgccccccccgccccgccaaaagccgagggggtgctggcaggcgggcctcaggggctgtctttcctgcacggctgttgtgtgcttcgctgagtgtgggtggtcctgcttgtgtcatggtcatggccttccagccccctccagttttccccaaaccaataaagaaagatacagcaaaaaaaaagtg

SEQ ID NO: 292842 - DNA, 1545 bp, Homo sapiens
ggctgaggcctgcctggcagggggtggaggaggaagctgcccttgcccccggcggggcggggagagacccccatcacctctcccctgcccctgcagacatgctgctgctgaagaaacacacggaggacatcagcagcgtctacgagatccgcgagaggctcggctcgggtgccttctccgaggtggtgctggcccaggagcggggctccgcacacctcgtggccctcaagtgcatccccaagaaggccctccggggcaaggaggccctggtggagaacgagatcgcagtgctccgtaggatcagtcaccccaacatcgtcgctctggaggatgtccacgagagcccttcccacctctacctggccatggaactggtgacgggtggcgagctgtttgaccgcatcatggagcgcggctcctacacagagaaggatgccagccatctggtgggtcaggtccttggcgccgtctcctacctgcacagcctggggatcgtgcaccgggacctcaagcccgaaaacctcctgtatgccacgccctttgaggactcgaagatcatggtctctgactttggactctccaaaatccaggctgggaacatgctaggcaccgcctgtgggacccctggatatgtggccccagagctcttggagcagaaaccctacgggaaggccgtagatgtgtgggccctgggcgtcatctcctacatcctgctgtgtgggtacccccccttctacgacgagagcgaccctgagctcttcagccagatcctgagggccagctatgagtttgactctcctttctgggatgacatctcagaatcagccaaagacttcatccggcaccttctggagcgagacccccagaagaggttcacctgccaacaggccttgcggcacctttggatctctggggacacagccttcgacagggacatcttaggctctgtcagtgagcagatccggaagaactttgctcggacacactggaagcgagccttcaatgccacctcgttcctgcgccacatccggaagctggggcagatcccagagggcgagggggcctctgagcagggcatggcccgccacagccactcaggcctccgtgctggccagccccccaagtggtgatgcccaggcagatgccgaggccaagtggactgacccccagatttccttcccttggatgctttcggtcccctcccccaacccctccccctggggctggcctctgctggattttgagatttgagggtgtggcgcatggcgctggggttggaatggggcacccccaagtctgtccccaggctctgccctgcctgggggcagtggctcccctcccctgttgcctctcccgcccctgccccccccgccccgccaaaagccgagggggtgctggcaggcgggcctcaggggctgtctttcctgcacggctgttgtgtgcttcgctgagtgtgggtggtcctgcttgtgtcatggtcatggccttccagccccctccagttttccccaaaccaataaagaaagatacagcaaaaaaaaagtg

SEQ ID NO: 292843 - DNA, 2155 bp, Homo sapiens
aggggggtggaggcgcccggcccggccaccgagcggcagcggcggacgaggggcggccccgacccccgcgtgcccgggggccacccgttgcccggacttcacccctccgcggcggctccgggggtcgggcgggggccggcggcctgctgggggaggaggccgcggcgggcgggggaactcacctccgccgttcttgtagcacagacatgctgctgctgaagaaacacacggaggacatcagcagcgtctacgagatccgcgagaggctcggctcgggtgccttctccgaggtggtgctggcccaggagcggggctccgcacacctcgtggccctcaagtgcatccccaagaaggccctccggggcaaggaggccctggtggagaacgagatcgcagtgctccgtaggatcagtcaccccaacatcgtcgctctggaggatgtccacgagagcccttcccacctctacctggccatggaactgtgaggagggcctgggcaggctgtgggagccggggagggactgagcagtgagtggggctgaaggccaggctgagtgcctgggtcagccaaacccctggcacccccagggtgacgggtggcgagctgtttgaccgcatcatggagcgcggctcctacacagagaaggatgccagccatctggtgggtcaggtccttggcgccgtctcctacctgcacagcctggggatcgtgcaccgggacctcaaggtgcctggctggggcctctgcaccccaccctcccacctgcccacctggccctgcctttgttttcccgggagcacggctggggcctttcttgatctcctgctccaccaaggctctggggaacctgagagtgcctagtccccatcctgtcccagcaccggcaccgcgtcaggactgactggcccttttcccggtgtccgtgtgtcacagcccgaaaacctcctgtatgccacgccctttgaggactcgaagatcatggtctctgactttggactctccaaaatccaggctgggaacatgctaggcaccgcctgtgggacccctggatatgtgggtgagggacgacaccctgaggcttgctgggagtggggtggcctgggggaccctagacagccgggaaggctgttgtgcccgttgcctttgtgtgggccattcctgggcttgagtaggccgagccagtgacactgagcggcatggctgcgtgtgtgcctgtgcgtgcgtctgtctgtctctggcccccagccccagagctcttggagcagaaaccctacgggaaggccgtagatgtgtgggccctgggcgtcatctcctacatcctgctgtgtgggtacccccccttctacgacgagagcgaccctgagctcttcagccagatcctgagggccagctatgagtttgactctcctttctgggatgacatctcagaatcagccaaagacttcatccggcaccttctggagcgagacccccagaagaggttcacctgccaacaggccttgcggcacctttggatctctggggacacagccttcgacagggacatcttaggctctgtcagtgagcagatccggaagaactttgctcggacacactggaagcgagccttcaatgccacctcgttcctgcgccacatccggaagctggggcagatcccagagggcgagggggcctctgagcagggcatggcccgccacagccactcaggcctccgtgctggccagccccccaagtggtgatgcccaggcagatgccgaggccaagtggactgacccccagatttccttcccttggatgctttcggtcccctcccccaacccctccccctggggctggcctctgctggattttgagatttgagggtgtggcgcatggcgctggggttggaatggggcacccccaagtctgtccccaggctctgccctgcctgggggcagtggctcccctcccctgttgcctctcccgcccctgccccccccgccccgccaaaagccgagggggtgctggcaggcgggcctcaggggctgtctttcctgcacggctgttgtgtgcttcgctgagtgtgggtggtcctgcttgtgtcatggtcatggccttccagccccctccagttttccccaaaccaataaagaaagatacagcaaaaaaaaagtg

SEQ ID NO: 292844 - DNA, 734 bp, Homo sapiens
  misc_feature (200)..(200): n is a, c, g, or t
tttagagtccactacatacaaggtttttcactctgcattgctatgttaaaatgtgggcagagatgtgcctcagtagttaattgggccaccatgcttgttggatataaataagaccattcacttacttagccttaagtaatgcagataaatgggacaccagatggaattcatgtagtgaaattcatgcagatactgtattntatgatatgcctctttcaggggtttaatgatcatgccgccttatacttttataatgcttcgtaagtttaacaagtacagcagatattgctgatttcccacccactgcccattctccccttctttcttattcgtagaaccttgattttgttcagggaggcaatatgctcagctaaaaatatttcccagtttcccttgtaggtaggaatgatcatgtgacagccaatgagatgtaaatggaattctgctggggatatctgggtaagttttatatatctgatataggcagaactttttcttgcctgttttgtcctttttctttcctttttttttttctggctggtctgcagattgagtatggaagtggggcctctaccttgtgactgagagggagccagggagtaaaagctgcttgcagaaagaggagccagggatattgatgacatcatgaagccacttcatcagcgtggaccactggtctccagaatacctatgatgtgggaacaataaacacttacttgtttaagctgttaaaa

SEQ ID NO: 292845 - DNA, 758 bp, Homo sapiens
acttgtcctcagcttcagatagaatctccttcccctccctcgtttccatttttccagtctctttcctgaaaggcagctaaactgggtgggagcaatttttgcctccttggtaataacctgggggatgttttctcacatgtaaatctcagcctgttaggtgtccaggagtgaaacacatctttgtattctaaaggcagaaaccaaacagggcagtggaagaaaaagcacactactctcttcaactttgaacacaggaagaagcaactccttcaggacttgaaggcatttggtttttcattcctcttcagttaaaatggggaaccttgaagcagagaccaatgttttggtgctgaggctggttcagaaaaaggatttttaaaaaaagtatgtaatttttaaaagttctgatgattagaacacagacctcaggaaagtagcgtgaacatactgctggcgatggtagcagcttcgttggtttagcaaagtgacagaagtatctatttggagtgtttttctgaccctgacacggtatgtggaggtggatgaaagcagcgaagtttcatctgagaaccattgagtatggaagtggggcctctaccttgtgactgagagggagccagggagtaaaagctgcttgcagaaagaggagccagggatattgatgacatcatgaagccacttcatcagcgtggaccactggtctccagaatacctatgatgtgggaacaataaacacttacttgtttaagctgttaaaa

SEQ ID NO: 292846 - DNA, 177 bp, Homo sapiens
ctaggacaagcaagggtaaacagggatgagtgtgggtgggcccactcggaccccaccccggcctctgggtcagaaactggaagctggggtggaggatggaaagatggaggggtccggaggatggaggggcctgcacagctgtctcggggtgggggcgaggggaaggttcgcgctgga

SEQ ID NO: 292847 - DNA, 657 bp, Homo sapiens
agcaacagtttgcgtggaggccactcggtctccacagccacaaatgaagcccggcgctgcaagtcccggtccaggaagagcagcaccggcgtgggcaccacccggcctgacgcatcggccgccaaaacccagtctccgcggtgcagttcccgcagccctttccgctcgccgctccacaggcgcacagttgcatttcccggaaagcagccgcccgcccggaccgccaatgcagcccagaagggcgtgggagtagcacctgagaataacggtctccttgtgcggatctggggagccccctgcagggtggcaaccagaggaaagggccacaatgttccacggccaaggaggaaagaaggaatgccccttttcccatctctaggtaggaggaaggcttcagggcagaagcaaaaggaattatttcttccctggacaggttttcctaacaaagtaacctggaaaactatggcaattaatcagaggaaatccgtacccctccctctccccccacctccccactccatacacaattaggtggtgtaatggaaagtatatagggcttagaatcaggagtcctgaattctagtcccagccatgccactttaaattgtgagagtttaaattgcttttcctcctgggggaagtccagctctcagatgt

SEQ ID NO: 292848 - DNA, 540 bp, Homo sapiens
ttttttttttggtgacagagtcttgctctgtcgcccaggctggaatgtagtggaggttgcagtgagccaagatcacaccattgcactccagtctgggcaacaagagcaaaactttttctcaaaaatactaataagttatgttcaactcttctatatctttaataatttcttttgtctgcttgacctataatggcaaaacatgcatgaaaacctcccactataagagtaatctttttcatttctccctgtagttctatttttctttctgcattttgaggctattttattgggcacatactgtacaagttagaattgctatctcttcctggtagaattgaaagcttttaaagtaatatgggagataaattgcaaaaattgcctgaattttccactcactcctccctgtagccacaccttttgcaatgtgacttggcagctcctcccagaatctcagctggattttaactcaccttggcctaaagaaaatgacagaagtgataaagtcctcagcctgagccttaagaaaccttaaacgcttcc

SEQ ID NO: 292849 - DNA, 2089 bp, Homo sapiens
  misc_feature (1426)..(1427): n is a, c, g, or t
  misc_feature (1864)..(1864): n is a, c, g, or t
  misc_feature (1894)..(1894): n is a, c, g, or t
aattccggcgacctgccggcgccctccccacctcgctgcagcccccagttccccagcatcggccaggagccccccgagatgaacctctactatgagaacttcttccacccacagggcgtgcccagccctcagcggccctccttcgaggggggcggcgagtatggggccacccccaacccctacctctggttcaacgggcccaccatgaccccgccaccctacctgcccggccccaacgccagccccttcctgccccaggcctatggagtgcagaggccgctgctgcccagcgtgtcggggcttggggggagcgacctgggctggctgcccatcccctcgcaggaggagctgatgaagctggtgcggccaccctattcctactcggctctcatcgccatggccatccacggggcacccgacaagcgcctcactctcagccagatctaccagtacgtggccgacaacttccccttctacaacaagagcaaggccggctggcagaactccatccgccacaacctgtcgctcaacgactgcttcaagaaggtgccccgcgacgaggacgacccgggcaaagggaattactggaccctggaccccaactgtgagaaaatgttcgacaatggaaatttccgcaggaaaaggaagagaaaatcagatgtttcctctagcacagcctccttggccttagagaagacagagagcagtctcccggtggacagccccaagaccacggagcctcaggacatcttggatggagcctcaccagggggcaccaccagctccccagagaagcggccctcccctcccccatcaggcgccccttgccttaacagcttcctttcctctatgacagcctatgtgagcggggggagccccacgagccaccccttggtcacaccaggactgagccctgagcccagtgacaagacggggcagaactcactgaccttcaactccttctccccgctcaccaacctcagcaaccacagcggtgggggtgactgggcgaaccccatgcccaccaacatgctcagctacggaggatctgtgctcagccaattcagccctcacttctacaacagtgtcaacaccagtggtgtcctctaccccagggagggcaccgaggtctaggtacagaacagctcctgagccaggtggacatgccagagagaaaagcagtagaggtcctccatgccagccccacggtggtccatgactgcggaactgcccagacataagcaggagcctccgaggaatccaccctctttctagaacactggttaaggcttctgtttatcacacataggcccacacacagactcaccaactttgcaatagaaatactggtgcctgcagagcagcactaacagtggcaggtgctgtactaggctctgtactggccacacttactattgacagtcannccgtaaggttcacaaaccaccccattgaacagatgaggaactgaggctcaaggaggttaagtaacatttccagggttatataaactagtaaatggcagagctaagagtcaaatccaggtctatgtgatcctcagagattggaggccaggatggagaattggttgagtagccaaggaaggtcagtgtgaaaagcttgctatggcaaatatagcgaaatctctccactgccttctgtccaccagcatttagtgccagcctaggcacaacttgtcctggtccaagtccttattctgcttgccccaacttacctgcagacactccttttgctaccactcaaggaaggaagtcaccagtggccttagtgcaggaaactcagccctggtggccctgcagaacaatgcatctgacatgtgcgatgcatccccatggagagacangcattgctccccagccctccagaaaccttngagactctgcggtaggacagaatgctgttctggggggcacaggatctctttgtggggagggaatcagaggaggaaatctgaagtgaagacaggtgggctggggctagtgacaaggatgagatgggagaggtaggggagaaggagtggggcactttgtacccccatgaatccagagcagactccagacattctttt

SEQ ID NO: 292850 - DNA, 2677 bp, Homo sapiens
gtatatggtgagagatagggttcaggttcattaatgcatatggatatccagttttcccagctggtacctccctaggttacatgccatcccagcccactagctctaatcccagccccagccctaagagttgcctaggagttgttgtccttgtgtcctagactacctttcaggtttacctagcaccctggagcactttagcccatggtagtgagacttgccaagaaattcagattcttattgccgggatggatgagtcctctttggctaggtctggtccaaaggctccttcagtgcatgggtgctggctgagtacagcatggctttgctgtccactgtgacagagcagcactgagttcaatgtaaagtcccctagttactgcgctgtcccttcctaaagtgcacagactctgtccatgttgtggggccagattagggaggtgtgctgtcagggatttaaggctgtctctgctaccctcgtcaatgcctctttcagtgatacaaagtcaaaaccaggtagtatgaatgctcacttgatatttggttcttgtgatgatgcttttctgtgtgcagatagtcgttaaaatttggtgttcctgctggggatgggatgaacagtgtagggttctattctaccattttgctccacccagctatgtgttctagtaatttaatttttctactagctgtggaatggctactttatagaggttctataacacacatttctcaataatttgatttggtagtctaaccatgttagtgcattcctcattctttgtaacttctctatagtgtttctctgtatgaatataccacagatgtattaccaattccttactgattgatatttaggttgtttctagaaacagaactttagttaacaccttgtgtaccttcacaggccatcttttgacatttatgatagtggttttttaggtgatacctacccaatggaatggttggtttataggatgcacagtaatggataatataagattgctcactaaataactgttataatttactccctggtaatttatgagagtattaccaacaacatcttaatttcttcagctttaaaaattcgttatatagaaaatgatatctagttttaatttgcatctttttgattattcattaacttcatctttttatataattgttagctatatctattaactgtttaagtgagttgtctgtatcttttcctattttattgttgtctttttaaaaatattcatttgaaggtgcatgaatattgtgcattctagacactaattttgcattgtatgtaagaagtcttttcttacagtctgttgcttgtgttatgcatacatatatcaagtttgaattttttttttttttttttttttttttggcggagcctctctctgtcgcccaggctggagtgcagtggcaccatctcgcctcactgcaagctccacctcccgggttcacgtcattctcctgcctcagcctcctgagtacctgggactacaggtgctcgccactaacagagatggggtttcaccatgttagccaggatggtcttgatctcctgacctcgtgatccgtccgcctcggcctctgaaagtgctgggattacaggcgtgagccacctcgcccggccaagtttgatgtttttatgtactcaaatttattggtattctatggcttctgcatttttttctttattatttttatgcctgtgacacagcctcaggaggttctgaggacatgttcccctctttttgagacaaggtctcactctatcacccaggctggaatgcggtggcacaatttcggctcattgccacctccgcctcccaggctcaagtaatcctcccacctcagcctcctgagtacctgggactacaggtgcaagccaccgcgcatagctaagttttaatttattttttgtagatatgaggtttcactttgttgcccaaggtgatctcacactcctgggctcaggaggattgcttgagcccacacgatggagaggtagcactgagctgagatagcaccatggcaccccagcctgggcaacagagccaggctttgtcttaaacaaacaaagaacatggtttgtccatttagatttccttttatgccctttagcaagttttatttttttttccataaagttcttgaacattttgtggtggttaaatttattattttacttatttttacatatagctattagagaggatctttattttttagttctcatatgttttctagttagttactactagagtaacctatcatcctagtttatacctgctacatgccatccatttattcccattgtcctggtttggataataaattaaatcgtgtggccttagttattaacaattttatcatttaggatttcattcagtttcaactaataaaacctcactagtggattgttaacaaataagaggtatatttatctcataacagaaatctgcatgtaggtggtccagtgctcgtgcaacagctccataatatcttcaggaacctcgccttgtcttccagcactactgtctgtagaatgtgtctttcatcctcatttgtaagatggtttctgcaccttctggcatcttttctatcttcgagacatacaggaataaaaatgcagagcaaaatgagtttttgttttcttttctggaaagagtgagttccc

SEQ ID NO: 292851 - DNA, 928 bp, Homo sapiens
caacactaagtctttctatcaaaaaacatagttcgttggctggtggctcttgcctgttatcctagcattttgagaggctgaggtgggcagataacttgagctcaggagtttgagaccagcgtggggcaatacgatgaaaccctgtctctactaaaaatacaaaaattagctgggtgcggtggtgcatgcatgtagtcccagctactcaggaggaggctgaggcaggaggattgcttgagcccacacgatggagaggtagcactgagctgagatagcaccatggcaccccagcctgggcaacagagccaggctttgtcttaaacaaacaaagaacatggtttgtccatttagatttccttttatgccctttagcaagttttatttttttttccataaagttcttgaacattttgtggtggttaaatttattattttacttatttttacatatagctattagagaggatctttattttttagttctcatatgttttctagttagttactactagagtaacctatcatcctagtttatacctgctacatgccatccatttattcccattgtcctggtttggataataaattaaatcgtgtggccttagttattaacaattttatcatttaggatttcattcagtttcaactaataaaacctcactagtggattgttaacaaataagaggtatatttatctcataacagaaatctgcatgtaggtggtccagtgctcgtgcaacagctccataatatcttcaggaacctcgccttgtcttccagcactactgtctgtagaatgtgtctttcatcctcatttgtaagatggtttctgcaccttctggcatcttttctatcttcgagacatacaggaataaaaatgcagagcaaaatgagtttttgttttcttttctggaaagagtgagttccc

SEQ ID NO: 292852 - DNA, 1751 bp, Homo sapiens
ctcttcaagcaattcaaaaacagctggctactatccaaatcctccactggtcttatcaagtgatgagacactgatatccaaataagttgtctttactgaaaaatgaagtgaagacccatatatgcagttaaaaaaaagttaattttcaaaaaatactgtaaaagactttaaggaacaagttttattgaccaataagttgatatttgtccataggtctcctttctataaatcatcttgatgtttaacaactcttattatattaaaatctcagtatcctaaaacttagaaccttattgatattttctatacagtagttttgtgattagaattcacctggggacacacactcacacgcacagtcactcttacacatatgcctagtccagtggttctcaaagtgtgatccatagactaatagcatagcattacctgagaacttgataatgcatatttgcaggccccacgcaaaacctgctgaatcagaagctctgagagtaaggcctaccaatctggtttaacaagcccgtcaggtgattctgatttacagtacagtttgagacccactggctagaacatatcctccagagacttggcttaattggtctgggtaaatatggctgagcgttgttatcttttgttatcttttatatgccctaggaaagtacaaccagaattgaaaaccaactgatctataccagttctttcaattaatagtcaagaacattgagtccagtgagattaagtgatttttgcaggctatgaggttttatgctattcctgtgttctccaaaacaagaaaataaaaagacatgacttattctctgttcatacagcaagtatggaaaaaagatgatctagaagtcaactatctcaacctccattgttacccactaggtttttttctaataatgttaaaggctatttaatttatttaatcaactttaagcattacattctcaattggggacaaaaattggttcttggggtgaaaaaatattagatatggcttgtggacttccaatatcatcctatccaacaaaatcttattccttagtattaatttatctcattgggaagaaatttgtagttaaaactatttaatgtaatttgaatttaatttctgtaattgggaaggagggtaataatgaacaaaaagtttgagaaaaaaatgctttaatgggttttacaggcatgctacaatccaggactgtggtgttctatgtgccgtgtatggtcatattagtagctatttgttgcaagatacttgaagccaaatgtttgcagtataggttcctggctactgtttatgctgtgatttcactctgtctatcatgggcagtattagaaaacacactggttttcactatctggtttacaaacactatcattattttacctggattgaagtgcagaatttggcatatcgatgcatgcaatggaaagaaaaaaaatttgttaaaatttgtaaatgttcagctaaatctcagatatactgtgggatgagtatctcagggtaagtaacaaaaaaacaaacaaaaaaaatcactgaaatttttccctcacagtcagtagctttgtttgatatttaacaataagtatatggtgatatacttgaaatttatgtccagaatgtcactggaatattacaatgagcataaataatcaagcttaggactaaatgaaagatactatctcatgtatgctttaaatagagaatttatttcttttaaaaataaagctatttttcctta

SEQ ID NO: 292853 - DNA, 1630 bp, Homo sapiens
ctcttcaagcaattcaaaaacagctggctactatccaaatcctccactggtcttatcaagtgatgagacactgatatccaaataagttgtctttactgaaaaatgaagtgaagacccatatatgcagttaaaaaaaagttaattttcaaaaaatactgtaaaagactttaaggaacaagttttattgaccaataagttgatatttgtccataggtctcctttctataaatcatcttgatgtttaacaactcttattatattaaaatctcagtatcctaaaacttagaaccttattgatattttctatacagtagttttgtgattagaattcacctggggacacacactcacacgcacagtcactcttacacatatgcctagtccagtggttctcaaagtgtgatccatagactaatagcatagcattacagtttgagacccactggctagaacatatcctccagagacttggcttaattggtctgggtaaatatggctgagcgttgttatcttttgttatcttttatatgccctaggaaagtacaaccagaattgaaaaccaactgatctataccagttctttcaattaatagtcaagaacattgagtccagtgagattaagtgatttttgcaggctatgaggttttatgctattcctgtgttctccaaaacaagaaaataaaaagacatgacttattctctgttcatacagcaagtatggaaaaaagatgatctagaagtcaactatctcaacctccattgttacccactaggtttttttctaataatgttaaaggctatttaatttatttaatcaactttaagcattacattctcaattggggacaaaaattggttcttggggtgaaaaaatattagatatggcttgtggacttccaatatcatcctatccaacaaaatcttattccttagtattaatttatctcattgggaagaaatttgtagttaaaactatttaatgtaatttgaatttaatttctgtaattgggaaggagggtaataatgaacaaaaagtttgagaaaaaaatgctttaatgggttttacaggcatgctacaatccaggactgtggtgttctatgtgccgtgtatggtcatattagtagctatttgttgcaagatacttgaagccaaatgtttgcagtataggttcctggctactgtttatgctgtgatttcactctgtctatcatgggcagtattagaaaacacactggttttcactatctggtttacaaacactatcattattttacctggattgaagtgcagaatttggcatatcgatgcatgcaatggaaagaaaaaaaatttgttaaaatttgtaaatgttcagctaaatctcagatatactgtgggatgagtatctcagggtaagtaacaaaaaaacaaacaaaaaaaatcactgaaatttttccctcacagtcagtagctttgtttgatatttaacaataagtatatggtgatatacttgaaatttatgtccagaatgtcactggaatattacaatgagcataaataatcaagcttaggactaaatgaaagatactatctcatgtatgctttaaatagagaatttatttcttttaaaaataaagctatttttcctta

SEQ ID NO: 292854 - DNA, 1800 bp, Homo sapiens
ctcttcaagcaattcaaaaacagctggctactatccaaatcctccactggtcttatcaagtgatgagacactgatatccaaataagttgtctttactgaaaaatgaagtgaagacccatatatgcagttaaaaaaaagttaattttcaaaaaatactgtaaaagactttaaggaacaagttttattgaccaataagttgatatttgtccataggtctcctttctataaatcatcttgatgtttaacaactcttattatattaaaatctcagtatcctaaaacttagaaccttattgatattttctatacagtagttttgtgattagaattcacctggggacacacactcacacgcacagtcactcttacacatatgcctagtccagtggttctcaaagtgtgatccatagactaatagcatagcattacctgagaacttgataatgcatatttgcaggccccacgcaaaacctgctgaatcagaagctctgagagtaaggcctaccaatctggtttaacaagcccgtcaggtgattctgatttacagtacagtttgagacccactggctagaacatatcctccagagacttggcttaattggtctgggtaaatatggctgagcgttgttatcttttgttatcttttatatgccctaggaaagtacaaccagaattgaaaaccaactgatctataccagttctttcaattaatagtcaagaacattgagtccagtgagattaagtgatttttgcaggctatgaggttttatgctattcctgtgttctccaaaacaagaaaataaaaagacatgacttattctctgttcatacagcaagtatggaaaaaagatgatctagaagtcaactatctcaacctccattgttacccactaggtttttttctaataatgttaaaggctatttaatttatttaatcaactttaagcattacattctcaattggggacaaaaattggttcttggggtgaaaaaatattagatatggcttgtggacttccaatatcatcctatccaacaaaatcttattccttagtattaatttatctcattgggaagaaatttgtagttaaaactatttaatgtaatttgaatttaatttctgtaattgggaaggagggtaataatgaacaaaaagtttgagaaaaaaatgctttaatgggttttacaggcatgctacaatccaggactgtggtgttctatgtgccgtgtatggtcatattagtagctatttgttgcaagatacttgaagccaaatgtttgcagtataggttcctggctactgtttatgctgtgatttcactctgtctatcatgggcagtattagaaaacacactggttttcactatctggtttacaaacactatcattattttacctggattgaagtgcagaatttggcatatcgatgcatgcaatggaaagaaaaaaaatttgttaaaatttgtaaatgttcagctaaatctcagatatactgtgggatgagtatctcagggtaagtaacaaaaaaacaaacaaaaaaaatcactgaaatttttccctcacagtcagtagctttgtttgatatttaacaataagtatatggtgatatacttgaaatttatgtccagaatgtcactggaatattacaatgagcataaataatcaagcttaggactaaatgaaagatactatctcatgtatgctttaaatagagaatttatttcttttaaaaataaagctatttttccttatccatgtttactctgtaaatggcaaataatacatctttaaatgcttatg

SEQ ID NO: 292855 - DNA, 441 bp, Homo sapiens
attgattgtcctcatcctgcaactgtacttgcccaaccgatatttattgatgcctgcagtgtcctgggtgcctaccaaggggcacagaactggatccgacgcagaccctgcctgccttcaggttgcttgaagatgaacagagagatcggacctctgcatgaagccagactgctcatcattccagacatcttcagctgctacacccagaacaagcattcgaaatatgaacaggatggtgagccagatctttccaatcatggtggagtggatgtgaacttcctccagagtatctccaaggagattccagtcccccatgtttatttagtcagccatcttagctctgatccacatcaaataagaggcagataaattcttccattctgaagggagcactatttcttaaagcaaacctatggtgaaaatataacaatatgtcacttc

SEQ ID NO: 292856 - DNA, 874 bp, Homo sapiens
ctgagagacggaggttgcagtgagctgagatcgcaccactgcactccagcctgggtgacagagtaagactcaatctcaaaaaaaaaaaagtcaagtccaaagcccagcctggtccccaacctgcctcatcctcaaccctatccctatctcctttcagccccatcggtggctcaaagacctgaccatgttccctctcccctgaccccgggaggctggtggtttggcacctgcagccattccaacctcaacggccagtacttccgctccatcccacagcagcggcagaagcttaagaagggaatcttctggaagacctggcggggccgctactacccgctgcaggccaccaccatgttgatccagcccatggcagcagaggcagcctcctagcgtcctggctgggcctggtcccaggcccacgaaagacggtgactcttggctctgcccgaggatgtggccgttccctgcctgggcaggggctccaaggaggggccatctggaaacttgtggacagagaagaagaccacgactggagaagccccctttctgagtgcaggggggctgcatgcgttgcctcctgagatcgaggctgcaggatatgctcagactctagaggcgtggaccaaggggcatggagcttcactccttgctggccagggagttggggactcagagggaccacttggggccagccagactggcctcaatggcggactcagtcacattgactgacggggaccagggcttgtgtgggtcgagagcgccctcatggtgctggtgctgttgtgtgtaggtcccctggggacacaagcaggcgccaatggtatctgggcggagctcacagagttcttggaataaaagcaacctcagaaca

SEQ ID NO: 292857 - DNA, 1901 bp, Homo sapiens
tataaaaaccgtcctcgggcgcggcggggagaagccgagctgagcggatcctcacacgactgtgatccgattctttccagcggcttctgcaaccaagcgggtcttacccccggtcctccgcgtctccagtcctcgcacctggaaccccaacgtccccgagagtccccgaatccccgctcccaggctacctaagaggatgagcggtgctccgacggccggggcagccctgatgctctgcgccgccaccgccgtgctactgagcgctcagggcggacccgtgcagtccaagtcgccgcgctttgcgtcctgggacgagatgaatgtcctggcgcacggactcctgcagctcggccaggggctgcgcgaacacgcggagcgcacccgcagtcagctgagcgcgctggagcggcgcctgagcgcgtgcgggtccgcctgtcagggaaccgaggggtccaccgacctcccgttagcccctgagagccgggtggaccctgaggtccttcacagcctgcagacacaactcaaggctcagaacagcaggatccagcaactcttccacaaggtggcccagcagcagcggcacctggagaagcagcacctgcgaattcagcatctgcaaagccagtttggcctcctggaccacaagcacctagaccatgaggtggccaagcctgcccgaagaaagaggctgcccgagatggcccagccagttgacccggctcacaatgtcagccgcctgcaccggctgcccagggattgccaggagctgttccaggttggggagaggcagagtggactatttgaaatccagcctcaggggtctccgccatttttggtgaactgcaagatgacctcagatggaggctggacagtaattcagaggcgccacgatggctcagtggacttcaaccggccctgggaagcctacaaggcggggtttggggatccccacggcgagttctggctgggtctggagaaggtgcatagcatcacgggggaccgcaacagccgcctggccgtgcagctgcgggactgggatggcaacgccgagttgctgcagttctccgtgcacctgggtggcgaggacacggcctatagcctgcagctcactgcacccgtggccggccagctgggcgccaccaccgtcccacccagcggcctctccgtacccttctccacttgggaccaggatcacgacctccgcagggacaagaactgcgccaagagcctctctggaggctggtggtttggcacctgcagccattccaacctcaacggccagtacttccgctccatcccacagcagcggcagaagcttaagaagggaatcttctggaagacctggcggggccgctactacccgctgcaggccaccaccatgttgatccagcccatggcagcagaggcagcctcctagcgtcctggctgggcctggtcccaggcccacgaaagacggtgactcttggctctgcccgaggatgtggccgttccctgcctgggcaggggctccaaggaggggccatctggaaacttgtggacagagaagaagaccacgactggagaagccccctttctgagtgcaggggggctgcatgcgttgcctcctgagatcgaggctgcaggatatgctcagactctagaggcgtggaccaaggggcatggagcttcactccttgctggccagggagttggggactcagagggaccacttggggccagccagactggcctcaatggcggactcagtcacattgactgacggggaccagggcttgtgtgggtcgagagcgccctcatggtgctggtgctgttgtgtgtaggtcccctggggacacaagcaggcgccaatggtatctgggcggagctcacagagttcttggaataaaagcaacctcagaaca

SEQ ID NO: 292858 - DNA, 1845 bp, Homo sapiens
tataaaaaccgtcctcgggcgcggcggggagaagccgagctgagcggatcctcacacgactgtgatccgattctttccagcggcttctgcaaccaagcgggtcttacccccggtcctccgcgtctccagtcctcgcacctggaaccccaacgtccccgagagtccccgaatccccgctcccaggctacctaagaggatgagcggtgctccgacggccggggcagccctgatgctctgcgccgccaccgccgtgctactgagcgctcagggcggacccgtgcagtccaagtcgccgcgctttgcgtcctgggacgagatgaatgtcctggcgcacggactcctgcagctcggccaggggctgcgcgaacacgcggagcgcacccgcagtcagctgagcgcgctggagcggcgcctgagcgcgtgcgggtccgcctgtcagggaaccgaggggtccaccgacctcccgttagcccctgagagccgggtggaccctgaggtccttcacagcctgcagacacaactcaaggctcagaacagcaggatccagcaactcttccacaaggtggcccagcagcagcggcacctggagaagcagcacctgcgaattcagcatctgcaaagccagtttggcctcctggaccacaagcacctagaccatgaggtggccaagcctgcccgaagaaagaggctgcccgagatggcccagccagttgacccggctcacaatgtcagccgcctgcaccggctgcccagggattgccaggagctgttccaggttggggagaggcagagtggactatttgaaatccagcctcaggggtctccgccatttttggtgaactgcaagatgacctcagatggaggctggacagtaattcagaggcgccacgatggctcagtggacttcaaccggccctgggaagcctacaaggcggggtttggggatccccacggcgagttctggctgggtctggagaaggtgcatagcatcacgggggaccgcaacagccgcctggccgtgcagctgcgggactgggatggcaacgccgagttgctgcagttctccgtgcacctgggtggcgaggacacggcctatagcctgcagctcactgcacccgtggccggccagctgggcgccaccaccgtcccacccagcggcctctccgtacccttctccacttgggaccaggatcacgacctccgcagggacaagaactgcgccaagagcctctctggaggctggtggtttggcacctgcagccattccaacctcaacggccagtacttccgctccatcccacagcagcggcagaagcttaagaagggaatcttctggaagacctggcggggccgctactacccgctgcaggccaccaccatgttgatccagcccatggcagcagaggcagcctcctagcgtcctggctgggcctggtcccaggcccacgaaagacggtgactcttggctctgcccgaggatgtggccgttcaagaccacgactggagaagccccctttctgagtgcaggggggctgcatgcgttgcctcctgagatcgaggctgcaggatatgctcagactctagaggcgtggaccaaggggcatggagcttcactccttgctggccagggagttggggactcagagggaccacttggggccagccagactggcctcaatggcggactcagtcacattgactgacggggaccagggcttgtgtgggtcgagagcgccctcatggtgctggtgctgttgtgtgtaggtcccctggggacacaagcaggcgccaatggtatctgggcggagctcacagagttcttggaataaaagcaacctcagaaca

SEQ ID NO: 292859 - DNA, 1036 bp, Homo sapiens
tataaaaaccgtcctcgggcgcggcggggagaagccgagctgagcggatcctcacacgactgtgatccgattctttccagcggcttctgcaaccaagcgggtcttacccccggtcctccgcgtctccagtcctcgcacctggaaccccaacgtccccgagagtccccgaatccccgctcccaggctacctaagaggatgagcggtgctccgacggccggggcagccctgatgctctgcgccgccaccgccgtgctactgagcgctcagggcggacccgtgcagtccaagtcgccgcgctttgcgtcctgggacgagatgaatgtcctggcgcacggactcctgcagctcggccaggggctgcgcgaacacgcggagcgcacccgcagtcagctgagcgcgctggagcggcgcctgagcgcgtgcgggtccgcctgtcagggaaccgaggggtccaccgacctcccgttagcccctgagagccgggtggaccctgaggtccttcacagcctgcagacacaactcaaggctcagaacagcaggatccagcaactcttccacaaggtggcccagcagcagcggcacctggagaagcagcacctgcgaattcagcatctgcaaagccagtttggcctcctggaccacaagcacctagaccatctggaaacttgtggacagagaagaagaccacgactggagaagccccctttctgagtgcaggggggctgcatgcgttgcctcctgagatcgaggctgcaggatatgctcagactctagaggcgtggaccaaggggcatggagcttcactccttgctggccagggagttggggactcagagggaccacttggggccagccagactggcctcaatggcggactcagtcacattgactgacggggaccagggcttgtgtgggtcgagagcgccctcatggtgctggtgctgttgtgtgtaggtcccctggggacacaagcaggcgccaatggtatctgggcggagctcacagagttcttggaataaaagcaacctcagaaca

SEQ ID NO: 292860 - DNA, 505 bp, Homo sapiens
ctgagagacggaggttgcagtgagctgagatcgcaccactgcactccagcctgggtgacagagtaagactcaatctcaaaaaaaaaaaagtcaagtccaaagcccagcctggtccccaacctgcctcatcctcaaccctatccctatctcctttcagccccatcggtggctcaaagacctgaccatgttccctctcccctgaccccggctgagatcgaggctgcaggatatgctcagactctagaggcgtggaccaaggggcatggagcttcactccttgctggccagggagttggggactcagagggaccacttggggccagccagactggcctcaatggcggactcagtcacattgactgacggggaccagggcttgtgtgggtcgagagcgccctcatggtgctggtgctgttgtgtgtaggtcccctggggacacaagcaggcgccaatggtatctgggcggagctcacagagttcttggaataaaagcaacctcagaaca

SEQ ID NO: 292861 - DNA, 803 bp, Homo sapiens
tataaaaaccgtcctcgggcgcggcggggagaagccgagctgagcggatcctcacacgactgtgatccgattctttccagcggcttctgcaaccaagcgggtcttacccccggtcctccgcgtctccagtcctcgcacctggaaccccaacgtccccgagagtccccgaatccccgctcccaggctacctaagaggatgagcggtgctccgacggccggggcagccctgatgctctgcgccgccaccgccgtgctactgagcgctcagggcggacccgtgcagtccaagtcgccgcgctttgcgtcctgggacgagatgaatgtcctggcgcacggactcctgcagctcggccaggggctgcgcgaacacgcggagcgcacccgcagtcagctgagcgcgctggagcggcgcctgagcgcgtgcgggtccgcctgtcagggaaccgaggggtccaccgacctcccgttagcccctgagagccgggtggaccctgaggtccttcacagcctgcagacacaactcaaggctcagaacagcaggatccagcaactcttccacaaggtggcccagcagcagcggcacctggagaagcagcacctgcgaattcagcatctgcaaagccagactggcctcaatggcggactcagtcacattgactgacggggaccagggcttgtgtgggtcgagagcgccctcatggtgctggtgctgttgtgtgtaggtcccctggggacacaagcaggcgccaatggtatctgggcggagctcacagagttcttggaataaaagcaacctcagaaca

SEQ ID NO: 292862 - DNA, 640 bp, Homo sapiens
  misc_feature (43)..(43): n is a, c, g, or t
  misc_feature (510)..(510): n is a, c, g, or t
  misc_feature (516)..(516): n is a, c, g, or t
  misc_feature (520)..(520): n is a, c, g, or t
  misc_feature (555)..(555): n is a, c, g, or t
  misc_feature (557)..(557): n is a, c, g, or t
  misc_feature (574)..(574): n is a, c, g, or t
  misc_feature (626)..(626): n is a, c, g, or t
gggatgtgcgatcgcggaagcgcaggaaatggggacgggagangagtatgattacatattgaaagtggtgctcatcggggactcaggcgtgggcaagagcaacctgctgtcgcgcttcacccgcaacgagttcaacctggagagcaagagcaccatcggcgtggagttcgccacccgcagcatccaggtggacggcaagaccatcaaggcgcagatctgggacaccgctggccaggagcgctaccgcgccatcacctccgcgtactaccgtggtgcagtgggcgccctgctggtgtacgacatcgccaagcacctgacctatgagaacgtggagcgctggctgaaggagctgcgggaccacgcagacagcaacatcgtcatcatgctggtgggcaacaagagtgacctgcgccacctgcgggctgtgcccactgacgaggcccgcgccttcgcagaaagaacaattgtcttcatcgagactcagctggatcataagtaagagcatcagantcaaantagngtgtaaaaatgaagtgtgcagagtggaagtgtgananggcaagagaaaaaatgngtgaattgatggttaatgtgttgttagcagtttgtttgtttttggttcattngatgcgggggcaaa

SEQ ID NO: 292863 - DNA, 2479 bp, Homo sapiens
cgccggctccgcccccgtcgggtgtttgtggtggggctgcggagtcgccgatcccgccggaagcgccaggacaatggggacccgggacgacgagtacgactacctattcaaagtggtgctcatcggggactcaggcgtgggcaagagcaacctgctgtcgcgcttcacccgcaacgagttcaacctggagagcaagagcaccatcggcgtggagttcgccacccgcagcatccaggtggacggcaagaccatcaaggcgcagatctgggacaccgctggccaggagcgctaccgcgccatcacctccgcgtactaccgtggtgcagtgggcgccctgctggtgtacgacatcgccaagcacctgacctatgagaacgtggagcgctggctgaaggagctgcgggaccacgcagacagcaacatcgtcatcatgctggtgggcaacaagagtgacctgcgccacctgcgggctgtgcccactgacgaggcccgcgccttcgcagaaaagaacaacttgtccttcatcgagacctcagccttggattccactaacgtagaggaagcattcaagaacatcctcacagagatctaccgcatcgtgtcacagaaacagatcgcagaccgtgctgcccacgacgagtccccggggaacaacgtggtggacatcagcgtgccgcccaccacggacggacagaagcccaacaagctgcagtgctgccagaacctgtgacccctgcgcctccacccagcgtgcgtgcacgtcctccgcccgtccccgccacggtatcctctggcccctccctgctgtccctctgtggccggctcgttccagccctcccagtgagctctgcacggccgggccggggcccaggaaggacaggagccagtgctaccccgtcctgcccggggaaaagctagaagccccggtttgctgcacccatgaaactcgggtccccacagcgtcttggcggggtggggagggcggcaggatggacggggctggccagaggcgaggaggacgggcggacggcgccgccttctccccttttccttggccgactctagggagcgattgcctccctccctctgtgaccgggtggcccagccagcccgtcgtccccacccagaaccgtgctctgggccaaagcccgaagaaccaggcagcgggggccggggcaggcggaccccccgggctctcagcgcccacccgctcctccgcacacagcagctcgcacaggcctcccacctctgcctgttgattgatgcagggagaagcccgtccccccctctcccctctcccctcccctctcctgcacgcaacgcgccctctcggccctccctgtccccctcctctgtctcgtctccccatctggtctggaacctgtttgcaagtgaagcaatatctccgtgttttgtatatacaaccgctcttgtagcctttggtttttgttaatgtagagaaacacagattctttatacactttgtaagatttacgccaaaccccagctctcgatctcttcttctccctgtggcccctgcgctgttgccccgtccccgtcaccccgcccgttactgaaatgtataatctgacttcctgtacaagaaaaaaaaaaaaaaaaaaaacaaaaaaaaaaaaaaaagggggggccgcgtttggaaggatgacctctaggaaaaaagtgttgctgaaggttatcatccggggaaattctggagtcggggaaagacattcactcatgacccagtattgtgaataagaaatttcacgcaagtcatgtacaaacgccacaataggagctgactttcctgaccaagggaggtgatggtggatgacagggctagtcacagaggcagataatgggacacagcaggacaggaaccggtctccagtcatcctcggtgtggcctctctacaagaggtgcagactgcatgcgtgtcggggtatacggattgtgattggccccccaagaacatttcaaaacccttagatagctgggacgagatgagtattctcaatcaaagggccacgtccccgagatccctgaaaaacttcccatttttgttggtgtggggaaaccaaagattgtgacctcgaaaaccagacaaatgttggccacaatacggggcaccaggggcatgggtgctacagggcaaaaaccaacgatttcccatacgtttggaagaccagtgtgcccagaggaggggccatatccaaacgttggagcaagggcggttacccagaaccgaatgggcacgggaacatgcacttaaacaccaggagaaccgggatggtagggacgcaggtaccaacaggaaattttccgtgaaccctaatacaaacgtggacacagtatttgacccggggccagggcctcggcgaacaaaacgctgaaattgctgaggggggcactgcaatttgacagcgcacagaagtctacaaaaaccaagaaccctggtaggcctcaccacaattacct

SEQ ID NO: 292864 - DNA, 2475 bp, Homo sapiens
ggaaactatcaggccactcgagtgcgcctgtgaggcggagtcgccgatcccgccggaagcgccaggacaatggggacccgggacgacgagtacgactacctattcaaagtggtgctcatcggggactcaggcgtgggcaagagcaacctgctgtcgcgcttcacccgcaacgagttcaacctggagagcaagagcaccatcggcgtggagttcgccacccgcagcatccaggtggacggcaagaccatcaaggcgcagatctgggacaccgctggccaggagcgctaccgcgccatcacctccgcgtactaccgtggtgcagtgggcgccctgctggtgtacgacatcgccaagcacctgacctatgagaacgtggagcgctggctgaaggagctgcgggaccacgcagacagcaacatcgtcatcatgctggtgggcaacaagagtgacctgcgccacctgcgggctgtgcccactgacgaggcccgcgccttcgcagaaaagaacaacttgtccttcatcgagacctcagccttggattccactaacgtagaggaagcattcaagaacatcctcacagagatctaccgcatcgtgtcacagaaacagatcgcagaccgtgctgcccacgacgagtccccggggaacaacgtggtggacatcagcgtgccgcccaccacggacggacagaagcccaacaagctgcagtgctgccagaacctgtgacccctgcgcctccacccagcgtgcgtgcacgtcctccgcccgtccccgccacggtatcctctggcccctccctgctgtccctctgtggccggctcgttccagccctcccagtgagctctgcacggccgggccggggcccaggaaggacaggagccagtgctaccccgtcctgcccggggaaaagctagaagccccggtttgctgcacccatgaaactcgggtccccacagcgtcttggcggggtggggagggcggcaggatggacggggctggccagaggcgaggaggacgggcggacggcgccgccttctccccttttccttggccgactctagggagcgattgcctccctccctctgtgaccgggtggcccagccagcccgtcgtccccacccagaaccgtgctctgggccaaagcccgaagaaccaggcagcgggggccggggcaggcggaccccccgggctctcagcgcccacccgctcctccgcacacagcagctcgcacaggcctcccacctctgcctgttgattgatgcagggagaagcccgtccccccctctcccctctcccctcccctctcctgcacgcaacgcgccctctcggccctccctgtccccctcctctgtctcgtctccccatctggtctggaacctgtttgcaagtgaagcaatatctccgtgttttgtatatacaaccgctcttgtagcctttggtttttgttaatgtagagaaacacagattctttatacactttgtaagatttacgccaaaccccagctctcgatctcttcttctccctgtggcccctgcgctgttgccccgtccccgtcaccccgcccgttactgaaatgtataatctgacttcctgtacaagaaaaaaaaaaaaaaaaaaaacaaaaaaaaaaaaaaaagggggggccgcgtttggaaggatgacctctaggaaaaaagtgttgctgaaggttatcatccggggaaattctggagtcggggaaagacattcactcatgacccagtattgtgaataagaaatttcacgcaagtcatgtacaaacgccacaataggagctgactttcctgaccaagggaggtgatggtggatgacagggctagtcacagaggcagataatgggacacagcaggacaggaaccggtctccagtcatcctcggtgtggcctctctacaagaggtgcagactgcatgcgtgtcggggtatacggattgtgattggccccccaagaacatttcaaaacccttagatagctgggacgagatgagtattctcaatcaaagggccacgtccccgagatccctgaaaaacttcccatttttgttggtgtggggaaaccaaagattgtgacctcgaaaaccagacaaatgttggccacaatacggggcaccaggggcatgggtgctacagggcaaaaaccaacgatttcccatacgtttggaagaccagtgtgcccagaggaggggccatatccaaacgttggagcaagggcggttacccagaaccgaatgggcacgggaacatgcacttaaacaccaggagaaccgggatggtagggacgcaggtaccaacaggaaattttccgtgaaccctaatacaaacgtggacacagtatttgacccggggccagggcctcggcgaacaaaacgctgaaattgctgaggggggcactgcaatttgacagcgcacagaagtctacaaaaaccaagaaccctggtaggcctcaccacaattacct

SEQ ID NO: 292865 - DNA, 2488 bp, Homo sapiens
taaccctcaccctaaccgcgtaaccctaaccgtcaccctaccgcgcggcggagtcgccgatcccgccggaagcgccaggacaatggggacccgggacgacgagtacgactacctattcaaagtggtgctcatcggggactcaggcgtgggcaagagcaacctgctgtcgcgcttcacccgcaacgagttcaacctggagagcaagagcaccatcggcgtggagttcgccacccgcagcatccaggtggacggcaagaccatcaaggcgcagatctgggacaccgctggccaggagcgctaccgcgccatcacctccgcgtactaccgtggtgcagtgggcgccctgctggtgtacgacatcgccaagcacctgacctatgagaacgtggagcgctggctgaaggagctgcgggaccacgcagacagcaacatcgtcatcatgctggtgggcaacaagagtgacctgcgccacctgcgggctgtgcccactgacgaggcccgcgccttcgcagaaaagaacaacttgtccttcatcgagacctcagccttggattccactaacgtagaggaagcattcaagaacatcctcacagagatctaccgcatcgtgtcacagaaacagatcgcagaccgtgctgcccacgacgagtccccggggaacaacgtggtggacatcagcgtgccgcccaccacggacggacagaagcccaacaagctgcagtgctgccagaacctgtgacccctgcgcctccacccagcgtgcgtgcacgtcctccgcccgtccccgccacggtatcctctggcccctccctgctgtccctctgtggccggctcgttccagccctcccagtgagctctgcacggccgggccggggcccaggaaggacaggagccagtgctaccccgtcctgcccggggaaaagctagaagccccggtttgctgcacccatgaaactcgggtccccacagcgtcttggcggggtggggagggcggcaggatggacggggctggccagaggcgaggaggacgggcggacggcgccgccttctccccttttccttggccgactctagggagcgattgcctccctccctctgtgaccgggtggcccagccagcccgtcgtccccacccagaaccgtgctctgggccaaagcccgaagaaccaggcagcgggggccggggcaggcggaccccccgggctctcagcgcccacccgctcctccgcacacagcagctcgcacaggcctcccacctctgcctgttgattgatgcagggagaagcccgtccccccctctcccctctcccctcccctctcctgcacgcaacgcgccctctcggccctccctgtccccctcctctgtctcgtctccccatctggtctggaacctgtttgcaagtgaagcaatatctccgtgttttgtatatacaaccgctcttgtagcctttggtttttgttaatgtagagaaacacagattctttatacactttgtaagatttacgccaaaccccagctctcgatctcttcttctccctgtggcccctgcgctgttgccccgtccccgtcaccccgcccgttactgaaatgtataatctgacttcctgtacaagaaaaaaaaaaaaaaaaaaaacaaaaaaaaaaaaaaaagggggggccgcgtttggaaggatgacctctaggaaaaaagtgttgctgaaggttatcatccggggaaattctggagtcggggaaagacattcactcatgacccagtattgtgaataagaaatttcacgcaagtcatgtacaaacgccacaataggagctgactttcctgaccaagggaggtgatggtggatgacagggctagtcacagaggcagataatgggacacagcaggacaggaaccggtctccagtcatcctcggtgtggcctctctacaagaggtgcagactgcatgcgtgtcggggtatacggattgtgattggccccccaagaacatttcaaaacccttagatagctgggacgagatgagtattctcaatcaaagggccacgtccccgagatccctgaaaaacttcccatttttgttggtgtggggaaaccaaagattgtgacctcgaaaaccagacaaatgttggccacaatacggggcaccaggggcatgggtgctacagggcaaaaaccaacgatttcccatacgtttggaagaccagtgtgcccagaggaggggccatatccaaacgttggagcaagggcggttacccagaaccgaatgggcacgggaacatgcacttaaacaccaggagaaccgggatggtagggacgcaggtaccaacaggaaattttccgtgaaccctaatacaaacgtggacacagtatttgacccggggccagggcctcggcgaacaaaacgctgaaattgctgaggggggcactgcaatttgacagcgcacagaagtctacaaaaaccaagaaccctggtaggcctcaccacaattacct

SEQ ID NO: 292866 - DNA, 1439 bp, Homo sapiens
  misc_feature (1332)..(1332): n is a, c, g, or t
cgccggctccgcccccgtcgggtgtttgtggtggggctgcggagtcgccgatcccgccggaagcgccaggacaatggggacccgggacgacgagtacgactacctattcaaagtggtgctcatcggggactcaggcgtgggcaagagcaacctgctgtcgcgcttcacccgcaacgagttcaacctggagagcaagagcaccatcggcgtggagttcgccacccgcagcatccaggtggacggcaagaccatcaaggcgcagatctgggacaccgctggccaggagcgctaccgcgccatcacctccgcgtactaccgtggtgcagtgggcgccctgctggtgtacgacatcgccaagcacctgacctatgagaacgtggagcgctggctgaaggagctgcgggaccacgcagacagcaacatcgtcatcatgctggtgggcaacaagagtgacctgcgccacctgcgggctgtgcccactgacgaggcccgcgccttcgcagaaaagaacaacttgtccttcatcgagacctcagccttggattccactaacgtagaggaagcattcaagaacatcctcacagagatctaccgcatcgtgtcacagaaacagatcgcagaccgtgctgcccacgacgagtccccggggaacaacgtggtggacatcagcgtgccgcccaccacggacggacagaagcccaacaagctgcagtgctgccagaacctgtgacccctgcgcctccacccagcgtgcgtgcacgtcctccgcccgtccccgccacggtatcctctggcccctccctgctgtccctctgtggccggctcgttccagccctcccagtgagctctgcacggccgggccggggcccaggaaggacaggagccagtgctaccccgtcctgcccggggaaaagctagaagccccggtttgctgcacccatgaaactcgggtccccacagcgtcttggcggggtggggagggcggcaggatggacggggctggccagaggcgaggaggacgggcggacggcgccgccttctccccttttccttggccgactctagggagcgattgcctccctccctctgtgaccgggtggcccagccagcccgtcgtccccacccagaaccgtgctctgggccaaagcccgaagaaccaggcagcgggggccggggcaggcggaccccccgggctctcagcgcccacccgctcctccgcacacagcagctcgcacaggcctcccacctctgcctgttgattgatgcagggagaagcccgtccccccctctcccctctcccctcccctctcctgggctccatggcccattttngtgcttcgggtcagaatccaaggactcctggggcatggggtcgtgaccccgcttgaaacaataacgttttgtcccggtaaaaaatacacggcctgtttttgaaaacc

SEQ ID NO: 292867 - DNA, 2438 bp, Homo sapiens
ggtgactctacaggatctcctctggggtgacaatggggacccgggacgacgagtacgactacctattcaaagtggtgctcatcggggactcaggcgtgggcaagagcaacctgctgtcgcgcttcacccgcaacgagttcaacctggagagcaagagcaccatcggcgtggagttcgccacccgcagcatccaggtggacggcaagaccatcaaggcgcagatctgggacaccgctggccaggagcgctaccgcgccatcacctccgcgtactaccgtggtgcagtgggcgccctgctggtgtacgacatcgccaagcacctgacctatgagaacgtggagcgctggctgaaggagctgcgggaccacgcagacagcaacatcgtcatcatgctggtgggcaacaagagtgacctgcgccacctgcgggctgtgcccactgacgaggcccgcgccttcgcagaaaagaacaacttgtccttcatcgagacctcagccttggattccactaacgtagaggaagcattcaagaacatcctcacagagatctaccgcatcgtgtcacagaaacagatcgcagaccgtgctgcccacgacgagtccccggggaacaacgtggtggacatcagcgtgccgcccaccacggacggacagaagcccaacaagctgcagtgctgccagaacctgtgacccctgcgcctccacccagcgtgcgtgcacgtcctccgcccgtccccgccacggtatcctctggcccctccctgctgtccctctgtggccggctcgttccagccctcccagtgagctctgcacggccgggccggggcccaggaaggacaggagccagtgctaccccgtcctgcccggggaaaagctagaagccccggtttgctgcacccatgaaactcgggtccccacagcgtcttggcggggtggggagggcggcaggatggacggggctggccagaggcgaggaggacgggcggacggcgccgccttctccccttttccttggccgactctagggagcgattgcctccctccctctgtgaccgggtggcccagccagcccgtcgtccccacccagaaccgtgctctgggccaaagcccgaagaaccaggcagcgggggccggggcaggcggaccccccgggctctcagcgcccacccgctcctccgcacacagcagctcgcacaggcctcccacctctgcctgttgattgatgcagggagaagcccgtccccccctctcccctctcccctcccctctcctgcacgcaacgcgccctctcggccctccctgtccccctcctctgtctcgtctccccatctggtctggaacctgtttgcaagtgaagcaatatctccgtgttttgtatatacaaccgctcttgtagcctttggtttttgttaatgtagagaaacacagattctttatacactttgtaagatttacgccaaaccccagctctcgatctcttcttctccctgtggcccctgcgctgttgccccgtccccgtcaccccgcccgttactgaaatgtataatctgacttcctgtacaagaaaaaaaaaaaaaaaaaaaacaaaaaaaaaaaaaaaagggggggccgcgtttggaaggatgacctctaggaaaaaagtgttgctgaaggttatcatccggggaaattctggagtcggggaaagacattcactcatgacccagtattgtgaataagaaatttcacgcaagtcatgtacaaacgccacaataggagctgactttcctgaccaagggaggtgatggtggatgacagggctagtcacagaggcagataatgggacacagcaggacaggaaccggtctccagtcatcctcggtgtggcctctctacaagaggtgcagactgcatgcgtgtcggggtatacggattgtgattggccccccaagaacatttcaaaacccttagatagctgggacgagatgagtattctcaatcaaagggccacgtccccgagatccctgaaaaacttcccatttttgttggtgtggggaaaccaaagattgtgacctcgaaaaccagacaaatgttggccacaatacggggcaccaggggcatgggtgctacagggcaaaaaccaacgatttcccatacgtttggaagaccagtgtgcccagaggaggggccatatccaaacgttggagcaagggcggttacccagaaccgaatgggcacgggaacatgcacttaaacaccaggagaaccgggatggtagggacgcaggtaccaacaggaaattttccgtgaaccctaatacaaacgtggacacagtatttgacccggggccagggcctcggcgaacaaaacgctgaaattgctgaggggggcactgcaatttgacagcgcacagaagtctacaaaaaccaagaaccctggtaggcctcaccacaattacct

SEQ ID NO: 292868 - DNA, 3340 bp, Homo sapiens
cgccggctccgcccccgtcgggtgtttgtggtggggctgcggagtcgccgatcccgccggaagcgccaggacaatggggacccgggacgacgagtacgactacctattcaaagtggtgctcatcggggactcaggcgtgggcaagagcaacctgctgtcgcgcttcacccgcaacgagttcaacctggagagcaagagcaccatcggcgtggagttcgccacccgcagcatccaggtggacggcaagaccatcaaggcgcagatctgggacaccgctggccaggagcgctaccgcgccatcacctccgcgtactaccgtggtgcagtgggcgccctgctggtgtacgacatcgccaagcacctgacctatgagaacgtggagcgctggctgaaggagctgcgggaccacgcagacagcaacatcgtcatcatgctggtgggcaacaagagtgacctgcgccacctgcgggctgtgcccactgacgaggcccgcgccttcgcagaaaagaacaacttgtccttcatcgagacctcagccttggattccactaacgtagaggaagcattcaagaacatcctcacaggtggccggggaccagatgggtgtgggtagggcaccagccaggcagggtggaacacggcctctgaaccttcgcttgttttgttcgtttgcttgtttttttctttttgtttttttcttttttttgtcggggcaggatggagttttgctctttgcccaggctggagtgcggtggctcgatctcagcttactgcaacctccgccttccaggttcaggcaattctcctgcctcagcctcccgagtagctgggattacaggtgcctgccaccacacccgctaatttttgtaatttttagtagagacaggatttcacaatgttgtccaggttgatctcgaactcctgggctcaagtgatcctcctgcctcagcctcccaaagtgctgggattacaggcgtgagccactgcacctggcctgtttgatttttttccaccaccacccctaacctttgctttttaaacctgccggtccacctggacacttcacagggtcagaccaggtctagcccttgctggcactggggacacagagaccccctggccccagttcctggggatgggccctgccttaactcttggcgctgcggggaggcgggtagcctcagggacctggagccttttggcttctgggagtttacctctgagggaggagggcgcttctgatcttagggagcgagaggccggggctggctgtgaccagatgtgggtcctggctgggtgcgcagcccctgtccttgttacccctgatgtgatgggggcgctgtgggggtctggagagggcctctggagtcctgcagggaggggttcccctcggcaggcagggcacgtgctggctcaccccacgtccccctgtaccccctttgcagagatctaccgcatcgtgtcacagaaacagatcgcagaccgtgctgcccacgacgagtccccggggaacaacgtggtggacatcagcgtgccgcccaccacggacggacagaagcccaacaagctgcagtgctgccagaacctgtgacccctgcgcctccacccagcgtgcgtgcacgtcctccgcccgtccccgccacggtatcctctggcccctccctgctgtccctctgtggccggctcgttccagccctcccagtgagctctgcacggccgggccggggcccaggaaggacaggagccagtgctaccccgtcctgcccggggaaaagctagaagccccggtttgctgcacccatgaaactcgggtccccacagcgtcttggcggggtggggagggcggcaggatggacggggctggccagaggcgaggaggacgggcggacggcgccgccttctccccttttccttggccgactctagggagcgattgcctccctccctctgtgaccgggtggcccagccagcccgtcgtccccacccagaaccgtgctctgggccaaagcccgaagaaccaggcagcgggggccggggcaggcggaccccccgggctctcagcgcccacccgctcctccgcacacagcagctcgcacaggcctcccacctctgcctgttgattgatgcagggagaagcccgtccccccctctcccctctcccctcccctctcctgcacgcaacgcgccctctcggccctccctgtccccctcctctgtctcgtctccccatctggtctggaacctgtttgcaagtgaagcaatatctccgtgttttgtatatacaaccgctcttgtagcctttggtttttgttaatgtagagaaacacagattctttatacactttgtaagatttacgccaaaccccagctctcgatctcttcttctccctgtggcccctgcgctgttgccccgtccccgtcaccccgcccgttactgaaatgtataatctgacttcctgtacaagaaaaaaaaaaaaaaaaaaaacaaaaaaaaaaaaaaaagggggggccgcgtttggaaggatgacctctaggaaaaaagtgttgctgaaggttatcatccggggaaattctggagtcggggaaagacattcactcatgacccagtattgtgaataagaaatttcacgcaagtcatgtacaaacgccacaataggagctgactttcctgaccaagggaggtgatggtggatgacagggctagtcacagaggcagataatgggacacagcaggacaggaaccggtctccagtcatcctcggtgtggcctctctacaagaggtgcagactgcatgcgtgtcggggtatacggattgtgattggccccccaagaacatttcaaaacccttagatagctgggacgagatgagtattctcaatcaaagggccacgtccccgagatccctgaaaaacttcccatttttgttggtgtggggaaaccaaagattgtgacctcgaaaaccagacaaatgttggccacaatacggggcaccaggggcatgggtgctacagggcaaaaaccaacgatttcccatacgtttggaagaccagtgtgcccagaggaggggccatatccaaacgttggagcaagggcggttacccagaaccgaatgggcacgggaacatgcacttaaacaccaggagaaccgggatggtagggacgcaggtaccaacaggaaattttccgtgaaccctaatacaaacgtggacacagtatttgacccggggccagggcctcggcgaacaaaacgctgaaattgctgaggggggcactgcaatttgacagcgcacagaagtctacaaaaaccaagaaccctggtaggcctcaccacaattacct

SEQ ID NO: 292869 - DNA, 2285 bp, Homo sapiens
ctcggtacccgaggatacgattcgccacccgcagcatccaggtggacggcaagaccatcaaggcgcagatctgggacaccgctggccaggagcgctaccgcgccatcacctccgcgtactaccgtggtgcagtgggcgccctgctggtgtacgacatcgccaagcacctgacctatgagaacgtggagcgctggctgaaggagctgcgggaccacgcagacagcaacatcgtcatcatgctggtgggcaacaagagtgacctgcgccacctgcgggctgtgcccactgacgaggcccgcgccttcgcagaaaagaacaacttgtccttcatcgagacctcagccttggattccactaacgtagaggaagcattcaagaacatcctcacagagatctaccgcatcgtgtcacagaaacagatcgcagaccgtgctgcccacgacgagtccccggggaacaacgtggtggacatcagcgtgccgcccaccacggacggacagaagcccaacaagctgcagtgctgccagaacctgtgacccctgcgcctccacccagcgtgcgtgcacgtcctccgcccgtccccgccacggtatcctctggcccctccctgctgtccctctgtggccggctcgttccagccctcccagtgagctctgcacggccgggccggggcccaggaaggacaggagccagtgctaccccgtcctgcccggggaaaagctagaagccccggtttgctgcacccatgaaactcgggtccccacagcgtcttggcggggtggggagggcggcaggatggacggggctggccagaggcgaggaggacgggcggacggcgccgccttctccccttttccttggccgactctagggagcgattgcctccctccctctgtgaccgggtggcccagccagcccgtcgtccccacccagaaccgtgctctgggccaaagcccgaagaaccaggcagcgggggccggggcaggcggaccccccgggctctcagcgcccacccgctcctccgcacacagcagctcgcacaggcctcccacctctgcctgttgattgatgcagggagaagcccgtccccccctctcccctctcccctcccctctcctgcacgcaacgcgccctctcggccctccctgtccccctcctctgtctcgtctccccatctggtctggaacctgtttgcaagtgaagcaatatctccgtgttttgtatatacaaccgctcttgtagcctttggtttttgttaatgtagagaaacacagattctttatacactttgtaagatttacgccaaaccccagctctcgatctcttcttctccctgtggcccctgcgctgttgccccgtccccgtcaccccgcccgttactgaaatgtataatctgacttcctgtacaagaaaaaaaaaaaaaaaaaaaacaaaaaaaaaaaaaaaagggggggccgcgtttggaaggatgacctctaggaaaaaagtgttgctgaaggttatcatccggggaaattctggagtcggggaaagacattcactcatgacccagtattgtgaataagaaatttcacgcaagtcatgtacaaacgccacaataggagctgactttcctgaccaagggaggtgatggtggatgacagggctagtcacagaggcagataatgggacacagcaggacaggaaccggtctccagtcatcctcggtgtggcctctctacaagaggtgcagactgcatgcgtgtcggggtatacggattgtgattggccccccaagaacatttcaaaacccttagatagctgggacgagatgagtattctcaatcaaagggccacgtccccgagatccctgaaaaacttcccatttttgttggtgtggggaaaccaaagattgtgacctcgaaaaccagacaaatgttggccacaatacggggcaccaggggcatgggtgctacagggcaaaaaccaacgatttcccatacgtttggaagaccagtgtgcccagaggaggggccatatccaaacgttggagcaagggcggttacccagaaccgaatgggcacgggaacatgcacttaaacaccaggagaaccgggatggtagggacgcaggtaccaacaggaaattttccgtgaaccctaatacaaacgtggacacagtatttgacccggggccagggcctcggcgaacaaaacgctgaaattgctgaggggggcactgcaatttgacagcgcacagaagtctacaaaaaccaagaaccctggtaggcctcaccacaattacct

SEQ ID NO: 292870 - DNA, 3146 bp, Homo sapiens
ctcggtacccgaggatacgattcgccacccgcagcatccaggtggacggcaagaccatcaaggcgcagatctgggacaccgctggccaggagcgctaccgcgccatcacctccgcgtactaccgtggtgcagtgggcgccctgctggtgtacgacatcgccaagcacctgacctatgagaacgtggagcgctggctgaaggagctgcgggaccacgcagacagcaacatcgtcatcatgctggtgggcaacaagagtgacctgcgccacctgcgggctgtgcccactgacgaggcccgcgccttcgcagaaaagaacaacttgtccttcatcgagacctcagccttggattccactaacgtagaggaagcattcaagaacatcctcacaggtggccggggaccagatgggtgtgggtagggcaccagccaggcagggtggaacacggcctctgaaccttcgcttgttttgttcgtttgcttgtttttttctttttgtttttttcttttttttgtcggggcaggatggagttttgctctttgcccaggctggagtgcggtggctcgatctcagcttactgcaacctccgccttccaggttcaggcaattctcctgcctcagcctcccgagtagctgggattacaggtgcctgccaccacacccgctaatttttgtaatttttagtagagacaggatttcacaatgttgtccaggttgatctcgaactcctgggctcaagtgatcctcctgcctcagcctcccaaagtgctgggattacaggcgtgagccactgcacctggcctgtttgatttttttccaccaccacccctaacctttgctttttaaacctgccggtccacctggacacttcacagggtcagaccaggtctagcccttgctggcactggggacacagagaccccctggccccagttcctggggatgggccctgccttaactcttggcgctgcggggaggcgggtagcctcagggacctggagccttttggcttctgggagtttacctctgagggaggagggcgcttctgatcttagggagcgagaggccggggctggctgtgaccagatgtgggtcctggctgggtgcgcagcccctgtccttgttacccctgatgtgatgggggcgctgtgggggtctggagagggcctctggagtcctgcagggaggggttcccctcggcaggcagggcacgtgctggctcaccccacgtccccctgtaccccctttgcagagatctaccgcatcgtgtcacagaaacagatcgcagaccgtgctgcccacgacgagtccccggggaacaacgtggtggacatcagcgtgccgcccaccacggacggacagaagcccaacaagctgcagtgctgccagaacctgtgacccctgcgcctccacccagcgtgcgtgcacgtcctccgcccgtccccgccacggtatcctctggcccctccctgctgtccctctgtggccggctcgttccagccctcccagtgagctctgcacggccgggccggggcccaggaaggacaggagccagtgctaccccgtcctgcccggggaaaagctagaagccccggtttgctgcacccatgaaactcgggtccccacagcgtcttggcggggtggggagggcggcaggatggacggggctggccagaggcgaggaggacgggcggacggcgccgccttctccccttttccttggccgactctagggagcgattgcctccctccctctgtgaccgggtggcccagccagcccgtcgtccccacccagaaccgtgctctgggccaaagcccgaagaaccaggcagcgggggccggggcaggcggaccccccgggctctcagcgcccacccgctcctccgcacacagcagctcgcacaggcctcccacctctgcctgttgattgatgcagggagaagcccgtccccccctctcccctctcccctcccctctcctgcacgcaacgcgccctctcggccctccctgtccccctcctctgtctcgtctccccatctggtctggaacctgtttgcaagtgaagcaatatctccgtgttttgtatatacaaccgctcttgtagcctttggtttttgttaatgtagagaaacacagattctttatacactttgtaagatttacgccaaaccccagctctcgatctcttcttctccctgtggcccctgcgctgttgccccgtccccgtcaccccgcccgttactgaaatgtataatctgacttcctgtacaagaaaaaaaaaaaaaaaaaaaacaaaaaaaaaaaaaaaagggggggccgcgtttggaaggatgacctctaggaaaaaagtgttgctgaaggttatcatccggggaaattctggagtcggggaaagacattcactcatgacccagtattgtgaataagaaatttcacgcaagtcatgtacaaacgccacaataggagctgactttcctgaccaagggaggtgatggtggatgacagggctagtcacagaggcagataatgggacacagcaggacaggaaccggtctccagtcatcctcggtgtggcctctctacaagaggtgcagactgcatgcgtgtcggggtatacggattgtgattggccccccaagaacatttcaaaacccttagatagctgggacgagatgagtattctcaatcaaagggccacgtccccgagatccctgaaaaacttcccatttttgttggtgtggggaaaccaaagattgtgacctcgaaaaccagacaaatgttggccacaatacggggcaccaggggcatgggtgctacagggcaaaaaccaacgatttcccatacgtttggaagaccagtgtgcccagaggaggggccatatccaaacgttggagcaagggcggttacccagaaccgaatgggcacgggaacatgcacttaaacaccaggagaaccgggatggtagggacgcaggtaccaacaggaaattttccgtgaaccctaatacaaacgtggacacagtatttgacccggggccagggcctcggcgaacaaaacgctgaaattgctgaggggggcactgcaatttgacagcgcacagaagtctacaaaaaccaagaaccctggtaggcctcaccacaattacct

SEQ ID NO: 292871 - DNA, 2753 bp, Homo sapiens
tataaaaaccgtcctcgggcgcggcggggagaagccgagctgagcggatcctcacacgactgtgatccgattctttccagcggcttctgcaaccaagcgggtcttacccccggtcctccgcgtctccagtcctcgcacctggaaccccaacgtccccgagagtccccgaatccccgctcccaggctacctaagaggatgagcggtgctccgacggccggggcagccctgatgctctgcgccgccaccgccgtgctactgagcgctcagggcggacccgtgcagtccaagtcgccgcgctttgcgtcctgggacgagatgaatgtcctggcgcacggactcctgcagctcggccaggggctgcgcgaacacgcggagcgcacccgcagtcagctgagcgcgctggagcggcgcctgagcgcgtgcgggtccgcctgtcagggaaccgaggggtccaccgacctcccgttagcccctgagagccgggtggaccctgaggtccttcacagcctgcagacacaactcaaggctcagaacagcaggatccagcaactcttccacaaggtggcccagcagcagcggcacctggagaagcagcacctgcgaattcagcatctgcaaagccagtttggcctcctggaccacaagcacctagaccatgaggtggccaagcctgcccgaagaaagaggctgcccgagatggcccagccagttgacccggctcacaatgtcagccgcctgcaccggctgcccagggattgccaggagctgttccaggttggggagaggcagagtggactatttgaaatccagcctcaggggtctccgccatttttggtgaactgcaagatgacctcagatggaggctggacagtaattcagaggcgccacgatggctcagtggacttcaaccggccctgggaagcctacaaggcggggtttggggatccccacggcgagttctggctgggtctggagaaggtgcatagcatcacgggggaccgcaacagccgcctggccgtgcagctgcgggactgggatggcaacgccgagttgctgcagttctccgtgcacctgggtggcgaggacacggcctatagcctgcagctcactgcacccgtggccggccagctgggcgccaccaccgtcccacccagcggcctctccgtacccttctccacttgggaccaggatcacgacctccgcagggacaagaactgcgccaagagcctctctggaggctggtggtttggcacctgcagccattccaacctcaacggccagtacttccgctccatcccacagcagcggcagaagcttaagaagggaatcttctggaagacctggcggggccgctactacccgctgcaggccaccaccatgttgatccagcccatggcagcagaggcagcctcctagcgtcctggctgggcctggtcccaggcccacgaaagacggtgactcttggctctgcccgaggatgtggccgttccctgcctgggcaggggctccaaggaggggccatctggaaacttgtggacagagaagaagaccacgactggagaagccccctttctgagtgcaggggggctgcatgcgttgcctcctgagatcgaggctgcaggatatgctcagactctagaggcgtggaccaaggggcatggagcttcactccttgctggccagggagttggggactcagagggaccacttggggccagccagactggcctcaatggcggactcagtcacattgactgacggggaccagggcttgtgtgggtcgagagcgccctcatggtgctggtgctgttgtgtgtaggtcccctggggacacaagcaggcgccaatggtatctgggcggagctcacagagttcttggaataaaagcaacctcagaacaaaaaaaaaaaaaaagggggggccgcgtttggaaggatgacctctaggaaaaaagtgttgctgaaggttatcatccggggaaattctggagtcggggaaagacattcactcatgacccagtattgtgaataagaaatttcacgcaagtcatgtacaaacgccacaataggagctgactttcctgaccaagggaggtgatggtggatgacagggctagtcacagaggcagataatgggacacagcaggacaggaaccggtctccagtcatcctcggtgtggcctctctacaagaggtgcagactgcatgcgtgtcggggtatacggattgtgattggccccccaagaacatttcaaaacccttagatagctgggacgagatgagtattctcaatcaaagggccacgtccccgagatccctgaaaaacttcccatttttgttggtgtggggaaaccaaagattgtgacctcgaaaaccagacaaatgttggccacaatacggggcaccaggggcatgggtgctacagggcaaaaaccaacgatttcccatacgtttggaagaccagtgtgcccagaggaggggccatatccaaacgttggagcaagggcggttacccagaaccgaatgggcacgggaacatgcacttaaacaccaggagaaccgggatggtagggacgcaggtaccaacaggaaattttccgtgaaccctaatacaaacgtggacacagtatttgacccggggccagggcctcggcgaacaaaacgctgaaattgctgaggggggcactgcaatttgacagcgcacagaagtctacaaaaaccaagaaccctggtaggcctcaccacaattacct

SEQ ID NO: 292872 - DNA, 1787 bp, Homo sapiens
tataaaaaccgtcctcgggcgcggcggggagaagccgagctgagcggatcctcacacgactgtgatccgattctttccagcggcttctgcaaccaagcgggtcttacccccggtcctccgcgtctccagtcctcgcacctggaaccccaacgtccccgagagtccccgaatccccgctcccaggctacctaagaggatgagcggtgctccgacggccggggcagccctgatgctctgcgccgccaccgccgtgctactgagcgctcagggcggacccgtgcagtccaagtcgccgcgctttgcgtcctgggacgagatgaatgtcctggcgcacggactcctgcagctcggccaggggctgcgcgaacacgcggagcgcacccgcagtcagctgagcgcgctggagcggcgcctgagcgcgtgcgggtccgcctgtcagggaaccgaggggtccaccgacctcccgttagcccctgagagccgggtggaccctgaggtccttcacagcctgcagacacaactcaaggctcagaacagcaggatccagcaactcttccacaaggtggcccagcagcagcggcacctggagaagcagcacctgcgaattcagcatctgcaaagccagtttggcctcctggaccacaagcacctagaccatgaggtggccaagcctgcccgaagaaagaggctgcccgagatggcccagccagttgacccggctcacaatgtcagccgcctgcaccatggaggctggacagtaattcagaggcgccacgatggctcagtggacttcaaccggccctgggaagcctacaaggcggggtttggggatccccacggcgagttctggctgggtctggagaaggtgcatagcatcacgggggaccgcaacagccgcctggccgtgcagctgcgggactgggatggcaacgccgagttgctgcagttctccgtgcacctgggtggcgaggacacggcctatagcctgcagctcactgcacccgtggccggccagctgggcgccaccaccgtcccacccagcggcctctccgtacccttctccacttgggaccaggatcacgacctccgcagggacaagaactgcgccaagagcctctctggaggctggtggtttggcacctgcagccattccaacctcaacggccagtacttccgctccatcccacagcagcggcagaagcttaagaagggaatcttctggaagacctggcggggccgctactacccgctgcaggccaccaccatgttgatccagcccatggcagcagaggcagcctcctagcgtcctggctgggcctggtcccaggcccacgaaagacggtgactcttggctctgcccgaggatgtggccgttccctgcctgggcaggggctccaaggaggggccatctggaaacttgtggacagagaagaagaccacgactggagaagccccctttctgagtgcaggggggctgcatgcgttgcctcctgagatcgaggctgcaggatatgctcagactctagaggcgtggaccaaggggcatggagcttcactccttgctggccagggagttggggactcagagggaccacttggggccagccagactggcctcaatggcggactcagtcacattgactgacggggaccagggcttgtgtgggtcgagagcgccctcatggtgctggtgctgttgtgtgtaggtcccctggggacacaagcaggcgccaatggtatctgggcggagctcacagagttcttggaataaaagcaacctcagaaca

SEQ ID NO: 292873 - DNA, 1434 bp, Homo sapiens
ggtgactctacaggatctcctctggggtgacaatggggacccgggacgacgagtacgactacctattcaaagtggtgctcatcggggactcaggcgtgggcaagagcaacctgctgtcgcgcttcacccgcaacgagttcaacccgggctctcagcgcccacccgctcctccgcacacagcagctcgcacaggcctcccacctctgcctgttgattgatgcagggagaagcccgtccccccctctcccctctcccctcccctctcctgcacgcaacgcgccctctcggccctccctgtccccctcctctgtctcgtctccccatctggtctggaacctgtttgcaagtgaagcaatatctccgtgttttgtatatacaaccgctcttgtagcctttggtttttgttaatgtagagaaacacagattctttatacactttgtaagatttacgccaaaccccagctctcgatctcttcttctccctgtggcccctgcgctgttgccccgtccccgtcaccccgcccgttactgaaatgtataatctgacttcctgtacaagaaaaaaaaaaaaaaaaaaaacaaaaaaaaaaaaaaaagggggggccgcgtttggaaggatgacctctaggaaaaaagtgttgctgaaggttatcatccggggaaattctggagtcggggaaagacattcactcatgacccagtattgtgaataagaaatttcacgcaagtcatgtacaaacgccacaataggagctgactttcctgaccaagggaggtgatggtggatgacagggctagtcacagaggcagataatgggacacagcaggacaggaaccggtctccagtcatcctcggtgtggcctctctacaagaggtgcagactgcatgcgtgtcggggtatacggattgtgattggccccccaagaacatttcaaaacccttagatagctgggacgagatgagtattctcaatcaaagggccacgtccccgagatccctgaaaaacttcccatttttgttggtgtggggaaaccaaagattgtgacctcgaaaaccagacaaatgttggccacaatacggggcaccaggggcatgggtgctacagggcaaaaaccaacgatttcccatacgtttggaagaccagtgtgcccagaggaggggccatatccaaacgttggagcaagggcggttacccagaaccgaatgggcacgggaacatgcacttaaacaccaggagaaccgggatggtagggacgcaggtaccaacaggaaattttccgtgaaccctaatacaaacgtggacacagtatttgacccggggccagggcctcggcgaacaaaacgctgaaattgctgaggggggcactgcaatttgacagcgcacagaagtctacaaaaaccaagaaccctggtaggcctcaccacaattacct

SEQ ID NO: 292874 - DNA, 1566 bp, Homo sapiens
tataaaaaccgtcctcgggcgcggcggggagaagccgagctgagcggatcctcacacgactgtgatccgattctttccagcggcttctgcaaccaagcgggtcttacccccggtcctccgcgtctccagtcctcgcacctggaaccccaacgtccccgagagtccccgaatccccgctcccaggctacctaagaggatgagcggtgctccgacggccggggcagccctgatgctctgcgccgccaccgccgtgctactgagcgctcagggcggacccgtgcagtccaagtcgccgcgctttgcgtcctgggacgagatgaatgtcctggcgcacggactcctgcagctcggccaggggctgcgcgaacacgcggagcgcacccgcagtcagctgagcgcgctggagcggcgcctgagcgcgtgcgggtccgcctgtcagggaaccgaggggtccaccgacctcccgttagcccctgagagccgggtggaccctgaggtccttcacagcctgcagacacaactcaaggctcagaacagcaggatccagcaactcttccacaaggtggcccagcagcagcggcacctggagaagcagcacctgcgaattcagcatctgcaaagccagtttggcctcctggaccacaagcacctagaccatgaggtggccaagcctgcccgaagaaagaggctgcccgagatggcccagccagttgacccggctcacaatgtcagccgcctgcaccggctgcccagggattgccaggagctgttccaggttggggagaggcagagtggactatttgaaatccagcctcaggggtctccgccatttttggtgaactgcaagatgacctcagatggaggctggacagtaattcagaggcgccacgatggctcagtggacttcaaccggccctgggaagcctacaaggcggggtttggggatccccacggcgagttctggctgggtctggagaaggtgcatagcatcacgggggaccgcaacagccgcctggccgtgcagctgcgggactgggatggcaacgccgagttgctgcagttctccgtgcacctgggtggcgaggacacggcctatagcctgcagctcactgcacccgtggccggccagctgggcgccaccaccgtcccacccagcggcctctccgtacccttctccacttgggaccaggatcacgacctccgcagggacaagaactgcgccaagagcctctctggaggctggtggtttggcacctgcagccattccaacctcaacggccagtacttccgctccatcccacagcagcggcagaagcttaagaagggaatcttctggaagacctggcggggccgctactacccgctgcaggccaccaccatgttgatccagcccatggcagcagaggcagcctcctagcgtcctggctgggcctggtcccaggcccacgaaagacggtgactcttggctctgcccgaggatgtggccgttcctggggacacaagcaggcgccaatggtatctgggcggagctcacagagttcttggaataaaagcaacctcagaaca

SEQ ID NO: 292875 - DNA, 827 bp, Homo sapiens
cgccggctccgcccccgtcgggtgtttgtggtggggctgcggagtcgccgatcccgccggaagcgccaggacaatggggacccgggacgacgagtacgactacctattcaaagtggtgctcatcggggactcaggcgtgggcaagagcaacctgctgtcgcgcttcacccgcaacgagttcaacctggagagcaagagcaccatcggcgtggagttcgccacccgcagcatccaggtggacggcaagaccatcaaggcgcagatctgggacaccgctggccaggagcgctaccgcgccatcacctccgcgtactaccgtggtgcagtgggcgccctgctggtgtacgacatcgccaagcacctgacctatgagaacgtggagcgctggctgaaggagctgcgggaccacgcagacagcaacatcgtcatcatgctggtgggcaacaagagtgacctgcgccacctgcgggctgtgcccactgacgaggcccgcgccttcgcagaaaagaacaacttgtccttcatcgagacctcagccttggattccactaacgtagaggaagcattcaagaacatcctcacaggtggccggggaccagatgggtgtgggtagggcaccagccaggcagggtggaacacggcctctgaaccttcgcttgttttgttcgtttgcttgtttttttctttttgtcgggcaggatggatttttgctcttgccaggctgagtgtggggcgactcagatattgaactcgcttccagttcggcatctctgctcgctccggtctggatacggtcgccccaccgtattggattaggaaggttccgg

SEQ ID NO: 292876 - DNA, 1414 bp, Homo sapiens
tataaaaaccgtcctcgggcgcggcggggagaagccgagctgagcggatcctcacacgactgtgatccgattctttccagcggcttctgcaaccaagcgggtcttacccccggtcctccgcgtctccagtcctcgcacctggaaccccaacgtccccgagagtccccgaatccccgctcccaggctacctaagaggatgagcggtgctccgacggccggggcagccctgatgctctgcgccgccaccgccgtgctactgagcgctcagggcggacccgtgcagtccaagtcgccgcgctttgcgtcctgggacgagatgaatgtcctggcgcacggactcctgcagctcggccaggggctgcgcgaacacgcggagcgcacccgcagtcagctgagcgcgctggagcggcgcctgagcgcgtgcgggtccgcctgtcagggaaccgaggggtccaccgacctcccgttagcccctgagagccgggtggaccctgaggtccttcacagcctgcagacacaactcaaggctcagaacagcaggatccagcaactcttccacaaggtggcccagcagcagcggcacctggagaagcagcacctgcgaattcagcatctgcaaagccagtttggcctcctggaccacaagcacctagaccatgaggtggccaagcctgcccgaagaaagaggctgcccgagatggcccagccagttgacccggctcacaatgtcagccgcctgcaccggctgcccagggattgccaggagctgttccaggttggggagaggcagagtggactatttgaaatccagcctcaggggtctccgccatttttggtgaactgcaagatgacctcagatggaggctggacagtaattcagaggcgccacgatggctcagtggacttcaaccggccctgggaagcctacaaggcggggtttggggatccccacggtaggtgtttctagtggggacagaggcaggggaggaagagggaccctcagaagtggccctgcctcatggagtggcctctcccactccaggcgagttctggctgggtctggagaaggtgcatagcatcacgggggaccgcaacagccgcctggccgtgcagctgcgggactgggatggcaacgccgagttgctgcagttctccgtgcacctgggtggcgaggacacggcctatagcctgcagctcactgcacccgtggccggccagctgggcgccaccaccgtcccacccagcggcctctccgtacccttctccacttgggaccaggatcacgacctctgccaaggaaccctcgcgcgtgggttccttgccagagtaggttaacccgggatcagatgctagagcttgctgaggctccacccttgtctgtagatgacagaatgtgggtggtgggaccagtcgg

SEQ ID NO: 292877 - DNA, 513 bp, Homo sapiens
  misc_feature (408)..(408): n is a, c, g, or t
  misc_feature (412)..(412): n is a, c, g, or t
  misc_feature (419)..(420): n is a, c, g, or t
  misc_feature (469)..(469): n is a, c, g, or t
cgccggctccgcccccgtcgggtgtttgtggtggggctgcggagtcgccgatcccgccggaagcgccaggacaatggggacccgggacgacgagtacgactacctattcaaagtggtgctcatcggggactcaggcgtgggcaagagcaacctgctgtcgcgcttcacccgcaacgagttcaacctggagagcaagagcaccatcggcgtggagttcgccacccgcagcatccaggtggacggcaagaccatcaaggcgcagatctgggacaccgctggccaggagcgctaccgcgccatcacctccgcgtactaccgtggtgcagtgggcgccctgctggtgtacgacatcgccaagcacctgacctatgagaacgtggagcgctggctgaaggaggggggggaggngggngagaggnngagggggaggagggggggggggaagaagagggaggggggggaggggggnggggggggagggaggagggggggggggggggagaaaagaagaag

SEQ ID NO: 292878 - DNA, 654 bp, Homo sapiens
cgccggctccgcccccgtcgggtgtttgtggtggggctgcggagtcgccgatcccgccggaagcgccaggacaatggggacccgggacgacgagtacgactacctattcaaagtggtgctcatcggggactcaggcgtgggcaagagcaacctgctgtcgcgcttcacccgcaacgagttcaacctggagagcaagagcaccatcggcgtggagttcgccacccgcagcatccaggtggacggcaagaccatcaaggcgcagatctgggacaccgctggccaggagcgctaccgcgccatcacctccgcgtgcgtgtcggcagcctgggcagggacgctgagattcgggggcgtgggcttgcagcgcgtgggcttggaaggatgtgtaggagttgggcaggagaaggggagagtgtgctcccaagaccagggagtgaggctggaagaacactttagccatgcgccgtgggaccctcaggctgaccagcgcccagccttcgccacaccagggtatctctgggtaccaagtgcagtgaggacctagctcaggccactccgccttgccgctgcccctgcccagccagcatcccagccttcctcctccctcagcttccctcctcactggtgcccacacctggtcccacacgcctcctg

SEQ ID NO: 292879 - DNA, 278 bp, Homo sapiens
cacctgcgaattcagcatctgcaaagccaggtaaccctaggatcaagggagaaaaggtccctctgatagctggaccccaggttgagagggaggtggtgagaactggacgtgtggctggggacgtggggccaggcaggacctgacaccctcctcccgtcccatcctagtttggcctcctggaccacaagcacctagaccatgaggtggccaagcctgcccgaagaaagaggctgcccgagatggcccagccagttgacccggctcacaatgtcagccgc

SEQ ID NO: 292880 - DNA, 417 bp, Homo sapiens
ggggctgcgcgaacacgcggagcgcacccgcagtcagctgagcgcgctggagcggcgcctgagcgcgtgcgggtccgcctgtcagggaaccgaggggtccaccgacctcccgttagcccctgagagccgggtggaccctgaggtccttcacagcctgcaggtacgtgtccccagggctggttctccgcgcccctagtggctctcctggcttggaagggtatggacaggagtggggcgtgggggcggggtgcgcaactgtggctccctgggcttccctgcgtcaagggatgggctccccccttaggaagccgaggagggaggttcgctcaaggccaggaattcaagaccacctaaagcaaaatagcgagacccccgtctcttctacacacacacacacacacacacaaaataaataaa

SEQ ID NO: 292881 - DNA, 572 bp, Homo sapiens
cttgacctggagagactcagatctccacgaaggcaggatgtgtgtgatctgcagaaagaataactggatgaagaaatgaatgagcagtggaatgaacgttttgtctgctgccctgtgccagtccagtgcctggcaagtctgcccaggggtgaaggaggtcaacaggcatgcctcttgtcctccctctcctaccttaggggtctatggctcagcccttctatccatcttgtgttggtttttaaaaggcagagagactatggtaaaatggtaataaaacaaacaacaaccaccaccaccaccaccaaaaaaaaacagagctgggatcacacacacctggtcttcaatccctggtttcatctctgcccttaactaaaccagctgtgtgactttgggcaagtgactgaactctctgaaactccatttcgtcatgcatgctggggatggctaacagtagtccttacctcacagagacactacgaggattaaatgatgaaatgcatggcacatgaccaacctagagtaagtgtctgaatgtgcggtgattctatcagtcaggacattgttggttgcta

SEQ ID NO: 292882 - DNA, 2726 bp, Homo sapiens
gcaattgcaagagcaaagattcttccttttcccttttttcctgggggggtggggggtggggtggggggagggagcgcccccagacattccaggacatcaccccctgccccaagcacgcaataaacactgacaagaaaaagtttttatttcctggttcaactttttttttttcccctggaatatagactgaagaatgggaataaacacgaattaaataacaaagcgaggccgcgcacgccgggatgcgcctggctgcagccggcgaggctatggtctccccgccctgaagccagccccggcgtctttctccagctcgtttcctttcccggccttttcttttttttttttttttttaattttcttttttaaaaagacgccccctccagccccctcgccggtgaccttggccgcctcggatgctctgattccacgcggctcgctctaacttgcccccgcgccggccgggcccatggccgcgtcggaggacgggagcggctgcctcgtgtcgcggggccgctcgcagagtgaccccagcgtcctcaccgactcctcggccacctcctccgcggacgccggggagaacccagatgagatggaccaaacgcccccggcgcgtcctgaatatctggtctcagggattcgaactccccctgtgaggaggaacagcaaactggccaccctgggcaggatcttcaaaccctggaaatggaggaaaaagaaaaacgaaaaactgaagcagacaacgtcagcgctggagaagaagatggccggcaggcaaggccgagaggagctcatcaagaaggggctgctggagatgatggagcaggatgctgaaagcaaaacttgcaaccccgatggaggaccccgatctgtacagagtgaaccacccactcccaagtcggagacgctgacttcagaagatgcccagcccggaagccccttggccactgggacggaccaggtctccctggacaagccactgtcctcagctgcccacttggacgatgcagccaagatgccttctgcatccagtggtgaagaagcagacgctggcagcctcctgcccaccaccaatgagctctcccaagccttagctggggctgactccctggacagtcctcccagacctctggagagatccgtgggccagctccccagccccccactgctgcccactccgccacccaaggcaagctccaaaaccacaaaaaatgtcacaggccaagccacactcttccaagcctccagcatgaagagtgccgacccttccctccggggccagctctccacacccacggggtctccgcatctcaccacggtccaccggcctcttcccccaagccgcgtcattgaggagctgcacagggcgctggccacgaagcaccgccaggacagttttcaaggaagagaaagtaaagggtctccaaagaagcggctggatgtccgtctgtcgagaacgtccagcgtggagcggggcaaggagagggaggaggcttggagctttgacggggcattggagaacaagcgaactgccgctaaggaatctgaggagaacaaggagaacctgatcataaattctgaactcaaagacgacttgcttttgtatcaggacgaggaggcgctgaacgactccattatttctggaacactgccacggaaatgcaagaaggagctcctggccgtgaagctaaggaaccggccaagcaaacaggaactagaagaccggaacattttccccagaaggactgatgaagaaagacaggagatccggcagcagatcgagatgaagctttccaaacggctgagccaaagacctgccgtggaagagctggagagaagaaatatcttgaaacaaaggaatgatcagacagagcaggaagaaagaagagaaatcaagcaaagattgacaagaaagcttaatcagagacccactgttgatgaattaagagacagaaaaattctgatacgattcagtgattacgtggaagtagcaaaagcgcaggactatgacaggagggcagacaaaccctggacgagactgtcagcagcagataaggcagcaattcgtaaagaattaaatgagtacaaaagtaatgaaatggaggtacatgcatcaagcaagcacttgacaagattccacaggccatagagattttcttctgagaagaatttgtgtttaattttttgataccaacactgaacattcatcagggaactttcctgaagttcagctcaagactaccctacctgctgtgtttgtgagaagagtaggatcacacacacaggtgcaatcttgaccacacttacctgcaagaggagtaaccagaggacacacttccttccttctttggtgtctgaggagtgtgaactgttggggtcagttaagacccaacataactctatcagaagaaaactgttgtttgcctttcaaccttgttttacagttctgcagtgtaatggaggacgggcaacgtgcatgtgcaggctcaccactcccaggcctctgacatgagggacatgtgacagtgtcattcagtattatgttcaaaagacatttttatcctgatcataattaatttgaaaactctttaagttcatgttatacaagatgatttactgtattatacttttccttttttatataatgtctaacaaaaaatacagctgcaacattttgattcctgttaattttgttctttaattaaatgactacttattgcaggaaa

SEQ ID NO: 292883 - DNA, 1174 bp, Homo sapiens
gctggctggaagagattcccagtttttattcagcgctcgagctgggctgcatgcttgctgacaagaggcgggaggccccttagacgtctttagacactccccctgtgctgggctgggcacaggcggctctactcagcagttcagcaggcagaaagccggaaggagagatcagtgctcccaaggctggtgtctcccgtgctgacaacggaggcagtgctgggaagcatgaatctcccagcatctctggatccagaagcctgaaaacaggtggtgctacccacccctccctaagccaatgggcaggaaaaagaatttcctgaacagatctcctcgctgcttaaacacactgctccggtgaacagtccagaccaggcaaagtttgggcgacagatcagaaaaatgaagacctgcacatgtgggagctggagcaaggactagtctagtattagctctgtgacgggagagctttgactgtcacctggaagtctgacttgattttgccagcaagaggcaacaaccaaaggttcactttctctcctcccaattttgggaggcgatctataggggtttgccagccacctctcatccttgcagaccccaggtggaatttgcaggcagccactatggtgcaaaatgtaattttagtgtttttccgcagacggctgagccaaagacctgccgtggaagagctggagagaagaaatatcttgaaacaaaggaatgatcagacagagcaggaagaaagaagagaaatcaagcaaagattgacaagaaagcttaatcagagacccactgttgatgaattaagagacagaaaaattctgatacgattcagtgattacgtggaagtagcaaaagcgcaggactatgacaggagggcagacaaaccctggacgagactgtcagcagcagataaggcagcaattcgtaaagaattaaatgagtacaaaagtaatgaaatggaggtacatgcatcaagcaagcacttgacaagtatcaccccatggagtcattgttctaataatcaccaattcagactcagatcctcgtggtctatcgagcatgctgcttgctgtctgtgcagctcccatttccccttcttcctgatagacttggagctgtgtgcctccactccaaggctgcctgcctactgtaaacactattccacctggta

SEQ ID NO: 292884 - DNA, 1587 bp, Homo sapiens
gctggctggaagagattcccagtttttattcagcgctcgagctgggctgcatgcttgctgacaagaggcgggaggccccttagacgtctttagacactccccctgtgctgggctgggcacaggcggctctactcagcagttcagcaggcagaaagccggaaggagagatcagtgctcccaaggctggtgtctcccgtgctgacaacggaggcagtgctgggaagcatgaatctcccagcatctctggatccagaagcctgaaaacaggtggtgctacccacccctccctaagccaatgggcaggaaaaagaatttcctgaacagatctcctcgctgcttaaacacactgctccggtgaacagtccagaccaggcaaagtttgggcgacagatcagaaaaatgaagacctgcacatgtgggagctggagcaaggactagtctagtattagctctgtgacgggagagctttgactgtcacctggaagtctgacttgattttgccagcaagaggcaacaaccaaaggttcactttctctcctcccaattttgggaggcgatctataggggtttgccagccacctctcatccttgcagaccccaggtggaatttgcaggcagccactatggtgcaaaatgtaattttagtgtttttccgcagacggctgagccaaagacctgccgtggaagagctggagagaagaaatatcttgaaacaaaggaatgatcagacagagcaggaagaaagaagagaaatcaagcaaagattgacaagaaagcttaatcagagacccactgttgatgaattaagagacagaaaaattctgatacgattcagtgattacgtggaagtagcaaaagcgcaggactatgacaggagggcagacaaaccctggacgagactgtcagcagcagataaggcagcaattcgtaaagaattaaatgagtacaaaagtaatgaaatggaggtacatgcatcaagcaagcacttgacaagattccacaggccatagagattttcttctgagaagaatttgtgtttaattttttgataccaacactgaacattcatcagggaactttcctgaagttcagctcaagactaccctacctgctgtgtttgtgagaagagtaggatcacacacacaggtgcaatcttgaccacacttacctgcaagaggagtaaccagaggacacacttccttccttctttggtgtctgaggagtgtgaactgttggggtcagttaagacccaacataactctatcagaagaaaactgttgtttgcctttcaaccttgttttacagttctgcagtgtaatggaggacgggcaacgtgcatgtgcaggctcaccactcccaggcctctgacatgagggacatgtgacagtgtcattcagtattatgttcaaaagacatttttatcctgatcataattaatttgaaaactctttaagttcatgttatacaagatgatttactgtattatacttttccttttttatataatgtctaacaaaaaatacagctgcaacattttgattcctgttaattttgttctttaattaaatgactacttattgcaggaaa

SEQ ID NO: 292885 - DNA, 2135 bp, Homo sapiens
  misc_feature (2135)..(2135): n is a, c, g, or t
gctggctggaagagattcccagtttttattcagcgctcgagctgggctgcatgcttgctgacaagaggcgggaggccccttagacgtctttagacactccccctgtgctgggctgggcacaggcggctctactcagcagttcagcaggcagaaagccggaaggagagatcagtgctcccaaggctggtgtctcccgtgctgacaacggaggcagtgctgggaagcatgaatctcccagcatctctggatccagaagcctgaaaacaggtggtgctacccacccctccctaagccaatgggcaggaaaaagaatttcctgaacagatctcctcgctgcttaaacacactgctccggtgaacagtccagaccaggcaaagtttgggcgacagatcagaaaaatgaagacctgcacatgtgggagctggagcaaggactagtctagtattagctctgtgacgggagagctttgactgtcacctggaagtctgacttgattttgccagcaagaggcaacaaccaaaggttcactttctctcctcccaattttgggaggcgatctataggggtttgccagccacctctcatccttgcagaccccaggtggaatttgcaggcagccactatggtgcaaaatgtaattttagtgtttttccgcagacggctgagccaaagacctgccgtggaagagctggagagaagaaatatcttgaaacaaaggaatgatcagacagagcaggaagaaagaagagaaatcaagcaaagattgacaagaaagcttaatcagagacccactgttgatgaattaagagacagaaaaattctgatacgattcagtgattacgtggaagtagcaaaagcgcaggactatgacaggagggcagacaaaccctggacgagactgtcagcagcagataaggcagcaattcgtaaagaattaaatgagtacaaaagtaatgaaatggaggtacatgcatcaagcaagcacttgacaagattccacaggccatagagattttcttctgagaagaatttgtgtttaattttttgataccaacactgaacattcatcagggaactttcctgaagttcagctcaagactaccctacctgctgtgtttgtgagaagagtaggatcacacacacaggtgcaatcttgaccacacttacctgcaagaggagtaaccagaggacacacttccttccttctttggtgtctgaggagtgtgaactgttggggtcagttaagacccaacataactctatcagaagaaaactgttgtttgcctttcaaccttgttttacagttctgcagtgtaatggaggacgggcaacgtgcatgtgcaggctcaccactcccaggcctctgacatgagggacatgtgacagtgtcattcagtattatgttcaaaagacatttttatcctgatcataattaatttgaaaactctttaagttcatgttatacaagatgatttactgtattatacttttccttttttatataatgtctaacaaaaaatacagctgcaacattttgattcctgttaattttgttctttaattaaatgactacttattgcaggaaaaaaaaaaaaaaaaaaaaaaaaaaaaaaaaaaaaaaaaaaaaaaaaaaaaaaaaaaaaaaaaaaaaaaaaaaaaaagggggggcggcgccacaaaaaatacacacgcagagggggcagaacgagcaaaataccgcacctagatactatattacagaagaggggacccagcaaacagagagggtaataataaaaaacagcagaagcagggacgcgcgtttaacaaaacccagcatggggcaggacaacacaacacagcaagagaaacacatctgcgagaagaacaaccccccctcaggtatggggggggacagacaacaatcgaggaggagaacgacacccacaatacagcaagcagaggaatgaagccgaccgccggccgaagggaacacacaaaatcaataggcagcgaacgagctaggaagggagacaaaaaccaacgcgccaccatcagcgcggccgagcagaagaaagactgcaggcaaccgagaggagagaaacgaacgagcgcaaacatatctacagcaggcggaaagaacaaacaagggggn

SEQ ID NO: 292886 - DNA, 321 bp, Homo sapiens
gtaagtgggacccgtccctggcttggaagggcacggtgctgggaatgcagaatggaaagtctcacatgagcccaggaagcccatcagaaacagtgtagaatccaaggagggccgtgttcagatgaagcctgcaaggttggagagacaccccatgtcaggagccattccattggtccagcccccaggggcacgggagaccccattactgagctgaagagctccccctcatggcaccactcctctctggggaatgtctaacagagctgggtgtgcatgaatctggtggtttatcccaattcctttaaagtggtagcagtggtt

SEQ ID NO: 292887 - DNA, 389 bp, Homo sapiens
taaaaagacgccccctccagccccctcgccggtgaccttggccgcctcggatgctctgattccacgcggctcgctctaacttgcccccgcgccggccgggcccatggccgcgtcggaggacgggagcggctgcctcgtgtcgcggggccgctcgcagagtgaccccagcgtcctcaccgactcctcggccacctcctccgcggacgccggggagaacccaggtaacgggctgggcgggggcggcgggcgggtcggggaggcccgaggcaggtggcgctgagagcaggaccccgcgaggctccgcgccccgcctgcattcggggagccgcggcaggaacccgcgctcggccccgcggttcctatccccagtctcgcagggctggggcgcc

SEQ ID NO: 292888 - DNA, 265 bp, Homo sapiens
gatacttaactatgatgatctttaattttagcttaatcagagacccactgttgatgaattaagagacagaaaaattctgatacgattcagtgattacgtggaagtagcaaaagcgcaggactatgacaggagggcagacaaaccctggacgagactgtcagcagcagataaggtacctaactgcctgtgctggtggggggtgttggatgatataataaaggcaaaatatgtcatgccagggagtttattcatagacaatgggagc

SEQ ID NO: 292889 - DNA, 2516 bp, Homo sapiens
atctgcctgactttcacttttggtgctggagaactcagaaggtggctcagccctctggtccacacttggtgggcagctcggatgccccaggcagcccgggcacagtgagcttagtccccttcaccccctccgcagagctctggggcatccgcacagtcactcctggacacaagataaggaggagtttccccgaggcatcacagggcttcccgggactgagggactgactcaactggttattggacagtgccccacccccaatccggctgaggggcaggaaggcagaaggtcttggtggccctggatcttgtggctgcaatcggttccaaacagcagttaggtcagcagtccgctcagccgaggcagctctgttcatggcgttctcgaagctcttggagcaagccggaggcgtgggcctcttccagaccctgcaggtgctcaccttcatcctcccctgcctcatgataccttcccagatgctcctggagaacttctcagccgccatcccaggccaccgatgctggacacacatgctggacaatggctctgcggtttccacaaacatgacccccaaggcccttctgaccatctccatcccgccaggccccaaccaggggccccaccagtgccgccgcttccgccagccacagtggcagctcttggaccccaatgccacggccaccagctggagcgaagctgacacggagccgtgtgtggacggctgggtctatgaccgcagcgtcttcacctccaccatcgtggccaagtgggacctggtgtgcagctcccagggcttgaagcccctaagccagtccatcttcatgtccgggatcctggtgggctcctttatctggggcctcctctcctaccggtttgggaggaagccgatgctgagctggtgctgcctgcagttggccgtggcgggcaccagcaccatcttcgccccaacattcgtcatctactgcggcctgcggttcgtggccgcttttgggatggccggcatctttctgagttcactgacactgatggtggagtggaccacgaccagcaggagggcggtcaccatgacggtggtgggatgtgccttcagcgcaggccaggcggcgctgggcggcctggcctttgccctgcgggactggaggactctccagctggcagcatcagtgcccttctttgccatctccctgatatcctggtggctgccagaatccgcccggtggctgattattaagggcaaaccagaccaagcacttcaggagctcagaaaggtggccaggataaatggccacaaggaggccaagaacctgaccatagaggtgctgatgtccagcgtgaaggaggaggtggcctctgcaaaggagccgcggtcggtgctggacctgttctgcgtgcccgtgctccgctggaggagctgcgccatgctggtggtgaatttctctctattgatctcctactatgggctggtcttcgacctgcagagcctgggccgtgacatcttcctcctccaggccctcttcggggccgtggacttcctgggccgggccaccactgccctcttgctcagtttccttggccgccgcaccatccaggcgggttcccaggccatggccggcctcgccattctagccaacatgctggtgccgcaagatttgcagaccctgcgtgtggtctttgctgtgctgggaaagggatgttttgggataagcctaacctgcctcaccatctacaaggctgaactctttccaacgccagtgcggatgacagcagatggcattctgcatacagtgggccggctgggggctatgatgggtcccctgatcctgatgagccgccaagccctgcccctgctgcctcctctcctctatggcgttatctccattgcttccagcctggttgtgctgttcttcctcccggagacccagggacttccgctccctgacactatccaggacctggagagccagaaatcaacagcagcccagggcaaccggcaagaggccgtcactgtggaaagtacctcgctctagaaattgtgcctgcatggagcccctttagtcaaagactcctggaaaggagttgcctcttctccaatcagagcgtggaggcgagttgggcgacttcaagggcctggcatggcagaggccaggcagccgtggccgagtggacagcgtggccgtctgctgtggctgaaggcagcttccacagctcactcctcttctccctgccctgatcagattccccaccttacccgggccctacaggagcctgtgcagatggccatgcccaaccaataacgagacggttcccctccctttccctgccaggctcatgtctttacaccttcactcagccacgccaaccagagactgggttccaatctcaccccaccacatacagagccctcatctgtgaaatgagaatgatcacgtgacccaccccccagggcaggtatcagggtgaactgatcttagcaccggccaaataaatggaacctgctgagagagctgccagataca

SEQ ID NO: 292890 - DNA, 2506 bp, Homo sapiens
atctgcctgactttcacttttggtgctggagaactcagaaggtggctcagccctctggtccacacttggtgggcagctcggatgccccaggcagcccgggcacagtgagcttagtccccttcaccccctccgcagagctctggggcatccgcacagtcactcctggacacaagataaggaggagtttccccgaggcatcacagggcttcccgggactgagggactgactcaactggttattggacagtgccccacccccaatccggctgaggggcaggaaggcagaaggtcttggtggccctggatcttgtggctgcaatcggttccaaacagcagttaggtcagcagtccgctcagccgaggcagctctgttcatggcgttctcgaagctcttggagcaagccggaggcgtgggcctcttccagaccctgcaggtgctcaccttcatcctcccctgcctcatgataccttcccagatgctcctggagaacttctcagccgccatcccaggccaccgatgctggacacacatgctggacaatggctctgcggtttccacaaacatgacccccaaggcccttctgaccatctccatcccgccaggccccaaccaggggccccaccagtgccgccgcttccgccagccacagtggcagctcttggaccccaatgccacggccaccagctggagcgaagctgacacggagccgtgtgtggacggctgggtctatgaccgcagcgtcttcacctccaccatcgtggccaagtgggacctggtgtgcagctcccagggcttgaagcccctaagccagtccatcttcatgtccgggatcctggtgggctcctttatctggggcctcctctcctaccggtttgggaggaagccgatgctgagctggtgctgcctgcagttggccgtggcgggcaccagcaccatcttcgccccaacattcgtcatctactgcggcctgcggttcgtggccgcttttgggatggccggcatctttctgagttcactgacactgatggtggagtggaccacgaccagcaggagggcggtcaccatgacggtggtgggatgtgccttcagcgcaggccaggcggcgctgggcggcctggcctttgccctgcgggactggaggactctccagctggcagcatcagtgcccttctttgccatctccctgatatcctggtggctgccagaatccgcccggtggctgattattaagggcaaaccagaccaagcacttcaggagctcagaaaggtggccaggataaatggccacaaggaggccaagaacctgaccatagaggtgctgatgtccagcgtgaaggaggaggtggcctctgcaaaggagccgcggtcggtgctggacctgttctgcgtgcccgtgctccgctggaggagctgcgccatgctggtggtgaatttctctctattgatctcctactatgggctggtcttcgacctgtcccccaaccccagccctgggcagccccgcaccaagccagcagggccggggacttgtagggagcccagggtcccctctgctccaggctggctggccgcacactgactagcccctgggtaccctccagggcaaaccccactctcacccccttcctgtacccagatttgcagaccctgcgtgtggtctttgctgtgctgggaaagggatgttttgggataagcctaacctgcctcaccatctacaaggctgaactctttccaacgccagtgcggatgacagcagatggcattctgcatacagtgggccggctgggggctatgatgggtcccctgatcctgatgagccgccaagccctgcccctgctgcctcctctcctctatggcgttatctccattgcttccagcctggttgtgctgttcttcctcccggagacccagggacttccgctccctgacactatccaggacctggagagccagaaatcaacagcagcccagggcaaccggcaagaggccgtcactgtggaaagtacctcgctctagaaattgtgcctgcatggagcccctttagtcaaagactcctggaaaggagttgcctcttctccaatcagagcgtggaggcgagttgggcgacttcaagggcctggcatggcagaggccaggcagccgtggccgagtggacagcgtggccgtctgctgtggctgaaggcagcttccacagctcactcctcttctccctgccctgatcagattccccaccttacccgggccctacaggagcctgtgcagatggccatgcccaaccaataacgagacggttcccctccctttccctgccaggctcatgtctttacaccttcactcagccacgccaaccagagactgggttccaatctcaccccaccacatacagagccctcatctgtgaaatgagaatgatcacgtgacccaccccccagggcaggtatcagggtgaactgatcttagcaccggccaaataaatggaacctgctgagagagctgccagataca

SEQ ID NO: 292891 - DNA, 1891 bp, Homo sapiens
caggctcctggtagtgcggggggcacctgggtgggcacctctgaatgctggcatctggacattcgccagcctcgcctggtcccggccctactgacccattagccgtgactccagacaactcagctgcagggggaaatcagggtgggacctggtgtgcagctcccagggcttgaagcccctaagccagtccatcttcatgtccgggatcctggtgggctcctttatctggggcctcctctcctaccggtttgggaggaagccgatgctgagctggtgctgcctgcagttggccgtggcgggcaccagcaccatcttcgccccaacattcgtcatctactgcggcctgcggttcgtggccgcttttgggatggccggcatctttctgagttcactgacactgatggtggagtggaccacgaccagcaggagggcggtcaccatgacggtggtgggatgtgccttcagcgcaggccaggcggcgctgggcggcctggcctttgccctgcgggactggaggactctccagctggcagcatcagtgcccttctttgccatctccctgatatcctggtggctgccagaatccgcccggtggctgattattaagggcaaaccagaccaagcacttcaggagctcagaaaggtggccaggataaatggccacaaggaggccaagaacctgaccatagaggtgctgatgtccagcgtgaaggaggaggtggcctctgcaaaggagccgcggtcggtgctggacctgttctgcgtgcccgtgctccgctggaggagctgcgccatgctggtggtgaatttctctctattgatctcctactatgggctggtcttcgacctgcagagcctgggccgtgacatcttcctcctccaggccctcttcggggccgtggacttcctgggccgggccaccactgccctcttgctcagtttccttggccgccgcaccatccaggcgggttcccaggccatggccggcctcgccattctagccaacatgctggtgccgcaagatttgcagaccctgcgtgtggtctttgctgtgctgggaaagggatgttttgggataagcctaacctgcctcaccatctacaaggctgaactctttccaacgccagtgcggatgacagcagatggcattctgcatacagtgggccggctgggggctatgatgggtcccctgatcctgatgagccgccaagccctgcccctgctgcctcctctcctctatggcgttatctccattgcttccagcctggttgtgctgttcttcctcccggagacccagggacttccgctccctgacactatccaggacctggagagccagaaatcaacagcagcccagggcaaccggcaagaggccgtcactgtggaaagtacctcgctctagaaattgtgcctgcatggagcccctttagtcaaagactcctggaaaggagttgcctcttctccaatcagagcgtggaggcgagttgggcgacttcaagggcctggcatggcagaggccaggcagccgtggccgagtggacagcgtggccgtctgctgtggctgaaggcagcttccacagctcactcctcttctccctgccctgatcagattccccaccttacccgggccctacaggagcctgtgcagatggccatgcccaaccaataacgagacggttcccctccctttccctgccaggctcatgtctttacaccttcactcagccacgccaaccagagactgggttccaatctcaccccaccacatacagagccctcatctgtgaaatgagaatgatcacgtgacccaccccccagggcaggtatcagggtgaactgatcttagcaccggccaaataaatggaacctgctgagagagctgccagataca

SEQ ID NO: 292892 - DNA, 1275 bp, Homo sapiens
ctggaagagcctgacgctggggttgtgtcctgagtttggcaggcttctgggatcgctggccgagacaagcccaggattgtcctccggggttggccatgtcctcccaggcagctcctggtgggaggtgctgttgctgttggggtgccctctccccggcagggcagggacctgacttccagccttgcccgcagtttctctctattgatctcctactatgggctggtcttcgacctgcagagcctgggccgtgacatcttcctcctccaggccctcttcggggccgtggacttcctgggccgggccaccactgccctcttgctcagtttccttggccgccgcaccatccaggcgggttcccaggccatggccggcctcgccattctagccaacatgctggtgccgcaagatttgcagaccctgcgtgtggtctttgctgtgctgggaaagggatgttttgggataagcctaacctgcctcaccatctacaaggctgaactctttccaacgccagtgcggatgacagcagatggcattctgcatacagtgggccggctgggggctatgatgggtcccctgatcctgatgagccgccaagccctgcccctgctgcctcctctcctctatggcgttatctccattgcttccagcctggttgtgctgttcttcctcccggagacccagggacttccgctccctgacactatccaggacctggagagccagaaatcaacagcagcccagggcaaccggcaagaggccgtcactgtggaaagtacctcgctctagaaattgtgcctgcatggagcccctttagtcaaagactcctggaaaggagttgcctcttctccaatcagagcgtggaggcgagttgggcgacttcaagggcctggcatggcagaggccaggcagccgtggccgagtggacagcgtggccgtctgctgtggctgaaggcagcttccacagctcactcctcttctccctgccctgatcagattccccaccttacccgggccctacaggagcctgtgcagatggccatgcccaaccaataacgagacggttcccctccctttccctgccaggctcatgtctttacaccttcactcagccacgccaaccagagactgggttccaatctcaccccaccacatacagagccctcatctgtgaaatgagaatgatcacgtgacccaccccccagggcaggtatcagggtgaactgatcttagcaccggccaaataaatggaacctgctgagagagctgccagataca

SEQ ID NO: 292893 - DNA, 1545 bp, Homo sapiens
atctgcctgactttcacttttggtgctggagaactcagaaggtggctcagccctctggtccacacttggtgggcagctcggatgccccaggcagcccgggcacagtgagcttagtccccttcaccccctccgcagagctctggggcatccgcacagtcactcctggacacaagataaggaggagtttccccgaggcatcacagggcttcccgggactgagggactgactcaactggttattggacagtgccccacccccaatccggctgaggggcaggaaggcagaaggtcttggtggccctggatcttgtggctgcaatcggttccaaacagcagttaggtcagcagtccgctcagccgaggcagctctgttcatggcgttctcgaagctcttggagcaagccggaggcgtgggcctcttccagaccctgcaggtgctcaccttcatcctcccctgcctcatgataccttcccagatgctcctggagaacttctcagccgccatcccaggccaccgatgctggacacacatgctggacaatggctctgcggtttccacaaacatgacccccaaggcccttctgaccatctccatcccgccaggccccaaccaggggccccaccagtgccgccgcttccgccagccacagtggcagctcttggaccccaatgccacggccaccagctggagcgaagctgacacggagccgtgtgtggacggctgggtctatgaccgcagcgtcttcacctccaccatcgtggccaagtgggacctggtgtgcagctcccagggcttgaagcccctaagccagtccatcttcatgtccgggatcctggtgggctcctttatctggggcctcctctcctaccggtttgggaggaagccgatgctgagctggtgctgcctgcagttggccgtggcgggcaccagcaccatcttcgccccaacattcgtcatctactgcggcctgcggttcgtggccgcttttgggatggccggcatctttctgagttcactgacactgatggtggagtggaccacgaccagcaggagggcggtcaccatgacggtggtgggatgtgccttcagcgcaggccaggcggcgctgggcggcctggcctttgccctgcgggactggaggactctccagctggcagcatcagtgcccttctttgccatctccctgatatcctggtggctgccagaatccgcccggtggctgattattaagggcaaaccagaccaagcacttcaggagctcagaaaggtggccaggataaatggccacaaggaggccaagaacctgaccatagaggtgagatgctgctgtctgcgagacttgacctgggacaggacgtgcactgagggatcatccgtgtggcctccaacagcaccacccactccagcaccacctccaccagcaccaccaccagcatctccacagacaccaccaacacctccatcaccacctccacacagacaccaccaccaccaccaccaatcccgataccatcaccaacagcaccaccactgtccacacccac

SEQ ID NO: 292894 - DNA, 488 bp, Homo sapiens
tggtggagtggaccacgaccagcaggagggcggtcaccatgacggtggtgggatgtgccttcagcgcaggccaggcggcgctgggcggcctggcctttgccctgcgggactggaggactctccagctggcagcatcagtgcccttctttgccatctccctgatatcctggtcagtatgatgtgggaccttttccttaggagacccagggtgggagggggactcttcactttcacctctctggctggcagtaggtccagagacctggagtgccacagaagggccatggcatgagcggcaccctcgctagggagggacattggtgattggcagtcctgggctaagtgttgcagcccgaggtccgtggctcccatccagcccagacaggccaagatgggctggcacagcattggctcaaatggtgatttaaaaaatacatttgtaactagttgctaacatttaaaaatcagaagattttcaaaaacaaaca

SEQ ID NO: 292895 - DNA, 842 bp, Homo sapiens
ggcacttcagtagaaattaaatcagtttggggacacatcaggctgctaaattctgtactagaatccaacagcaaatgagtcattcttggaagtggaagaactccatgatttcacagcctagaacactaagtatgaccaccaacgcaccatttcaactatctaacaaccaatgggagagtcaattgttctcatcccaactgccaaaagcaaaaggcaggccatcacaagttggcttgttcaccttctaaagacatgactttatttctgcctaagtcatctatataagcgaatctaataaatacaataaaatgtaacccaacaaaattctcatgtcactttttacagacatgggtatatgagaaccatggaggtgctaaagaaaaatagaagcattttcttattatcatattaccatgaaattaaatttatgtctgttctaaggaaagaaactaaatgtcctgtttgatattgatgagtaggcctactcattctctaccaaaatcctaaaaaaaataaaaataaaatttcacttaaaaaataatttcctaggagggcacagtgctgtaatcccagcaatttgggaggccgaggcaggagaatcgcttaaacccaggaggcagaggttgcagtgagccaagatcgcgccactgcactccagcctggcgacagagcgagactccgtctcaagaaaaaaaaaaaattccatcttttagattatgtgctaataattctcttttaagtgttggaacaggggaaagttcacattatagagtacaaaggatcaaaatggatccctccaaaatggacatccccccagaaaaatgcttataactttgaaacac

SEQ ID NO: 292896 - DNA, 2079 bp, Homo sapiens
  misc_feature (19)..(19): n is a, c, g, or t
gccgccgggggagggagcngcgagggcgagggcgaggacggcggcccgccccggggaggcaggctggcaggtggacaggcgggcaaggacagctccgcgagccccctacaactcgtttccttccgttcaccttcgcagggcggcgactggcggcgcgatggacctgaccgggctcctgctggacgaagaaggcaccttctccctcgccggcttccaggacttcacgttcctcccaggacaccagaagctgagtgcccggatccgaaggaggctctactatggctgggactgggaagccgactgtagcctggaggagctctccagcccggtggcagacattgctgtcgaactgctccagaaggcagcccccagccctattcgccgactccagaagaaatacgtagctcatgtgtcccgggaggcatgcatctccccatgtgctatgatgctggctctggtgtacattgaacggctccggcaccgaaacccagactacttgcagcatgtgtcatcctctgacttgttcctgatctccatgatggtggccagtaagtacctctatgatgaaggggaggaggaggaggtcttcaacgacgaatggggagctgctgggggtgtggccgtgcccactctcaatgccttggagaggggcttcctgagtgccatggattggcatctctacactgaccctcgggagatctttgaggtgctgagctggttggagagctgtgtggctgagcagcagggacggtggcgaggctggtacacctacacagacctgtgtgtgctgctggagcagccgacctggcagttggccctgggctccctctgccagcggctggtaaagctgtcttgcctgttagctgtggcatatgtgagcagtgtggccctggctgtggcatcggtggccgtaatacatcagtctttggggctgtcctgcatccctacacctgggccgcctgaccttggactgacctcccgttgcctcctggagccctgcataccttctgtgccacaatgcctgccgtctcccgctaatgtctccagctgcctggaaggcagcatggggctgcggtcactctggggcagtcttctggcctcactgactcctccaccattgcctcccccagacccccctgcccctcccactcttcttcataactgccacctttgccagaagctccagagagactccccaacctgccatgcctgcctccaccccaaccgtacagtccccactgcgctgtccagcccctggtaccatacctatggcctggctcccccctggccttggagcccggtgcccctttcacttcctcagcctcagcaatgttcccttttcagtgtcatggagctggctcgcctcaagtctttcgttttcccaggctaggtagggctgtgaggaatgcattaagagggtttgggagtttctgagaacctggaggagcaaagcttgattcagatcctgtctgcctcgctgggtccttggcaggtcccctgtcctcctgggtgggagcttatggggtggtggggcagaaggactgaaggtaattcactcctagatcgcagtggctggctgcttggccaggacagtgatgccgccagggagagcttccgcttggtgaccagggacatgtcccagatggacatagaagcccctctctgcctccctgggattttttagacttttacttttgatttccctaggatggaagagtataggtgggagataagggaagtggggtgagaggagaaaggaaatgttggcatgggcctgtgtgatgtccctgaggcagaagagccggggactgatgggttcaggtgggagctgctgggtgaggcagggaacccttttcactcccattccttagctttagtctaatggagccaaggactgctgggaccttcaaccctgatcttttgtcttccagtcttctcttagtgtcctgctcctaggtttccctctcttctggttcttctcccaggtattctcttcccaggcctctctggccactgctttgtatcagggtttttcacgcttttgtagaactgaggtttcaataaacagtttcagttgca

SEQ ID NO: 292897 - DNA, 640 bp, Homo sapiens
gctgccccggtatccccgtgtggggcaggaagtgggcttccagattcccagtatccccggtagggtctgcttctgctcgctcgggaagggcggtggccgtcccattactcaaccaaccctcaacgcactggtcctcccagttccctcccctcagtgggtaaacaaacacacaccagcgcttgactcgacagactcgaaaacaacatctactcagaaaagttgtttctttcctatctccttaaactttcccacttccacatatcggagcttcttcccacctcggcctactcaagcatgagatccggaggcgggaggtgggtttcaacacaaaaccttgggtagatgcagtttacttttgggtggacgtgttgacacgttttgaggccttacattcgcttaagatcacagaatttcctcagtagccttaggtttaaaagttcaaattacagtaaaaaaaaaaaacaccctgagtttctcttccttttcatagttcacccactgctaaatttcctgtgtgtcctttcagacgcttttcatatgcattgctgagtatgtataatatctctcctaaaaagcaactgggaacaacttcctgttgtgcgtttcgtcttattcacattaacttctccattgctacgcc

SEQ ID NO: 292898 - DNA, 293 bp, Homo sapiens
ggcagtccttggctccattagactaaagctaaggaatgggagtgaaaagggttccctgcctcacccagcagctcccacctgaacccatcagtctaatggagccaaggactgctgggaccttcaaccctgatcttttgtcttccagtcttctcttagtgtcctgctcctaggtttccctctcttctggttcttctcccaggtattctcttcccaggcctctctggccactgctttgtatcagggtttttcacgcttttgtagaactgaggtttcaataaacagtttcagttgca

SEQ ID NO: 292899 - DNA, 2070 bp, Homo sapiens
caaaatatgtataagtacgatgccgcctttaatcagccgaggccgggtagcaggctggcaggtggacaggcgggcaaggacagctccgcgagccccctacaactcgtttccttccgttcaccttcgcagggcggcgactggcggcgcgatggacctgaccgggctcctgctggacgaagaaggcaccttctccctcgccggcttccaggacttcacgttcctcccaggacaccagaagctgagtgcccggatccgaaggaggctctactatggctgggactgggaagccgactgtagcctggaggagctctccagcccggtggcagacattgctgtcgaactgctccagaaggcagcccccagccctattcgccgactccagaagaaatacgtagctcatgtgtcccgggaggcatgcatctccccatgtgctatgatgctggctctggtgtacattgaacggctccggcaccgaaacccagactacttgcagcatgtgtcatcctctgacttgttcctgatctccatgatggtggccagtaagtacctctatgatgaaggggaggaggaggaggtcttcaacgacgaatggggagctgctgggggtgtggccgtgcccactctcaatgccttggagaggggcttcctgagtgccatggattggcatctctacactgaccctcgggagatctttgaggtgctgagctggttggagagctgtgtggctgagcagcagggacggtggcgaggctggtacacctacacagacctgtgtgtgctgctggagcagccgacctggcagttggccctgggctccctctgccagcggctggtaaagctgtcttgcctgttagctgtggcatatgtgagcagtgtggccctggctgtggcatcggtggccgtaatacatcagtctttggggctgtcctgcatccctacacctgggccgcctgaccttggactgacctcccgttgcctcctggagccctgcataccttctgtgccacaatgcctgccgtctcccgctaatgtctccagctgcctggaaggcagcatggggctgcggtcactctggggcagtcttctggcctcactgactcctccaccattgcctcccccagacccccctgcccctcccactcttcttcataactgccacctttgccagaagctccagagagactccccaacctgccatgcctgcctccaccccaaccgtacagtccccactgcgctgtccagcccctggtaccatacctatggcctggctcccccctggccttggagcccggtgcccctttcacttcctcagcctcagcaatgttcccttttcagtgtcatggagctggctcgcctcaagtctttcgttttcccaggctaggtagggctgtgaggaatgcattaagagggtttgggagtttctgagaacctggaggagcaaagcttgattcagatcctgtctgcctcgctgggtccttggcaggtcccctgtcctcctgggtgggagcttatggggtggtggggcagaaggactgaaggtaattcactcctagatcgcagtggctggctgcttggccaggacagtgatgccgccagggagagcttccgcttggtgaccagggacatgtcccagatggacatagaagcccctctctgcctccctgggattttttagacttttacttttgatttccctaggatggaagagtataggtgggagataagggaagtggggtgagaggagaaaggaaatgttggcatgggcctgtgtgatgtccctgaggcagaagagccggggactgatgggttcaggtgggagctgctgggtgaggcagggaacccttttcactcccattccttagctttagtctaatggagccaaggactgctgggaccttcaaccctgatcttttgtcttccagtcttctcttagtgtcctgctcctaggtttccctctcttctggttcttctcccaggtattctcttcccaggcctctctggccactgctttgtatcagggtttttcacgcttttgtagaactgaggtttcaataaacagtttcagttgca

SEQ ID NO: 292900 - DNA, 2255 bp, Homo sapiens
gctgccccggtatccccgtgtggggcaggaagtgggcttccagattcccagtatccccggtagggtctgcttctgctcgctcgggaagggcggtggccgtcccattactcaaccaaccctcaacgcactggtcctcccagttccctcccctcagtgggtaaacaaacacacaccagcgcttgactcgacagactcgaaaacaacatctactcagaaaagttgtttctttcctatctccttaaactttcccacttccacatatcggagcttcttcccacctcggcctactcaagcatgagatccggaggcgggagggcggcgactggcggcgcgatggacctgaccgggctcctgctggacgaagaaggcaccttctccctcgccggcttccaggacttcacgttcctcccaggacaccagaagctgagtgcccggatccgaaggaggctctactatggctgggactgggaagccgactgtagcctggaggagctctccagcccggtggcagacattgctgtcgaactgctccagaaggcagcccccagccctattcgccgactccagaagaaatacgtagctcatgtgtcccgggaggcatgcatctccccatgtgctatgatgctggctctggtgtacattgaacggctccggcaccgaaacccagactacttgcagcatgtgtcatcctctgacttgttcctgatctccatgatggtggccagtaagtacctctatgatgaaggggaggaggaggaggtcttcaacgacgaatggggagctgctgggggtgtggccgtgcccactctcaatgccttggagaggggcttcctgagtgccatggattggcatctctacactgaccctcgggagatctttgaggtgctgagctggttggagagctgtgtggctgagcagcagggacggtggcgaggctggtacacctacacagacctgtgtgtgctgctggagcagccgacctggcagttggccctgggctccctctgccagcggctggtaaagctgtcttgcctgttagctgtggcatatgtgagcagtgtggccctggctgtggcatcggtggccgtaatacatcagtctttggggctgtcctgcatccctacacctgggccgcctgaccttggactgacctcccgttgcctcctggagccctgcataccttctgtgccacaatgcctgccgtctcccgctaatgtctccagctgcctggaaggcagcatggggctgcggtcactctggggcagtcttctggcctcactgactcctccaccattgcctcccccagacccccctgcccctcccactcttcttcataactgccacctttgccagaagctccagagagactccccaacctgccatgcctgcctccaccccaaccgtacagtccccactgcgctgtccagcccctggtaccatacctatggcctggctcccccctggccttggagcccggtgcccctttcacttcctcagcctcagcaatgttcccttttcagtgtcatggagctggctcgcctcaagtctttcgttttcccaggctaggtagggctgtgaggaatgcattaagagggtttgggagtttctgagaacctggaggagcaaagcttgattcagatcctgtctgcctcgctgggtccttggcaggtcccctgtcctcctgggtgggagcttatggggtggtggggcagaaggactgaaggtaattcactcctagatcgcagtggctggctgcttggccaggacagtgatgccgccagggagagcttccgcttggtgaccagggacatgtcccagatggacatagaagcccctctctgcctccctgggattttttagacttttacttttgatttccctaggatggaagagtataggtgggagataagggaagtggggtgagaggagaaaggaaatgttggcatgggcctgtgtgatgtccctgaggcagaagagccggggactgatgggttcaggtgggagctgctgggtgaggcagggaacccttttcactcccattccttagctttagtctaatggagccaaggactgctgggaccttcaaccctgatcttttgtcttccagtcttctcttagtgtcctgctcctaggtttccctctcttctggttcttctcccaggtattctcttcccaggcctctctggccactgctttgtatcagggtttttcacgcttttgtagaactgaggtttcaataaacagtttcagttgca

SEQ ID NO: 292901 - DNA, 2122 bp, Homo sapiens
  misc_feature (19)..(19): n is a, c, g, or t
gccgccgggggagggagcngcgagggcgagggcgaggacggcggcccgccccggggaggcaggctggcaggtggacaggcgggcaaggacagctccgcgagccccctacaactcgtttccttccgttcaccttcgcagggcggcgactggcggcgcgatggacctgaccgggctcctgctggacgaagaaggcaccttctccctcgccggcttccaggacttcacgttcctcccaggacaccagaagctgagtgcccggatccgaaggaggctctactatggctgggactgggaagccgactgtagcctggaggagctctccagcccggtggcagacattgctgtcgaactgctccagaaggcagcccccagccctattcgccgactccagaagaaatacgtagctcatgtgtcccgggaggcatgcatctccccatgtgctatgatgctggctctggtgtacattgaacggctccggcaccgaaacccagactacttgcagcatgtgtcatcctctgacttgttcctgatctccatgatggtggccagtaagtacctctatgatgaaggggaggaggaggaggtcttcaacgacgaatggggagctgctgggggtgtggccgtgcccactctcaatgccttggagaggggcttcctgagtgccatggattggcatctctacactgaccctcgggagatctttgaggtgctgagctggttggagagctgtgtggctgagcagcagggacggtggcgaggctggtacacctacacagacctgtgtgtgctgctggagcagccgacctggcagttggccctgggctccctctgccagcggctggtaaagctgtcttgcctgttagctgtggcatatgtgagcagtgtggccctggctgtggcatcggtggccgtaatacatcagtctttggggctgtcctgcatccctacacctgggccgcctgaccttggactgacctcccgttgcctcctggagccctgcataccttctgtgccacaatgcctgccgtctcccgctaatgtctccagctgcctggaaggcagcatggggctgcggtcactctggggcagtcttctggcctcactgactcctccaccattgcctcccccagacccccctgcccctcccactcttcttcataactgccacctttgccagaagctccagagagactccccaacctgccatgcctgcctccaccccaaccgtacagtccccactgcgctgtccagcccctggtaccatacctatggcctggctcccccctggccttggagcccggtgcccctttcacttcctcagcctcagcaatgttcccttttcagtgtcatggagctggctcgcctcaagtctttcgttttcccaggctaggtagggctgtgaggaatgcattaagagggtttgggagtttctgagaacctggaggagcaaagcttgattcagatcctgtctgcctcgctgggtccttggcaggtcccctgtcctcctgggtgggagcttatggggtggtggggcagaaggactgaaggtaattcactcctagatcgcagtggctggctgcttggccaggacagtgatgccgccagggagagcttccgcttggtgaccagggacatgtcccagatggacatagaagcccctctctgcctccctgggattttttagacttttacttttgatttccctaggatggaagagtataggtgggagataagggaagtggggtgagaggagaaaggaaatgttggcatgggcctgtgtgatgtccctgaggcagaagagccggggactgatgggttcaggtgggagctgctgggtgaggcagggaacccttttcactcccattccttagctttagtctaatggagccaaggactgctgggaccttcaaccctgatcttttgtcttccagtcttctcttagtgtcctgctcctaggtttccctctcttctggttcttctcccaggtattctcttcccaggcctctctggccactgctttgtatcagggtttttcacgcttttgtagaactgaggtttcaataaacagtttcagttgcaaaaaaaaaaacatcaaatgaacacagaaaccaaaaaaaagggg

SEQ ID NO: 292902 - DNA, 2028 bp, Homo sapiens
actctagaggatctctgctttgggacggcgggcaaggacagctccgcgagccccctacaactcgtttccttccgttcaccttcgcagggcggcgactggcggcgcgatggacctgaccgggctcctgctggacgaagaaggcaccttctccctcgccggcttccaggacttcacgttcctcccaggacaccagaagctgagtgcccggatccgaaggaggctctactatggctgggactgggaagccgactgtagcctggaggagctctccagcccggtggcagacattgctgtcgaactgctccagaaggcagcccccagccctattcgccgactccagaagaaatacgtagctcatgtgtcccgggaggcatgcatctccccatgtgctatgatgctggctctggtgtacattgaacggctccggcaccgaaacccagactacttgcagcatgtgtcatcctctgacttgttcctgatctccatgatggtggccagtaagtacctctatgatgaaggggaggaggaggaggtcttcaacgacgaatggggagctgctgggggtgtggccgtgcccactctcaatgccttggagaggggcttcctgagtgccatggattggcatctctacactgaccctcgggagatctttgaggtgctgagctggttggagagctgtgtggctgagcagcagggacggtggcgaggctggtacacctacacagacctgtgtgtgctgctggagcagccgacctggcagttggccctgggctccctctgccagcggctggtaaagctgtcttgcctgttagctgtggcatatgtgagcagtgtggccctggctgtggcatcggtggccgtaatacatcagtctttggggctgtcctgcatccctacacctgggccgcctgaccttggactgacctcccgttgcctcctggagccctgcataccttctgtgccacaatgcctgccgtctcccgctaatgtctccagctgcctggaaggcagcatggggctgcggtcactctggggcagtcttctggcctcactgactcctccaccattgcctcccccagacccccctgcccctcccactcttcttcataactgccacctttgccagaagctccagagagactccccaacctgccatgcctgcctccaccccaaccgtacagtccccactgcgctgtccagcccctggtaccatacctatggcctggctcccccctggccttggagcccggtgcccctttcacttcctcagcctcagcaatgttcccttttcagtgtcatggagctggctcgcctcaagtctttcgttttcccaggctaggtagggctgtgaggaatgcattaagagggtttgggagtttctgagaacctggaggagcaaagcttgattcagatcctgtctgcctcgctgggtccttggcaggtcccctgtcctcctgggtgggagcttatggggtggtggggcagaaggactgaaggtaattcactcctagatcgcagtggctggctgcttggccaggacagtgatgccgccagggagagcttccgcttggtgaccagggacatgtcccagatggacatagaagcccctctctgcctccctgggattttttagacttttacttttgatttccctaggatggaagagtataggtgggagataagggaagtggggtgagaggagaaaggaaatgttggcatgggcctgtgtgatgtccctgaggcagaagagccggggactgatgggttcaggtgggagctgctgggtgaggcagggaacccttttcactcccattccttagctttagtctaatggagccaaggactgctgggaccttcaaccctgatcttttgtcttccagtcttctcttagtgtcctgctcctaggtttccctctcttctggttcttctcccaggtattctcttcccaggcctctctggccactgctttgtatcagggtttttcacgcttttgtagaactgaggtttcaataaacagtttcagttgca

SEQ ID NO: 292903 - DNA, 2263 bp, Homo sapiens
  misc_feature (19)..(19): n is a, c, g, or t
gccgccgggggagggagcngcgagggcgagggcgaggacggcggcccgccccggggaggcaggctggcaggtggacaggcgggcaaggacagctccgcgagccccctacaactcgtttccttccgttcaccttcgcagggcggcgactggcggcgcgatggacctgaccgggctcctgctggacgaagaaggcaccttctccctcgccggcttccaggacttcacgttcctcccaggacaccagaagctgagtgcccggatccgaaggaggctctactatggctgggactgggaagccgactgtagcctggaggagctctccagcccggtggcagacattgctgtcgaactgctccagaaggcagcccccagccctattcgccgactccagaagaaatacgtagctcatgtgtcccgggaggcatgcatctccccatgtgctatgatgctggctctggtgtacattgaacggctccggcaccgaaacccagactacttgcagcatgtgtcatcctctgacttgttcctgatctccatgatggtggccagtaagtacctctatgatgaaggggaggaggaggaggtcttcaacgacgaatggggagctgctgggggtgtggccgtgcccactctcaatgccttggagaggggcttcctgagtgccatggattggcatctctacactgaccctcgggagatctttgaggtgctgagctggttggagagctgtgtggctgagcagcagggacggtggcgaggctggtacacctacacagacctgtgtgtgctgctggagcagccgacctggcagttggccctgggctccctctgccagcggctggtaaagctgtcttgcctgttagctgtggcatatgtgagcagtgtggccctggctgtggcatcggtggccgtaatacatcagtctttggggctgtcctgcatccctacacctgggccgcctgaccttggactgacctcccgttgcctcctggagccctgcataccttctgtgccacaatgcctgccgtctcccgctaatgtctccagctgcctggaaggcagcatggggctgcggtcactctggggcagtcttctggcctcactgactcctccaccattgcctcccccagacccccctgcccctcccactcttcttcataactgccacctttgccagaagctccagagagactccccaacctgccatgcctgcctccaccccaaccgtacagtccccactgcgctgtccagcccctggtaccatacctatggcctggctcccccctggccttggagcccggtgcccctttcacttcctcagcctcagcaatgttcccttttcagtgtcatggagctggctcgcctcaagtctttcgttttcccaggctaggtagggctgtgaggaatgcattaagagggtttgggagtttctgagaacctggaggagcaaagcttgattcagatcctgtctgcctcgctgggtccttggcaggtcccctgtcctcctgggtgggagcttatggggtggtggggcagaaggactgaaggtaattcactcctagatcgcagtggctggctgcttggccaggacagtgatgccgccagggagagcttccgcttggtgaccagggacatgtcccagatggacatagaagcccctctctgcctccctgggattttttagacttttacttttgatttccctaggatggaagagtataggtgggagataagggaagtggggtgagaggagaaaggaaatgttggcatgggcctgtgtgatgtccctgaggcagaagagccggggactgatgggttcaggtgggagctgctgggtgaggcagggaacccttttcactcccattccttagctttagtctaatggagccaaggactgctgggaccttcaaccctgatcttttgtcttccagtcttctcttagtgtcctgctcctaggtttccctctcttctggttcttctcccaggtattctcttcccaggcctctctggccactgctttgtatcagggtttttcacgcttttgtagaactgaggtttcaataaacagtttcagttgcaaaaaaaaaaaaaaaaaaaaaaaaaaaaaaaacaccggggggccccatatagggggggggggggaaaaaggggtatggaaggggacatgggccaagggggttcccggcccggttttcgtggccaggggggaaaactcggggccccctaggggggggaaaaatgaaacgcggtcccgtaagatgga

SEQ ID NO: 292904 - DNA, 2209 bp, Homo sapiens
agcggggggcgcgcatgcgccccggcggctgccgctgacactgcgcctacacagacagaggcgcctggggcttggccacgttccgtgagaccaggagttcgagtccggttcctgcccgcgggtcggggcgggaggctgggccagatgggcggcaggaagtgccaggcgctgacttgcaggcggcacccccgcggcttgtaaacgccgggcggacgcggcacaggcggagtacgcgcctcgcagccgcatctcctttctgctccgcgagggcggcgactggcggcgcgatggacctgaccgggctcctgctggacgaagaaggcaccttctccctcgccggcttccaggacttcacgttcctcccaggacaccagaagctgagtgcccggatccgaaggaggctctactatggctgggactgggaagccgactgtagcctggaggagctctccagcccggtggcagacattgctgtcgaactgctccagaaggcagcccccagccctattcgccgactccagaagaaatacgtagctcatgtgtcccgggaggcatgcatctccccatgtgctatgatgctggctctggtgtacattgaacggctccggcaccgaaacccagactacttgcagcatgtgtcatcctctgacttgttcctgatctccatgatggtggccagtaagtacctctatgatgaaggggaggaggaggaggtcttcaacgacgaatggggagctgctgggggtgtggccgtgcccactctcaatgccttggagaggggcttcctgagtgccatggattggcatctctacactgaccctcgggagatctttgaggtgctgagctggttggagagctgtgtggctgagcagcagggacggtggcgaggctggtacacctacacagacctgtgtgtgctgctggagcagccgacctggcagttggccctgggctccctctgccagcggctggtaaagctgtcttgcctgttagctgtggcatatgtgagcagtgtggccctggctgtggcatcggtggccgtaatacatcagtctttggggctgtcctgcatccctacacctgggccgcctgaccttggactgacctcccgttgcctcctggagccctgcataccttctgtgccacaatgcctgccgtctcccgctaatgtctccagctgcctggaaggcagcatggggctgcggtcactctggggcagtcttctggcctcactgactcctccaccattgcctcccccagacccccctgcccctcccactcttcttcataactgccacctttgccagaagctccagagagactccccaacctgccatgcctgcctccaccccaaccgtacagtccccactgcgctgtccagcccctggtaccatacctatggcctggctcccccctggccttggagcccggtgcccctttcacttcctcagcctcagcaatgttcccttttcagtgtcatggagctggctcgcctcaagtctttcgttttcccaggctaggtagggctgtgaggaatgcattaagagggtttgggagtttctgagaacctggaggagcaaagcttgattcagatcctgtctgcctcgctgggtccttggcaggtcccctgtcctcctgggtgggagcttatggggtggtggggcagaaggactgaaggtaattcactcctagatcgcagtggctggctgcttggccaggacagtgatgccgccagggagagcttccgcttggtgaccagggacatgtcccagatggacatagaagcccctctctgcctccctgggattttttagacttttacttttgatttccctaggatggaagagtataggtgggagataagggaagtggggtgagaggagaaaggaaatgttggcatgggcctgtgtgatgtccctgaggcagaagagccggggactgatgggttcaggtgggagctgctgggtgaggcagggaacccttttcactcccattccttagctttagtctaatggagccaaggactgctgggaccttcaaccctgatcttttgtcttccagtcttctcttagtgtcctgctcctaggtttccctctcttctggttcttctcccaggtattctcttcccaggcctctctggccactgctttgtatcagggtttttcacgcttttgtagaactgaggtttcaataaacagtttcagttgca

SEQ ID NO: 292905 - DNA, 1703 bp, Homo sapiens
ggacgcgtgggcgaccacgcgtcggtagctcatgtgtcccgggaggcatgcatctccccatgtgctatgatgctggctctggtgtacattgaacggctccggcaccgaaacccagactacttgcagcatgtgtcatcctctgacttgttcctgatctccatgatggtggccagtaagtacctctatgatgaaggggaggaggaggaggtcttcaacgacgaatggggagctgctgggggtgtggccgtgcccactctcaatgccttggagaggggcttcctgagtgccatggattggcatctctacactgaccctcgggagatctttgaggtgctgagctggttggagagctgtgtggctgagcagcagggacggtggcgaggctggtacacctacacagacctgtgtgtgctgctggagcagccgacctggcagttggccctgggctccctctgccagcggctggtaaagctgtcttgcctgttagctgtggcatatgtgagcagtgtggccctggctgtggcatcggtggccgtaatacatcagtctttggggctgtcctgcatccctacacctgggccgcctgaccttggactgacctcccgttgcctcctggagccctgcataccttctgtgccacaatgcctgccgtctcccgctaatgtctccagctgcctggaaggcagcatggggctgcggtcactctggggcagtcttctggcctcactgactcctccaccattgcctcccccagacccccctgcccctcccactcttcttcataactgccacctttgccagaagctccagagagactccccaacctgccatgcctgcctccaccccaaccgtacagtccccactgcgctgtccagcccctggtaccatacctatggcctggctcccccctggccttggagcccggtgcccctttcacttcctcagcctcagcaatgttcccttttcagtgtcatggagctggctcgcctcaagtctttcgttttcccaggctaggtagggctgtgaggaatgcattaagagggtttgggagtttctgagaacctggaggagcaaagcttgattcagatcctgtctgcctcgctgggtccttggcaggtcccctgtcctcctgggtgggagcttatggggtggtggggcagaaggactgaaggtaattcactcctagatcgcagtggctggctgcttggccaggacagtgatgccgccagggagagcttccgcttggtgaccagggacatgtcccagatggacatagaagcccctctctgcctccctgggattttttagacttttacttttgatttccctaggatggaagagtataggtgggagataagggaagtggggtgagaggagaaaggaaatgttggcatgggcctgtgtgatgtccctgaggcagaagagccggggactgatgggttcaggtgggagctgctgggtgaggcagggaacccttttcactcccattccttagctttagtctaatggagccaaggactgctgggaccttcaaccctgatcttttgtcttccagtcttctcttagtgtcctgctcctaggtttccctctcttctggttcttctcccaggtattctcttcccaggcctctctggccactgctttgtatcagggtttttcacgcttttgtagaactgaggtttcaataaacagtttcagttgca

SEQ ID NO: 292906 - DNA, 2060 bp, Homo sapiens
  misc_feature (19)..(19): n is a, c, g, or t
gccgccgggggagggagcngcgagggcgagggcgaggacggcggcccgccccggggaggcaggctggcaggtggacaggcgggcaaggacagctccgcgagccccctacaactcgtttccttccgttcaccttcgcagggcggcgactggcggcgcgatggacctgaccgggctcctgctggacgaagaaggcaccttctccctcgccggcttccaggacttcacgttcctcccaggacaccagaagctgagtgcccggatccgaaggaggctctactatggctgggactgggaagccgactgtagcctggaggagctctccagcccggtggcagacattgctgtcgaactgctccagaaggcagcccccagccctattcgccgactccagaagaaatacgtagctcatgtgtcccgggaggcatgcatctccccatgtgctatgatgctggctctggtgtacattgaacggctccggcaccgaaacccagactacttgcagcatgtgtcatcctctgacttgttcctgatctccatgatggtggccagtaagtacctctatgatgaaggggaggaggaggaggtcttcaacgacgaatggggagctgctgggggtgtggccgtgcccactctcaatgccttggagaggggcttcctgagtgccatggattggcatctctacactgaccctcgggagatctttgaggtgctgagctggttggagagctgtgtggctgagcagcagggacggtggcgaggctggtacacctacacagacctgtgtgtgctgctggagcagccgacctggcagttggccctgggctccctctgccagcggctggtaaagctgtcttgcctgttagctgtggcatatgtgagcagtgtggccctggctgtggcatcggtggccgtaatacatcagtctttggggctgtcctgcatccctacacctgggccgcctgaccttggactgacctcccgttgcctcctggagccctgcataccttctgtgccacaatgcctgccgtctcccgctaatgtctccagctgcctggaaggcagcatggggctgcggtcactctggggcagtcttctggcctcactgactcctccaccattgcctcccccagacccccctgcccctcccactcttcttcataactgccacctttgccagaagctccagagagactccccaacctgccatgcctgcctccaccccaaccgtacagtccccactgcgctgtccagcccctggtaccatacctatggcctggctcccccctggccttggagcccggtgcccctttcacttcctcagcctcagcaatgttcccttttcagtgtcatggagctggctcgcctcaagtctttcgttttcccaggctaggtagggctgtgaggaatgcattaagagggtttgggagtttctgagaacctggaggagcaaagcttgattcagatcctgtctgcctcgctgggtccttggcaggtcccctgtcctcctgggtgggagcttatggggtggtggggcagaaggactgaaggtaattcactcctagatcgcagtggctggctgcttggccaggacagtgatgccgccagggagagcttccgcttggtgaccagggacatgtcccagatggacatagaagcccctctctgcctccctgggattttttagacttttacttttgatttccctaggatggaagagtataggtgggagataagggaagtggggtgagaggaggttcaggtgggagctgctgggtgaggcagggaacccttttcactcccattccttagctttagtctaatggagccaaggactgctgggaccttcaaccctgatcttttgtcttccagtcttctcttagtgtcctgctcctaggtttccctctcttctggttcttctcccaggtattctcttcccaggcctctctggccactgctttgtatcagggtttttcacgcttttgtagaactgaggtttcaataaacagtttcagttgcaaaaaaaaaaacatcaaatgaacacagaaaccaaaaaaaagggg

SEQ ID NO: 292907 - DNA, 1891 bp, Homo sapiens
  misc_feature (19)..(19): n is a, c, g, or t
  misc_feature (1891)..(1891): n is a, c, g, or t
gccgccgggggagggagcngcgagggcgagggcgaggacggcggcccgccccggggaggcaggctggcaggtggacaggcgggcaaggacagctccgcgagccccctacaactcgtttccttccgttcaccttcgcagggcggcgactggcggcgcgatggacctgaccgggctcctgctggacgaagaaggcaccttctccctcgccggcttccaggacttcacgttcctcccaggacaccagaagctgagtgcccggatccgaaggaggctctactatggctgggactgggaagccgactgtagcctggaggagctctccagcccggtggcagacattgctgtcgaactgctccagaaggcagcccccagccctattcgccgactccagaagaaatacgtagctcatgtgtcccgggaggcatgcatctccccatgtgctatgatgctggctctggtgtacattgaacggctccggcaccgaaacccagactacttgcagcatgtgtcatcctctgacttgttcctgatctccatgatggtggccagtaagtacctctatgatgaaggggaggaggaggaggtcttcaacgacgaatggggagctgctgggggtgtggccgtgcccactctcaatgccttggagaggggcttcctgagtgccatggattggcatctctacactgaccctcgggagatctttgaggtgctgagctggttggagagctgtgtggctgagcagcagggacggtggcgaggctggtacacctacacagacctgtgtgtgctgctggagcagccgacctggcagttggccctgggctccctctgccagcggctggtaaagctgtcttgcctgttagctgtggcatatgtgagcagtgtggccctggctgtggcatcggtggccgtaatacatcagtctttggggctgtcctgcatccctacacctgggccgcctgaccttggactgacctcccgttgcctcctggagccctgcataccttctgtgccacaatgcctgccgtctcccgctaatgtctccagctgcctggaaggcagcatggggctgcggtcactctggggcagtcttctggcctcactgactcctccaccattgcctcccccagacccccctgcccctcccactcttcttcataactgccacctttgccagaagctccagagagactccccaacctgccatgcctgcctccaccccaaccgtacagtccccactgcgctgtccagcccctggtaccatacctatggcctggctcccccctggccttggagcccggtgcccctttcacttcctcagcctcagcaatgttcccttttcagtgtcatggagctggctcgcctcaagtctttcgttttcccaggctaggtagggctgtgaggaatgcattaagagggtttgggagtttctgagaacctggaggagcaaagcttgattcagatcctgtctgcctcgctgggtccttggcaggtcccctgtcctcctgggtgggagcttatggggtggtggggcagaaggactgaaggtaattcactcctagatcgcagtggctggctgcttggccaggacagtgatgccgccagggagagcttccgcttggtgaccagggacatgtcccagatggacatagaagcccctctctgcctccctgggattttttagacttttacttttgatttccctaggatggaagagtataggtgggagataagggaagtggggtgagaggagggcaatgtacacatgctccctggcgatctcacttcggctgaagagttcgccaccgatgtttttactagcattctgtccgagtaagcacgctcaccctggtacctggcattgcttaactttagtgtagcgtgcccgtcn

SEQ ID NO: 292908 - DNA, 1616 bp, Homo sapiens
tagtcggaccgtgatggctcccaggtgtctctctctaagcatgtgtcatcctctgacttgttcctgatctccatgatggtggccagtaagtacctctatgatgaaggggaggaggaggaggtcttcaacgacgaatggggagctgctgggggtgtggccgtgcccactctcaatgccttggagaggggcttcctgagtgccatggattggcatctctacactgaccctcgggagatctttgaggtgctgagctggttggagagctgtgtggctgagcagcagggacggtggcgaggctggtacacctacacagacctgtgtgtgctgctggagcagccgacctggcagttggccctgggctccctctgccagcggctggtaaagctgtcttgcctgttagctgtggcatatgtgagcagtgtggccctggctgtggcatcggtggccgtaatacatcagtctttggggctgtcctgcatccctacacctgggccgcctgaccttggactgacctcccgttgcctcctggagccctgcataccttctgtgccacaatgcctgccgtctcccgctaatgtctccagctgcctggaaggcagcatggggctgcggtcactctggggcagtcttctggcctcactgactcctccaccattgcctcccccagacccccctgcccctcccactcttcttcataactgccacctttgccagaagctccagagagactccccaacctgccatgcctgcctccaccccaaccgtacagtccccactgcgctgtccagcccctggtaccatacctatggcctggctcccccctggccttggagcccggtgcccctttcacttcctcagcctcagcaatgttcccttttcagtgtcatggagctggctcgcctcaagtctttcgttttcccaggctaggtagggctgtgaggaatgcattaagagggtttgggagtttctgagaacctggaggagcaaagcttgattcagatcctgtctgcctcgctgggtccttggcaggtcccctgtcctcctgggtgggagcttatggggtggtggggcagaaggactgaaggtaattcactcctagatcgcagtggctggctgcttggccaggacagtgatgccgccagggagagcttccgcttggtgaccagggacatgtcccagatggacatagaagcccctctctgcctccctgggattttttagacttttacttttgatttccctaggatggaagagtataggtgggagataagggaagtggggtgagaggagaaaggaaatgttggcatgggcctgtgtgatgtccctgaggcagaagagccggggactgatgggttcaggtgggagctgctgggtgaggcagggaacccttttcactcccattccttagctttagtctaatggagccaaggactgctgggaccttcaaccctgatcttttgtcttccagtcttctcttagtgtcctgctcctaggtttccctctcttctggttcttctcccaggtattctcttcccaggcctctctggccactgctttgtatcagggtttttcacgcttttgtagaactgaggtttcaataaacagtttcagttgca

SEQ ID NO: 292909 - DNA, 1986 bp, Homo sapiens
  misc_feature (19)..(19): n is a, c, g, or t
gccgccgggggagggagcngcgagggcgagggcgaggacggcggcccgccccggggaggcaggctggcaggtggacaggcgggcaaggacagctccgcgagccccctacaactcgtttccttccgttcaccttcgcagggcggcgactggcggcgcgatggacctgaccgggctcctgctggacgaagaaggcaccttctccctcgccggcttccaggacttcacgttcctcccaggacaccagaagctgagtgcccggatccgaaggaggctctactatggctgggactgggaagccgactgtagcctggaggagctctccagcccggtggcagacattgctgtcgaactgctccagaaggcagcccccagccctattcgccgactccagaagaaatacgtagctcatgtgtcccgggaggcatgcatctccccatgtgctatgatgctggctctggtgtacattgaacggctccggcaccgaaacccagactacttgcagcatgtgtcatcctctgacttgttcctgatctccatgatggtggccagtaagtacctctatgatgaaggggaggaggaggaggtcttcaacgacgaatggggagctgctgggggtgtggccgtgcccactctcaatgccttggagaggggcttcctgagtgccatggattggcatctctacactgaccctcgggagatctttgaggtgctgagctggttggagagctgtgtggctgagcagcagggacggtggcgaggctggtacacctacacagacctgtgtgtgctgctggagcagccgacctggcagttggccctgggctccctctgccagcggctggtaaagctgtcttgcctgttagctgtggcatatgtgagcagtgtggccctggctgtggcatcggtggccgtaatacatcagtctttggggctgtcctgcatccctacacctgggccgcctgaccttggactgacctcccgttgcctcctggagccctgcataccttctgtgccacaatgcctgccgtctcccgctaatgtctccagctgcctggaaggcagcatggggctgcggtcactctggggcagtcttctggcctcactgactcctccaccattgcctcccccagacccccctgcccctcccactcttcttcataactgccacctttgccagaagctccagagagactccccaacctgccatgcctgcctccaccccaaccgtacagtccccactgcgctgtccagcccctggtaccatacctatggcctggctcccccctggccttggagcccggtgcccctttcacttcctcagcctcagcaatgttcccttttcagtgtcatggagctggctcgcctcaagtctttcgttttcccaggctaggtagggctgtgaggaatgcattaagagggtttgggagtttctgagaacctggaggagcaaagcttgattcagatcctgtctgcctcgctgggtccttggcaggtcccctgtcctcctgggtgggagcttatggggtggtggggcagaaggactgaaggtaattcactcctagatcgcagtggctggctgcttggccaggacagtgatgccgccagggagagcttccgcttggtgaccagggacatgtcccagatggacatagaagcccctctctgcctccctgggattttttagacttttacttttgatttccctaggatggaagagtataggttcaggtgggagctgctgggtgaggcagggaacccttttcactcccattccttagctttagtctaatggagccaaggactgctgggaccttcaaccctgatcttttgtcttccagtcttctcttagtgtcctgctcctaggtttccctctcttctggttcttctcccaggtattctcttcccaggcctctctggccactgctttgtatcagggtttttcacgcttttgtagaactgaggtttcaataaacagtttcagttgca

SEQ ID NO: 292910 - DNA, 2017 bp, Homo sapiens
  misc_feature (19)..(19): n is a, c, g, or t
gccgccgggggagggagcngcgagggcgagggcgaggacggcggcccgccccggggaggcaggctggcaggtggacaggcgggcaaggacagctccgcgagccccctacaactcgtttccttccgttcaccttcgcagggcggcgactggcggcgcgatggacctgaccgggctcctgctggacgaagaaggcaccttctccctcgccggcttccaggacttcacgttcctcccaggacaccagaagctgagtgcccggatccgaaggaggctctactatggctgggactgggaagccgactgtagcctggaggagctctccagcccggtggcagacattgctgtcgaactgctccagaaggcagcccccagccctattcgccgactccagaagaaatacgtagctcatgtgtcccgggaggcatgcatctccccatgtgctatgatgctggctctggtgtacattgaacggctccggcaccgaaacccagactacttgcagcatgtgtcatcctctgacttgttcctgatctccatgatggtggccagtaagtacctctatgatgaaggggaggaggaggaggtcttcaacgacgaatggggagctgctgggggtgtggccgtgcccactctcaatgccttggagaggggcttcctgagtgccatgtgtggctgagcagcagggacggtggcgaggctggtacacctacacagacctgtgtgtgctgctggagcagccgacctggcagttggccctgggctccctctgccagcggctggtaaagctgtcttgcctgttagctgtggcatatgtgagcagtgtggccctggctgtggcatcggtggccgtaatacatcagtctttggggctgtcctgcatccctacacctgggccgcctgaccttggactgacctcccgttgcctcctggagccctgcataccttctgtgccacaatgcctgccgtctcccgctaatgtctccagctgcctggaaggcagcatggggctgcggtcactctggggcagtcttctggcctcactgactcctccaccattgcctcccccagacccccctgcccctcccactcttcttcataactgccacctttgccagaagctccagagagactccccaacctgccatgcctgcctccaccccaaccgtacagtccccactgcgctgtccagcccctggtaccatacctatggcctggctcccccctggccttggagcccggtgcccctttcacttcctcagcctcagcaatgttcccttttcagtgtcatggagctggctcgcctcaagtctttcgttttcccaggctaggtagggctgtgaggaatgcattaagagggtttgggagtttctgagaacctggaggagcaaagcttgattcagatcctgtctgcctcgctgggtccttggcaggtcccctgtcctcctgggtgggagcttatggggtggtggggcagaaggactgaaggtaattcactcctagatcgcagtggctggctgcttggccaggacagtgatgccgccagggagagcttccgcttggtgaccagggacatgtcccagatggacatagaagcccctctctgcctccctgggattttttagacttttacttttgatttccctaggatggaagagtataggtgggagataagggaagtggggtgagaggagaaaggaaatgttggcatgggcctgtgtgatgtccctgaggcagaagagccggggactgatgggttcaggtgggagctgctgggtgaggcagggaacccttttcactcccattccttagctttagtctaatggagccaaggactgctgggaccttcaaccctgatcttttgtcttccagtcttctcttagtgtcctgctcctaggtttccctctcttctggttcttctcccaggtattctcttcccaggcctctctggccactgctttgtatcagggtttttcacgcttttgtagaactgaggtttcaataaacagtttcagttgca

SEQ ID NO: 292911 - DNA, 1820 bp, Homo sapiens
  misc_feature (19)..(19): n is a, c, g, or t
gccgccgggggagggagcngcgagggcgagggcgaggacggcggcccgccccggggaggcaggctggcaggtggacaggcgggcaaggacagctccgcgagccccctacaactcgtttccttccgttcaccttcgcagggcggcgactggcggcgcgatggacctgaccgggctcctgctggacgaagaaggcaccttctccctcgccggcttccaggacttcacgttcctcccaggacaccagaagctgagtgcccggatccgaaggaggctctactatggctgggactgggaagccgactgtagcctggaggagctctccagcccggtggcagacattgctgtcgaactgctccagaaggcagcccccagccctattcgccgactccagaagaaatacgtagctcatgtgtcccgggaggcatgcatctccccatgtgctatgatgctggctctggtgtacattgaacggctccggcaccgaaacccagactacttgcagcatgtgtcatcctctgacttgttcctgatctccatgatggtggccagtaagtacctctatgatgaaggggaggaggaggaggtcttcaacgacgaatggggagctgctgggggtgtggccgtgcccactctcaatgccttggagaggggcttcctgagtgccatggattggcatctctacactgaccctcgggagatctttgaggtgctgagctggttggagagctgtgtggctgagcagcagggacggtggcgaggctggtacacctacacagacctgtgtgtgctgctggagcagccgacctggcagttggccctgggctccctctgccagcggctggtaaagctgtcttgcctgttagctgtggcatatgtgagcagtgtggccctggctgtggcatcggtggccgtaatacatcagtctttggggctgtcctgcatccctacacctgggccgcctgaccttggactgacctcccgttgcctcctggagccctgcataccttctgtgccacaatgcctgccgtctcccgctaatgtctccagctgcctggaaggcagcatggggctgcggtcactctggggcagtcttctggcctcactgactcctccaccattgcctcccccagacccccctgcccctcccactcttcttcataactgccacctttgccagaagctccagagagactccccaacctgccatgcctgcctccaccccaaccgtacagtccccactgcgctgtccagcccctggtaccatacctatggcctggctcccccctggccttggagcccggtgcccctttcacttcctcagcctcagcaatgttcccttttcagtgtcatggagctggctcgcctcaagtctttcgttttcccaggctaggtagggctgtgaggaatgcattaagagggtttgggagtttctgagaacctggaggagcaaagcttgattcagatcctgtctgcctcgctgggtccttggcaggtcccctgtcctcctgggtgggagcttatggggtggtggggcagaaggactgaaggtaattcactcctagatcgcagtggctggctgcttggccaggacagtgatgccgccagggagagcttccgcttggtgaccagggacatgtcccagatggacatagaagcccctctctgcctccctgggattttttagacttttacttttgatttccctctcttctggttcttctcccaggtattctcttcccaggcctctctggccactgctttgtatcagggtttttcacgcttttgtagaactgaggtttcaataaacagtttcagttgca

SEQ ID NO: 292912 - DNA, 1777 bp, Homo sapiens
  misc_feature (19)..(19): n is a, c, g, or t
gccgccgggggagggagcngcgagggcgagggcgaggacggcggcccgccccggggaggcaggctggcaggtggacaggcgggcaaggacagctccgcgagccccctacaactcgtttccttccgttcaccttcgcagggcggcgactggcggcgcgatggacctgaccgggctcctgctggacgaagaaggcaccttctccctcgccggcttccaggacttcacgttcctcccaggacaccagaagctgagtgcccggatccgaaggaggctctactatggctgggactgggaagccgactgtagcctggaggagctctccagcccggtggcagacattgctgtcgaactgctccagaaggcagcccccagccctattcgccgactccagaagaaatacgtagctcatgtgtcccgggaggcatgcatctccccatgtgctatgatgctggctctggtgtacattgaacggctccggcaccgaaacccagactacttgcagcatgtgtcatcctctgacttgttcctgatctccatgatggtggccagtaagtacctctatgatgaaggggaggaggaggaggtcttcaacgacgaatggggagctgctgggggtgtggccgtgcccactctcaatgccttggagaggggcttcctgagtgccatggattggcatctctacactgaccctcgggagatctttgaggtgctgagctggttggagagctgtgtggctgagcagcagggacggtggcgaggctggtacacctacacagacctgtgtgtgctgctggagcagccgacctggcagttggccctgggctccctctgccagcggctggtaaagctgtcttgcctgttagctgtggcatatgtgagcagtgtggccctggctgtggcatcggtggccgtaatacatcagtctttggggctgtcctgcatccctacacctgggccgcctgaccttggactgacctcccgttgcctcctggagccctgcataccttctgtgccacaatgcctgccgtctcccgctaatgtctccagctgcctggaaggcagcatggggctgcggtcactctggggcagtcttctggcctcactgactcctccaccattgcctcccccagacccccctgcccctcccactcttcttcataactgccacctttgccagaagctccagagagactccccaacctgccatgcctgcctccaccccaaccgtacagtccccactgcgctgtccagcccctggtaccatacctatggcctggctcccccctggccttggagcccggtgcccctttcacttcctcagcctcagcaatgttcccttttcagtgtcatggagctggctcgcctcaagtctttcgttttcccaggctaggtagggctgtgaggaatgcattaagagggtttgggagtttctgagaacctggaggagcaaagcttgattcagatcctgtctgcctcgctgggtccttggcaggtcccctgtcctcctgggtgggagcttatggggtggtggggcagaaggactgaaggtaattcactcctagatcgcagtggctggctgcttggccaggacagtgatgccgccagggagagcttccgcttggtgaccagggacatgtcccagatggacatagaagcccctctctgcctccctgggattttttagacttttacttttgatttcctctggccactgctttgtatcagggtttttcacgcttttgtagaactgaggtttcaataaacagtttcagttgca

SEQ ID NO: 292913 - DNA, 1629 bp, Homo sapiens
  misc_feature (19)..(19): n is a, c, g, or t
gccgccgggggagggagcngcgagggcgagggcgaggacggcggcccgccccggggaggcaggctggcaggtggacaggcgggcaaggacagctccgcgagccccctacaactcgtttccttccgttcaccttcgcagggcggcgactggcggcgcgatggacctgaccgggctcctgctggacgaagaaggcaccttctccctcgccggcttccaggacttcacgttcctcccaggacaccagaagctgagtgcccggatccgaaggaggctctactatggctgggactgggaagccgactgtagcctggaggagctctccagcccggtggcagacattgctgtcgaactgctccagaaggcagcccccagccctattcgccgactccagaagaaatacgtagctcatgtgtcccgggaggcatgcatctccccatgtgctatgatgctggctctggtgtacattgaacggctccggcaccgaaacccagactacttgcagcatgtgtcatcctctgacttgttcctgatctccatgatggtggccagtaagtacctctatgatgaaggggaggaggaggaggtcttcaacgacgaatggggagctgctgggggtgtggccgtgcccactctcaatgccttggagaggggcttcctgagtgccatggattggcatctctacactgaccctcgggagatctttgaggtgctgagctggttggagagctgtgtggctgagcagcagggacggtggcgaggctggtacacctacacagacctgtgtgtgctgctggagcagccgacctggcagttggccctgggctccctctgccagcggctggtaaagctgtcttgcctgttagctgtggcatatgtgagcagtgtggccctggctgtggcatcggtggccgtaatacatcagtctttggggctgtcctgcatccctacacctgggccgcctgaccttggactgacctcccgttgcctcctggagccctgcataccttctgtgccacaatgcctgccgtctcccgctaatgtctccagctgcctggaaggcagcatggggctgcggtcactctggggcagtcttctggcctcactgactcctccaccattgcctcccccagacccccctgcccctcccactcttcttcataactgccacctttgccagaagctccagagagactccccaacctgccatgcctgcctccaccccaaccgtacagtccccactgcgctgtccagcccctggtaccatacctatggcctggctcccccctggccttggagcccggtgcccctttcacttcctcagcctcagcaatgttcccttttcagtgtcatggagctggctcgcctcaagtctttcgttttcccaggctaggtagggctgtgaggaatgcattaagagggtttgggagtttctgagaacctggaggagcaaagcttgattcagatcctgtctgcctcgctgggtccttggcaggtcccctgtcctcctgggtgggagcttatggggtggtggggcagaaggactgaaggtaattcatctggccactgctttgtatcagggtttttcacgcttttgtagaactgaggtttcaataaacagtttcagttgca

SEQ ID NO: 292914 - DNA, 1286 bp, Homo sapiens
  misc_feature (15)..(15): n is a, c, g, or t
cgctagtagagccgngtgttatcggacgagggctcctctgccagtggtggtaagctgtcttgcctgttagctgtggcatatgtgagcagtgtggccctggctgtggcatcggtggccgtaatacatcagtctttggggctgtcctgcatccctacacctgggccgcctgaccttggactgacctcccgttgcctcctggagccctgcataccttctgtgccacaatgcctgccgtctcccgctaatgtctccagctgcctggaaggcagcatggggctgcggtcactctggggcagtcttctggcctcactgactcctccaccattgcctcccccagacccccctgcccctcccactcttcttcataactgccacctttgccagaagctccagagagactccccaacctgccatgcctgcctccaccccaaccgtacagtccccactgcgctgtccagcccctggtaccatacctatggcctggctcccccctggccttggagcccggtgcccctttcacttcctcagcctcagcaatgttcccttttcagtgtcatggagctggctcgcctcaagtctttcgttttcccaggctaggtagggctgtgaggaatgcattaagagggtttgggagtttctgagaacctggaggagcaaagcttgattcagatcctgtctgcctcgctgggtccttggcaggtcccctgtcctcctgggtgggagcttatggggtggtggggcagaaggactgaaggtaattcactcctagatcgcagtggctggctgcttggccaggacagtgatgccgccagggagagcttccgcttggtgaccagggacatgtcccagatggacatagaagcccctctctgcctccctgggattttttagacttttacttttgatttccctaggatggaagagtataggtgggagataagggaagtggggtgagaggagaaaggaaatgttggcatgggcctgtgtgatgtccctgaggcagaagagccggggactgatgggttcaggtgggagctgctgggtgaggcagggaacccttttcactcccattccttagctttagtctaatggagccaaggactgctgggaccttcaaccctgatcttttgtcttccagtcttctcttagtgtcctgctcctaggtttccctctcttctggttcttctcccaggtattctcttcccaggcctctctggccactgctttgtatcagggtttttcacgcttttgtagaactgaggtttcaataaacagtttcagttgca

SEQ ID NO: 292915 - DNA, 1232 bp, Homo sapiens
actctagaggatctctgctttgggacggcgggcaaggacagctccgcgagccccctacaactcgtttccttccgttcaccttcgcagggcggcgactggcggcgcgatggacctgaccttggactgacctcccgttgcctcctggagccctgcataccttctgtgccacaatgcctgccgtctcccgctaatgtctccagctgcctggaaggcagcatggggctgcggtcactctggggcagtcttctggcctcactgactcctccaccattgcctcccccagacccccctgcccctcccactcttcttcataactgccacctttgccagaagctccagagagactccccaacctgccatgcctgcctccaccccaaccgtacagtccccactgcgctgtccagcccctggtaccatacctatggcctggctcccccctggccttggagcccggtgcccctttcacttcctcagcctcagcaatgttcccttttcagtgtcatggagctggctcgcctcaagtctttcgttttcccaggctaggtagggctgtgaggaatgcattaagagggtttgggagtttctgagaacctggaggagcaaagcttgattcagatcctgtctgcctcgctgggtccttggcaggtcccctgtcctcctgggtgggagcttatggggtggtggggcagaaggactgaaggtaattcactcctagatcgcagtggctggctgcttggccaggacagtgatgccgccagggagagcttccgcttggtgaccagggacatgtcccagatggacatagaagcccctctctgcctccctgggattttttagacttttacttttgatttccctaggatggaagagtataggtgggagataagggaagtggggtgagaggagaaaggaaatgttggcatgggcctgtgtgatgtccctgaggcagaagagccggggactgatgggttcaggtgggagctgctgggtgaggcagggaacccttttcactcccattccttagctttagtctaatggagccaaggactgctgggaccttcaaccctgatcttttgtcttccagtcttctcttagtgtcctgctcctaggtttccctctcttctggttcttctcccaggtattctcttcccaggcctctctggccactgctttgtatcagggtttttcacgcttttgtagaactgaggtttcaataaacagtttcagttgca

SEQ ID NO: 292916 - DNA, 1263 bp, Homo sapiens
tgctggtgttctagaggatcccttcttgtgctggcgtgtgttctccggtgtggctgagcagcagggacggtggcgaggctggtacacctacacagacctgtgtgtgctgctggagcagccgacctggcagttggccctgggctccctctgccagcggctggtaaagctgtcttgcctgttagctgtggcatatgtgagcaaatgcctgccgtctcccgctaatgtctccagctgcctggaaggcagcatggggctgcggtcactctggggcagtcttctggcctcactgactcctccaccattgcctcccccagacccccctgcccctcccactcttcttcataactgccacctttgccagaagctccagagagactccccaacctgccatgcctgcctccaccccaaccgtacagtccccactgcgctgtccagcccctggtaccatacctatggcctggctcccccctggccttggagcccggtgcccctttcacttcctcagcctcagcaatgttcccttttcagtgtcatggagctggctcgcctcaagtctttcgttttcccaggctaggtagggctgtgaggaatgcattaagagggtttgggagtttctgagaacctggaggagcaaagcttgattcagatcctgtctgcctcgctgggtccttggcaggtcccctgtcctcctgggtgggagcttatggggtggtggggcagaaggactgaaggtaattcactcctagatcgcagtggctggctgcttggccaggacagtgatgccgccagggagagcttccgcttggtgaccagggacatgtcccagatggacatagaagcccctctctgcctccctgggattttttagacttttacttttgatttccctaggatggaagagtataggtgggagataagggaagtggggtgagaggagaaaggaaatgttggcatgggcctgtgtgatgtccctgaggcagaagagccggggactgatgggttcaggtgggagctgctgggtgaggcagggaacccttttcactcccattccttagctttagtctaatggagccaaggactgctgggaccttcaaccctgatcttttgtcttccagtcttctcttagtgtcctgctcctaggtttccctctcttctggttcttctcccaggtattctcttcccaggcctctctggccactgctttgtatcagggtttttcacgcttttgtagaactgaggtttcaataaacagtttcagttgca

SEQ ID NO: 292917 - DNA, 1088 bp, Homo sapiens
  misc_feature (22)..(22): n is a, c, g, or t
  misc_feature (61)..(61): n is a, c, g, or t
  misc_feature (67)..(67): n is a, c, g, or t
cctccgttgctctgaccctgantctttttccaaaatcctccgtttttcctatttctccagntcctgnaggcagcatgggctgggtcactctggggcagtcttctggcctcactgactcctccaccattgcctcccccagacccccctgcccctcccactcttcttcataactgccacctttgccagaagctccagagagactccccaacctgccatgcctgcctccaccccaaccgtacagtccccactgcgctgtccagcccctggtaccatacctatggcctggctcccccctggccttggagcccggtgcccctttcacttcctcagcctcagcaatgttcccttttcagtgtcatggagctggctcgcctcaagtctttcgttttcccaggctaggtagggctgtgaggaatgcattaagagggtttgggagtttctgagaacctggaggagcaaagcttgattcagatcctgtctgcctcgctgggtccttggcaggtcccctgtcctcctgggtgggagcttatggggtggtggggcagaaggactgaaggtaattcactcctagatcgcagtggctggctgcttggccaggacagtgatgccgccagggagagcttccgcttggtgaccagggacatgtcccagatggacatagaagcccctctctgcctccctgggattttttagacttttacttttgatttccctaggatggaagagtataggtgggagataagggaagtggggtgagaggagaaaggaaatgttggcatgggcctgtgtgatgtccctgaggcagaagagccggggactgatgggttcaggtgggagctgctgggtgaggcagggaacccttttcactcccattccttagctttagtctaatggagccaaggactgctgggaccttcaaccctgatcttttgtcttccagtcttctcttagtgtcctgctcctaggtttccctctcttctggttcttctcccaggtattctcttcccaggcctctctggccactgctttgtatcagggtttttcacgcttttgtagaactgaggtttcaataaacagtttcagttgca

SEQ ID NO: 292918 - DNA, 717 bp, Homo sapiens
ttggaaactttgatctcaagaactctcttgatggtgggcacaagacagatagatgattgctgctttcctttgccaaacttggatgcatttttctctttgtttccaaagtataggcaacaggttaaactaccacgtggggtagtttatcaatcctcccgcctcatccttgggcagaaggactgaaggtaattcactcctagatcgcagtggctggctgcttggccaggacagtgatgccgccagggagagcttccgcttggtgaccagggacatgtcccagatggacatagaagcccctctctgcctccctgggattttttagacttttacttttgatttccctaggatggaagagtataggtgggagataagggaagtggggtgagaggagaaaggaaatgttggcatgggcctgtgtgatgtccctgaggcagaagagccggggactgatgggttcaggtgggagctgctgggtgaggcagggaacccttttcactcccattccttagctttagtctaatggagccaaggactgctgggaccttcaaccctgatcttttgtcttccagtcttctcttagtgtcctgctcctaggtttccctctcttctggttcttctcccaggtattctcttcccaggcctctctggccactgctttgtatcagggtttttcacgcttttgtagaactgaggtttcaataaacagtttcagttgca

SEQ ID NO: 292919 - DNA, 696 bp, Homo sapiens
  misc_feature (19)..(19): n is a, c, g, or t
gccgccgggggagggagcngcgagggcgagggcgaggacggcggcccgccccggggaggcaggctggcaggtggacaggcgggcaaggacagctccgcgagccccctacaactcgtttccttccgttcaccttcgcagggcggcgactggcggcgcgatggacctgaccgggctcctgctggacgaagaaggcaccttctccctcgccggcttccaggacttcacgttcctcccaggacaccagaagctgagtgcccggatccgaaggaggctctactatggctgggactgggaagccgactgtagcctggaggagctctccagcccggtggcagacattgctgtcgaactgctccagaaggcagcccccagccctattcgccgactccagaagaaatacgtagctcatgtgtcccgggaggcatgcatctccccatgtgctatgatgctggctctggtgtacattgaacggctccggcaccgaaacccagactacttgcagcatgtgtcatcctctgacttgttcctgatctccatgatagtacctctaagcgccacccgatgagccaccggctcgttgtgcaccatgaagttgagacagagatggagacacctcagccccacctctctggaacaggaaagatgattggggagggagcacaggtcagcgtgggaagagggtcatggtggacatgg

SEQ ID NO: 292920 - DNA, 4507 bp, Homo sapiens
cgcgcgcggcagccccgaggcagcagagcgcggagccgggagcgcggggagcgcgggccggcggcggcgagggaggacgggggcgcagacggccggcgcgcggcgcggctaccatgggcgtgcggtgagcagccgctcgggacgacttcctcggctgcgcggcgctcgcgcggagctccccggccggcggtgcgtccccacggtcaccatgaaagacgacttcgcagaggaggaggaggtgcaatccttcggttacaagcggtttggtattcaggaaggaacacaatgtaccaaatgtaaaaataactgggcactgaagttttctatcatattattatacattttgtgtgccttgctaacaatcacagtagccattttgggatataaagttgtagagaaaatggacaatgtcacaggtggcatggaaacatctcgccaaacctatgatgacaagctcacagcagtggaaagtgacctgaaaaaattaggtgaccaaactgggaagaaagctatcagcaccaactcagaactctccaccttcagatcagacattctagatctccgtcagcaacttcgtgagattacagaaaaaaccagcaagaacaaggatacgctggagaagttacaggcgagcggggatgctctggtggacaggcagagtcaattgaaagaaactttggagaataactctttcctcatcaccactgtaaacaaaaccctccaggcgtataatggctatgtcacgaatctgcagcaagataccagcgtgctccagggcaatctgcagaaccaaatgtattctcataatgtggtcatcatgaacctcaacaacctgaacctgacccaggtgcagcagaggaacctcatcacgaatctgcagcggtctgtggatgacacaagccaggctatccagcgaatcaagaacgactttcaaaatctgcagcaggtttttcttcaagccaagaaggacacggattggctgaaggagaaagtgcagagcttgcagacgctggctgccaacaactctgcgttggccaaagccaacaacgacaccctggaggatatgaacagccagctcaactcattcacaggtcagatggagaacatcaccactatctctcaagccaacgagcagaacctgaaagacctgcaggacttacacaaagatgcagagaatagaacagccatcaagttcaaccaactggaggaacgcttccagctctttgagacggatattgtgaacatcattagcaatatcagttacacagcccaccacctgcggacgctgaccagcaatctaaatgaagtcaggaccacttgcacagatacccttaccaaacacacagatgatctgacctccttgaataataccctggccaacatccgtttggattctgtttctctcaggatgcaacaagatttgatgaggtcgaggttagacactgaagtagccaacttatcagtgattatggaagaaatgaagctagtagactccaagcatggtcagctcatcaagaattttacaatactacaaggtccaccgggccccaggggtccaagaggtgacagaggatcccagggaccccctggcccaactggcaacaagggacagaaaggagagaagggggagcctggaccacctggccctgcgggtgagagaggcccaattggaccagctggtccccccggagagcgtggcggcaaaggatctaaaggctcccagggccccaaaggctcccgtggttcccctgggaagcccggccctcagggccccagtggggacccaggccccccgggcccaccaggcaaagagggactccccggccctcagggccctcctggcttccagggacttcagggcaccgttggggagcctggggtgcctggacctcggggactgccaggcttgcctggggtaccaggcatgccaggccccaagggcccccccggccctcctggcccatcaggagcggtggtgcccctggccctgcagaatgagccaaccccggcaccggaggacaatggtaagtccaagccctccctccagccagggggacagggcagtgcatgtgcttgagactgagccaacccccagtgtgtggccccacccatgttatttttgtttttgtttttgttttgagacagggtctcactctgttgcccaggctggagtgcagtggcgtgatctcggctcactgcaacccccacatcccgggttcaagtgattctcctgccttagcctcccaggtagctgggaatacaagcgtgtgcccccacagccagctaatttttgtatttttagtagagaggggtttcacagtgttgggcagggtggtttcaaacttctggcctcaagtgatccacctacctagtttcccaaagtgctgggaatacaggtgtgaaccaccacgttttgtcccccggctgcatattatttaacagcaaaggcatcataggggttggcacaggagccctgctgccagaacaggcctccataccaggcatgtgtctctctctaaacgccattgggttttttagtgctcatttgttttatgtattatgtgtgtatgtatgggacagggtctcactctgtcacccaggctggaatgacgaagtgaagtagtgcaaacatagctcattgcagctttgacctcctgggcttaggtgatcttcccactcagactcctgcgtagctgggaccacaggggtatgccaccacacctggctaattttttattttcctttttgtagaaacagggtcttgctatgttgcccaggctggtcttgaactcctggcctcaagcaaccctcctgcctcagtcttgcaaagtgctgggattccaggtgggagccactgcacctggctcttgcacttgtttatttataggagccagccctcagaagacaaacacaatgcaaaacatttccttcagggaagcctgctggccgccctgagcgctcttccctcgttttacatcctcactctggagatagatgggctccctcggttagctccatcaacatgtggatggaaccctctgctattgatgactacatttaatttctttttgagaaaggtgttagatgttacggtgccttctagtcttttgataattaaacctttggcaaaactcgaatgtttggttagcaaccaagcctatttttctctcctttgacccaaccgctattctacttgattttggtcggtgaggcccgggttatttttgttgatccgtgagcccatttttggtgctgggttctcacatccaagtgttcctgggttccgtatgattccagactgacgctgaacatctgtgcctgccctgcttcttgttgttgcttctgtcatttctgtcattgtgaagacggatccaaacacagaagaacaaagacccagtccaagatccatccagattatgtggtttcggcttgtgctctgcagtccactttgggtcatgcttgctgcgagcacgtccgtgaacgtcagctgtgggcctcgtgcagggacgctcaggctgctcccagcgggaccacagttttggcctctgaaacacagctgaagaaaggcagagtgctttctgtgatcttttaatcaatgttttccacttttgcattcctaggctgcccgcctcactggaagaacttcacagacaaatgctactatttttcagttgagaaagaaatttttgaggatgcaaagcttttctgtgaagacaagtcttcacatcttgttttcataaacactagagaggaacagcaatggataaaaaaacagatggtagggagagagagccactggatcggcctcacagactcagagcgtgaaaatgaatggaagtggctggatgggacatctccagactacaaaaattggaaagctggacagccggataactggggtcatggccatgggccaggagaagactgtgctgggttgatttatgctgggcagtggaacgatttccaatgtgaagacgtcaataacttcatttgcgaaaaagacagggagacagtactgtcatctgcattataacggactgtgatgggatcacatgagcaaattttcagctctcaaaggcaaaggacactcctttctaattgcatcaccttctcatcagattgaaaaaaaaaaagcactgaaaaccaattactgaaaaaaaattgacagctagtgttttttaccatccgtcattacccaaagacttgggaactaaaatgttccccagggtgatatgctgattttcattgtgcacatggactgaatcacatagattctcctccgtcagtaaccgtgcgattatacaaattatgtcttccaaagtatggaacactccaatcagaaaaaggttatcattggtcgttgagttatgggaagaacttaagcatatactgtgtaaacagtgccatacatttctaaaatcccaagtgtaggaaaaatatgcagacatacagatatataggccaactattagtaataatatgaaatatacttaaagagcttttaaaa

SEQ ID NO: 292921 - DNA, 425 bp, Homo sapiens
  misc_feature (10)..(10): n is a, c, g, or t
  misc_feature (346)..(346): n is a, c, g, or t
aagagctggnagcgtcctccagttggttgaacttgatggctgttctattctctgcatcttgtgtaagtcctgcaggtctttcaggttctactatttttcagttgagaaagaaatttttgaggatgcaaagcttttctgtgaagacaagtcttcacatcttgttttcataaacactagagaggaacagcaatggataaaaaaacagatggtagggagagagagccactggatcggcctcacagactcagagcgtgaaaatgaatggaagtggctggatgggacatctccagactacaaaaattggaaagctggacagccggataactggaatctgcagaatgagccnaccccggcaccggaggacatagctgcccgcctcactggaagacttcacagacaatgctactatttttcagtgagacaca

SEQ ID NO: 292922 - DNA, 3967 bp, Homo sapiens
cgcgcgcggcagccccgaggcagcagagcgcggagccgggagcgcggggagcgcgggccggcggcggcgagggaggacgggggcgcagacggccggcgcgcggcgcggctaccatgggcgtgcggtgagcagccgctcgggacgacttcctcggctgcgcggcgctcgcgcggagctccccggccggcggtgcgtccccacggtcaccatgaaagacgacttcgcagaggaggaggaggtgcaatccttcggttacaagcggtttggtattcaggaaggaacacaatgtaccaaatgtaaaaataactgggcactgaagttttctatcatattattatacattttgtgtgccttgctaacaatcacagtagccattttgggatataaagttgtagagaaaatggacaatgtcacaggtggcatggaaacatctcgccaaacctatgatgacaagctcacagcagtggaaagtgacctgaaaaaattaggtgaccaaactgggaagaaagctatcagcaccaactcagaactctccaccttcagatcagacattctagatctccgtcagcaacttcgtgagattacagaaaaaaccagcaagaacaaggatacgctggagaagttacaggcgagcggggatgctctggtggacaggcagagtcaattgaaagaaactttggagaataactctttcctcatcaccactgtaaacaaaaccctccaggcgtataatggctatgtcacgaatctgcagcaagataccagcgtgctccagggcaatctgcagaaccaaatgtattctcataatgtggtcatcatgaacctcaacaacctgaacctgacccaggtgcagcagaggaacctcatcacgaatctgcagcggtctgtggatgacacaagccaggctatccagcgaatcaagaacgactttcaaaatctgcagcaggtttttcttcaagccaagaaggacacggattggctgaaggagaaagtgcagagcttgcagacgctggctgccaacaactctgcgttggccaaagccaacaacgacaccctggaggatatgaacagccagctcaactcattcacaggtcagatggagaacatcaccactatctctcaagccaacgagcagaacctgaaagacctgcaggacttacacaaagatgcagagaatagaacagccatcaagttcaaccaactggaggaacgcttccagctctttgagacggatattgtgaacatcattagcaatatcagttacacagcccaccacctgcggacgctgaccagcaatctaaatgaagtcaggaccacttgcacagatacccttaccaaacacacagatgatctgacctccttgaataataccctggccaacatccgtttggattctgtttctctcaggatgcaacaagatttgatgaggtcgaggttagacactgaagtagccaacttatcagtgattatggaagaaatgaagctagtagactccaagcatggtcagctcatcaagaattttacaatactacaaggtccaccgggccccaggggtccaagaggtgacagaggatcccagggaccccctggcccaactggcaacaagggacagaaaggagagaagggggagcctggaccacctggccctgcgggtgagagaggcccaattggaccagctggtccccccggagagcgtggcggcaaaggatctaaaggctcccagggccccaaaggctcccgtggttcccctgggaagcccggccctcagggccccagtggggacccaggccccccgggcccaccaggcaaagagggactccccggccctcagggccctcctggcttccagggacttcagggcaccgttggggagcctggggtgcctggacctcggggactgccaggcttgcctggggtaccaggcatgccaggccccaagggcccccccggccctcctggcccatcaggagcggtggtgcccctggccctgcagaatgagccaaccccggcaccggaggacaatggctgcccgcctcactggaagaacttcacagacaaatgctactatttttcagttgagaaagaaatttttgaggatgcaaagcttttctgtgaagacaagtcttcacatcttgttttcataaacactagagaggaacagcaatggataaaaaaacagatggtagggagagagagccactggatcggcctcacagactcagagcgtgaaaatgaatggaagtggctggatgggacatctccagactacaaaaattggaaagctggacagccggataactggggtcatggccatgggccaggagaagactgtgctgggttgatttatgctgggcagtggaacgatttccaatgtgaagacgtcaataacttcatttgcgaaaaagacagggagacagtactgtcatctgcattataacggactgtgatgggatcacatgagcaaattttcagctctcaaaggcaaaggacactcctttctaattgcatcaccttctcatcagattgaaaaaaaaaaagcactgaaaaccaattactgaaaaaaaattgacagctagtgttttttaccatccgtcattacccaaagacttgggaactaaaatgttccccagggtgatatgctgattttcattgtgcacatggactgaatcacatagattctcctccgtcagtaaccgtgcgattatacaaattatgtcttccaaagtatggaacactccaatcagaaaaaggttatcattggtcgttgagttatgggaagaacttaagcatatactgtgtaaacagtgccatacatttctaaaatcccaagtgtaggaaaaatatgcagacatacagatatataggccaactattagtaataatatgaaatatacttaaagagcttttaaaactttgtatttttgtacaaaatatttgtcttttacaatttttttcctttttttttttttgtcattttaccgacataatacatggagccaaagaaaacaataatggtactaataaaaactcctagggtttcctgtcagatttaattctacccagtggcaaagaattttttcaattgtggctttaaaaaaataattaaatatacatgtatatatatatatatatatatatttttttttttttttaatgtttcatttcctcagaggaaccaatcacttggaatgtctagaaatatccttgcagattttgccagtgtcaatcaagcctgcacacatgcacagtgaagcgggctgtgctgccttgagcccatcaccagccaacattcttgatgtgtgcctgaccagacacagaagaaatgggcaactcaagacgtgcttccacttcattttggtggagtcgggaggtgtgggggatggagaggcatctgttgggaagggcactgaatctggcctatctggaaggccctgtgtcatggctgagctatgactgtacttggcatcagatccctacagagccaacattaactgtcaggaacgtaggcgtcacatcagccaaaggcagagatgctagaaagatgggaaccggctacgtgttacctggaaagtttgttttcttaagtcatattccaaaaacataactccaaggcatacgcatgataaaatgcaagaataaacttttggccactttgtggaactcttaaaagaacctttccagccgggcgcagtggctcatgcctgtaatcccagcactttgggaggccgaggcaggcagatgacttgaggtcaggagttcgagaccagcctggccaacgtggcaaaaccccatctctactaaaaataagaaaattagccgggtgtagtggcacatgcctgtaatcccagctactcaggaggctgaggcaggagaatcgcttgagcccaggaggcagagattgcagtgagccaagatcgcaccactgcactccagcctcggtgacagagcaagactccatctcagaaaa

SEQ ID NO: 292923 - DNA, 3856 bp, Homo sapiens
cgcgcgcggcagccccgaggcagcagagcgcggagccgggagcgcggggagcgcgggccggcggcggcgagggaggacgggggcgcagacggccggcgcgcggcgcggctaccatgggcgtgcggtgagcagccgctcgggacgacttcctcggctgcgcggcgctcgcgcggagctccccggccggcggtgcgtccccacggtcaccatgaaagacgacttcgcagaggaggaggaggtgcaatccttcggttacaagcggtttggtattcaggaaggaacacaatgtaccaaatgtaaaaataactgggcactgaagttttctatcatattattatacattttgtgtgccttgctaacaatcacagtagccattttgggatataaagttgtagagaaaatggacaatgtcacaggtggcatggaaacatctcgccaaacctatgatgacaagctcacagcagtggaaagtgacctgaaaaaattaggtgaccaaactgggaagaaagctatcagcaccaactcagaactctccaccttcagatcagacattctagatctccgtcagcaacttcgtgagattacagaaaaaaccagcaagaacaaggatacgctggagaagttacaggcgagcggggatgctctggtggacaggcagagtcaattgaaagaaactttggagaataactctttcctcatcaccactgtaaacaaaaccctccaggcgtataatggctatgtcacgaatctgcagcaagataccagcgtgctccagggcaatctgcagaaccaaatgtattctcataatgtggtcatcatgaacctcaacaacctgaacctgacccaggtgcagcagaggaacctcatcacgaatctgcagcggtctgtggatgacacaagccaggctatccagcgaatcaagaacgactttcaaaatctgcagcaggtttttcttcaagccaagaaggacacggattggctgaaggagaaagtgcagagcttgcagacgctggctgccaacaactctgcgttggccaaagccaacaacgacaccctggaggatatgaacagccagctcaactcattcacaggtcagatggagaacatcaccactatctctcaagccaacgagcagaacctgaaagacctgcaggacttacacaaagatgcagagaatagaacagccatcaagttcaaccaactggaggaacgcttccagctctttgagacggatattgtgaacatcattagcaatatcagttacacagcccaccacctgcggacgctgaccagcaatctaaatgaagtcaggaccacttgcacagatacccttaccaaacacacagatgatctgacctccttgaataataccctggccaacatccgtttggattctgtttctctcaggatgcaacaagatttgatgaggtcgaggttagacactgaagtagccaacttatcagtgattatggaagaaatgaagctagtagactccaagcatggtcagctcatcaagaattttacaatactacaaggtccaccgggccccaggggtccaagaggtgacagaggatcccagggaccccctggcccaactggcaacaagggacagaaaggagagaagggggagcctggaccacctggccctgcgggtgagagaggcccaattggaccagctggtccccccggagagcgtggcggcaaaggatctaaaggctcccagggccccaaaggctcccgtggttcccctgggaagcccggccctcagggccccagtggggacccaggccccccgggcccaccaggcaaagagggactccccggccctcagggccctcctggcttccagggacttcagggcaccgttggggagcctggggtgcctggacctcggggactgccaggcttgcctggggtaccaggcatgccaggccccaagggcccccccggccctcctggcccatcaggagcggtggtgcccctggccctgcagaatgagccaaccccggcaccggaggacaatggctgcccgcctcactggaagaacttcacagacaaatgctactatttttcagttgagaaagaaatttttgaggatgcaaagcttttctgtgaagacaagtcttcacatcttgttttcataaacactagagaggaacagcaatggataaaaaaacagatggtagggagagagagccactggatcggcctcacagactcagagcgtgaaaatgaatggaagtggctggatgggacatctccagactacaaaaattggaaagctggacagccggataactggggtcatggccatgggccaggagaagactgtgctgggttgatttatgctgggcagtggaacgatttccaatgtgaagacgtcaataacttcatttgcgaaaaagacagggagacagtactgtcatctgcattataacggactgtgatgggatcacatgagcaaattttcagctctcaaaggcaaaggacactcctttctaattgcatcaccttctcatcagattgaaaaaaaaaaagcactgaaaaccaattactgaaaaaaaattgacagctagtgttttttaccatccgtcattacccaaagacttgggaactaaaatgttccccagggtgatatgctgattttcattgtgcacatggactgaatcacatagattctcctccgtcagtaaccgtgcgattatacaaattatgtcttccaaagtatggaacactccaatcagaaaaaggttatcattggtcgttgagttatgggaagaacttaagcatatactgtgtaaacagtgccatacatttctaaaatcccaagtgtaggaaaaatatgcagacatacagatatataggccaactattagtaataatatgaaatatacttaaagagcttttaaaactttgtatttttgtacaaaatatttgtcttttacaatttttttcctttttttttttttgtcattttaccgacataatacatggagccaaagaaaacaataatggtactaataaaaactcctagggtttcctgtcagatttaattctacccagtggcaaagaattttttcaattgtggctttaaaaaaataattaaatatacatgtatatatatatatatatatatatttttttttttttttaatgtttcatttcctcagaggaaccaatcacttggaatgtctagaaatatccttgcagattttgccagtgtcaatcaagcctgcacacatgcacagtgaagcgggctgtgctgccttgagcccatcaccagccaacattcttgatgtgtgcctgaccagacacagaagaaatgggcaactcaagacgtgcttccacttcattttggtggagtcgggaggtgtgggggatggagaggcatctgttgggaagggcactgaatctggcctatctggaaggccctgtgtcatggctgagctatgactgtacttggcatcagatccctacagagccaacattaactgtcaggaacgtaggcgtcacatcagccaaaggcagagatgctagaaagatgggaaccggctacgtgttacctggaaagtttgttttcttaagtcatattccaaaaacataacaaagtgctgggattacaggtgtgagccaccgtgcccggcctacacaccagctttctattcacctacacacaactgatgctcttttggagtggagagttttagtaaaatatgatggggtcttcaggcacctgagttgctacttactactatgagaagatagaaaatgttttttcctctaaacagcttttgaaagaatgaatgcacaacaaggcaaaaaataaaaactttcttttccttttctacgaaaaatg

SEQ ID NO: 292924 - DNA, 3967 bp, Homo sapiens
cgcgcgcggcagccccgaggcagcagagcgcggagccgggagcgcggggagcgcgggccggcggcggcgagggaggacgggggcgcagacggccggcgcgcggcgcggctaccatgggcgtgcggtgagcagccgctcgggacgacttcctcggctgcgcggcgctcgcgcggagctccccggccggcggtgcgtccccacggtcaccatgaaagacgacttcgcagaggaggaggaggtgcaatccttcggttacaagcggtttggtattcaggaaggaacacaatgtaccaaatgtaaaaataactgggcactgaagttttctatcatattattatacattttgtgtgccttgctaacaatcacagtagccattttgggatataaagttgtagagaaaatggacaatgtcacaggtggcatggaaacatctcgccaaacctatgatgacaagctcacagcagtggaaagtgacctgaaaaaattaggtgaccaaactgggaagaaagctatcagcaccaactcagaactctccaccttcagatcagacattctagatctccgtcagcaacttcgtgagattacagaaaaaaccagcaagaacaaggatacgctggagaagttacaggcgagcggggatgctctggtggacaggcagagtcaattgaaagaaactttggagaataactctttcctcatcaccactgtaaacaaaaccctccaggcgtataatggctatgtcacgaatctgcagcaagataccagcgtgctccagggcaatctgcagaaccaaatgtattctcataatgtggtcatcatgaacctcaacaacctgaacctgacccaggtgcagcagaggaacctcatcacgaatctgcagcggtctgtggatgacacaagccaggctatccagcgaatcaagaacgactttcaaaatctgcagcaggtttttcttcaagccaagaaggacacggattggctgaaggagaaagtgcagagcttgcagacgctggctgccaacaactctgcgttggccaaagccaacaacgacaccctggaggatatgaacagccagctcaactcattcacaggtcagatggagaacatcaccactatctctcaagccaacgagcagaacctgaaagacctgcaggacttacacaaagatgcagagaatagaacagccatcaagttcaaccaactggaggaacgcttccagctctttgagacggatattgtgaacatcattagcaatatcagttacacagcccaccacctgcggacgctgaccagcaatctaaatgaagtcaggaccacttgcacagatacccttaccaaacacacagatgatctgacctccttgaataataccctggccaacatccgtttggattctgtttctctcaggatgcaacaagatttgatgaggtcgaggttagacactgaagtagccaacttatcagtgattatggaagaaatgaagctagtagactccaagcatggtcagctcatcaagaattttacaatactacaaggtccaccgggccccaggggtccaagaggtgacagaggatcccagggaccccctggcccaactggcaacaagggacagaaaggagagaagggggagcctggaccacctggccctgcgggtgagagaggcccaattggaccagctggtccccccggagagcgtggcggcaaaggatctaaaggctcccagggccccaaaggctcccgtggttcccctgggaagcccggccctcagggccccagtggggacccaggccccccgggcccaccaggcaaagagggactccccggccctcagggccctcctggcttccagggacttcagggcaccgttggggagcctggggtgcctggacctcggggactgccaggcttgcctggggtaccaggcatgccaggccccaagggcccccccggccctcctggcccatcaggagcggtggtgcccctggccctgcagaatgagccaaccccggcaccggaggacaatggctgcccgcctcactggaagaacttcacagacaaatgctactatttttcagttgagaaagaaatttttgaggatgcaaagcttttctgtgaagacaagtcttcacatcttgttttcataaacactagagaggaacagcaatggataaaaaaacagatggtagggagagagagccactggatcggcctcacagactcagagcgtgaaaatgaatggaagtggctggatgggacatctccagactacaaaaattggaaagctggacagccggataactggggtcatggccatgggccaggagaagactgtgctgggttgatttatgctgggcagtggaacgatttccaatgtgaagacgtcaataacttcatttgcgaaaaagacagggagacagtactgtcatctgcattataacggactgtgatgggatcacatgagcaaattttcagctctcaaaggcaaaggacactcctttctaattgcatcaccttctcatcagattgaaaaaaaaaaagcactgaaaaccaattactgaaaaaaaattgacagctagtgttttttaccatccgtcattacccaaagacttgggaactaaaatgttccccagggtgatatgctgattttcattgtgcacatggactgaatcacatagattctcctccgtcagtaaccgtgcgattatacaaattatgtcttccaaagtatggaacactccaatcagaaaaaggttatcattggtcgttgagttatgggaagaacttaagcatatactgtgtaaacagtgccatacatttctaaaatcccaagtgtaggaaaaatatgcagacatacagatatataggccaactattagtaataatatgaaatatacttaaagagcttttaaaactttgtatttttgtacaaaatatttgtcttttacaatttttttcctttttttttttttgtcattttaccgacataatacatggagccaaagaaaacaataatggtactaataaaaactcctagggtttcctgtcagatttaattctacccagtggcaaagaattttttcaattgtggctttaaaaaaataattaaatatacatgtatatatatatatatatatatatttttttttttttttaatgtttcatttcctcagaggaaccaatcacttggaatgtctagaaatatccttgcagattttgccagtgtcaatcaagcctgcacacatgcacagtgaagcgggctgtgctgccttgagcccatcaccagccaacattcttgatgtgtgcctgaccagacacagaagaaatgggcaactcaagacgtgcttccacttcattttggtggagtcgggaggtgtgggggatggagaggcatctgttgggaagggcactgaatctggcctatctggaaggccctgtgtcatggctgagctatgactgtacttggcatcagatccctacagagccaacattaactgtcaggaacgtaggcgtcacatcagccaaaggcagagatgctagaaagatgggaaccggctacgtgttacctggaaagtttgttttcttaagtcatattccaaaaacataactccaaggcatacgcatgataaaatgcaagaataaacttttggccactttgtggaactcttaaaagaacctttccagccgggcgcagtggctcatgcctgtaatcccagcacaaagtgctgggattacaggtgtgagccaccgtgcccggcctacacaccagctttctattcacctacacacaactgatgctcttttggagtggagagttttagtaaaatatgatggggtcttcaggcacctgagttgctacttactactatgagaagatagaaaatgttttttcctctaaacagcttttgaaagaatgaatgcacaacaaggcaaaaaataaaaactttcttttccttttctacgaaaaatg

SEQ ID NO: 292925 - DNA, 3942 bp, Homo sapiens
gtgaaatcctaagtacagcattattctgggaagcaaaggagacaggcagaagcaaggacaaattaagagaggtaacagtctcatcatgactgatagtcttgttctaacatcttgagaaaagctgtccacagtgtaaagtcatcaacttgtcgtggtttgcagtttgagtgtctctcggtcaccatgaaagacgacttcgcagaggaggaggaggtgcaatccttcggttacaagcggtttggtattcaggaaggaacacaatgtaccaaatgtaaaaataactgggcactgaagttttctatcatattattatacattttgtgtgccttgctaacaatcacagtagccattttgggatataaagttgtagagaaaatggacaatgtcacaggtggcatggaaacatctcgccaaacctatgatgacaagctcacagcagtggaaagtgacctgaaaaaattaggtgaccaaactgggaagaaagctatcagcaccaactcagaactctccaccttcagatcagacattctagatctccgtcagcaacttcgtgagattacagaaaaaaccagcaagaacaaggatacgctggagaagttacaggcgagcggggatgctctggtggacaggcagagtcaattgaaagaaactttggagaataactctttcctcatcaccactgtaaacaaaaccctccaggcgtataatggctatgtcacgaatctgcagcaagataccagcgtgctccagggcaatctgcagaaccaaatgtattctcataatgtggtcatcatgaacctcaacaacctgaacctgacccaggtgcagcagaggaacctcatcacgaatctgcagcggtctgtggatgacacaagccaggctatccagcgaatcaagaacgactttcaaaatctgcagcaggtttttcttcaagccaagaaggacacggattggctgaaggagaaagtgcagagcttgcagacgctggctgccaacaactctgcgttggccaaagccaacaacgacaccctggaggatatgaacagccagctcaactcattcacaggtcagatggagaacatcaccactatctctcaagccaacgagcagaacctgaaagacctgcaggacttacacaaagatgcagagaatagaacagccatcaagttcaaccaactggaggaacgcttccagctctttgagacggatattgtgaacatcattagcaatatcagttacacagcccaccacctgcggacgctgaccagcaatctaaatgaagtcaggaccacttgcacagatacccttaccaaacacacagatgatctgacctccttgaataataccctggccaacatccgtttggattctgtttctctcaggatgcaacaagatttgatgaggtcgaggttagacactgaagtagccaacttatcagtgattatggaagaaatgaagctagtagactccaagcatggtcagctcatcaagaattttacaatactacaaggtccaccgggccccaggggtccaagaggtgacagaggatcccagggaccccctggcccaactggcaacaagggacagaaaggagagaagggggagcctggaccacctggccctgcgggtgagagaggcccaattggaccagctggtccccccggagagcgtggcggcaaaggatctaaaggctcccagggccccaaaggctcccgtggttcccctgggaagcccggccctcagggccccagtggggacccaggccccccgggcccaccaggcaaagagggactccccggccctcagggccctcctggcttccagggacttcagggcaccgttggggagcctggggtgcctggacctcggggactgccaggcttgcctggggtaccaggcatgccaggccccaagggcccccccggccctcctggcccatcaggagcggtggtgcccctggccctgcagaatgagccaaccccggcaccggaggacaatggctgcccgcctcactggaagaacttcacagacaaatgctactatttttcagttgagaaagaaatttttgaggatgcaaagcttttctgtgaagacaagtcttcacatcttgttttcataaacactagagaggaacagcaatggataaaaaaacagatggtagggagagagagccactggatcggcctcacagactcagagcgtgaaaatgaatggaagtggctggatgggacatctccagactacaaaaattggaaagctggacagccggataactggggtcatggccatgggccaggagaagactgtgctgggttgatttatgctgggcagtggaacgatttccaatgtgaagacgtcaataacttcatttgcgaaaaagacagggagacagtactgtcatctgcattataacggactgtgatgggatcacatgagcaaattttcagctctcaaaggcaaaggacactcctttctaattgcatcaccttctcatcagattgaaaaaaaaaaagcactgaaaaccaattactgaaaaaaaattgacagctagtgttttttaccatccgtcattacccaaagacttgggaactaaaatgttccccagggtgatatgctgattttcattgtgcacatggactgaatcacatagattctcctccgtcagtaaccgtgcgattatacaaattatgtcttccaaagtatggaacactccaatcagaaaaaggttatcattggtcgttgagttatgggaagaacttaagcatatactgtgtaaacagtgccatacatttctaaaatcccaagtgtaggaaaaatatgcagacatacagatatataggccaactattagtaataatatgaaatatacttaaagagcttttaaaactttgtatttttgtacaaaatatttgtcttttacaatttttttcctttttttttttttgtcattttaccgacataatacatggagccaaagaaaacaataatggtactaataaaaactcctagggtttcctgtcagatttaattctacccagtggcaaagaattttttcaattgtggctttaaaaaaataattaaatatacatgtatatatatatatatatatatatttttttttttttttaatgtttcatttcctcagaggaaccaatcacttggaatgtctagaaatatccttgcagattttgccagtgtcaatcaagcctgcacacatgcacagtgaagcgggctgtgctgccttgagcccatcaccagccaacattcttgatgtgtgcctgaccagacacagaagaaatgggcaactcaagacgtgcttccacttcattttggtggagtcgggaggtgtgggggatggagaggcatctgttgggaagggcactgaatctggcctatctggaaggccctgtgtcatggctgagctatgactgtacttggcatcagatccctacagagccaacattaactgtcaggaacgtaggcgtcacatcagccaaaggcagagatgctagaaagatgggaaccggctacgtgttacctggaaagtttgttttcttaagtcatattccaaaaacataactccaaggcatacgcatgataaaatgcaagaataaacttttggccactttgtggaactcttaaaagaacctttccagccgggcgcagtggctcatgcctgtaatcccagcactttgggaggccgaggcaggcagatgacttgaggtcaggagttcgagaccagcctggccaacgtggcaaaaccccatctctactaaaaataagaaaattagccgggtgtagtggcacatgcctgtaatcccagctactcaggaggctgaggcaggagaatcgcttgagcccaggaggcagagattgcagtgagccaagatcgcaccactgcactccagcctcggtgacagagcaagactccatctcagaaaa

SEQ ID NO: 292926 - DNA, 1643 bp, Homo sapiens
gtgaaatcctaagtacagcattattctgggaagcaaaggagacaggcagaagcaaggacaaattaagagaggtaacagtctcatcatgactgatagtcttgttctaacatcttgagaaaagctgtccacagtgtaaagtcatcaacttgtcgtggtttgcagtttgagtgtctctcggtcaccatgaaagacgacttcgcagaggaggaggaggtgcaatccttcggttacaagcggtttggtattcaggaaggaacacaatgtaccaaatgtaaaaataactgggcactgaagttttctatcatattattatacattttgtgtgccttgctaacaatcacagtagccattttgggatataaagttgtagagaaaatggacaatgtcacaggtggcatggaaacatctcgccaaacctatgatgacaagctcacagcagtggaaagtgacctgaaaaaattaggtgaccaaactgggaagaaagctatcagcaccaactcagaactctccaccttcagatcagacattctagatatataggccaactattagtaataatatgaaatatacttaaagagcttttaaaactttgtatttttgtacaaaatatttgtcttttacaatttttttcctttttttttttttgtcattttaccgacataatacatggagccaaagaaaacaataatggtactaataaaaactcctagggtttcctgtcagatttaattctacccagtggcaaagaattttttcaattgtggctttaaaaaaataattaaatatacatgtatatatatatatatatatatatttttttttttttttaatgtttcatttcctcagaggaaccaatcacttggaatgtctagaaatatccttgcagattttgccagtgtcaatcaagcctgcacacatgcacagtgaagcgggctgtgctgccttgagcccatcaccagccaacattcttgatgtgtgcctgaccagacacagaagaaatgggcaactcaagacgtgcttccacttcattttggtggagtcgggaggtgtgggggatggagaggcatctgttgggaagggcactgaatctggcctatctggaaggccctgtgtcatggctgagctatgactgtacttggcatcagatccctacagagccaacattaactgtcaggaacgtaggcgtcacatcagccaaaggcagagatgctagaaagatgggaaccggctacgtgttacctggaaagtttgttttcttaagtcatattccaaaaacataactccaaggcatacgcatgataaaatgcaagaataaacttttggccactttgtggaactcttaaaagaacctttccagccgggcgcagtggctcatgcctgtaatcccagcactttgggaggccgaggcaggcagatgacttgaggtcaggagttcgagaccagcctggccaacgtggcaaaaccccatctctactaaaaataagaaaattagccgggtgtagtggcacatgcctgtaatcccagctactcaggaggctgaggcaggagaatcgcttgagcccaggaggcagagattgcagtgagccaagatcgcaccactgcactccagcctcggtgacagagcaagactccatctcagaaaa

SEQ ID NO: 292927 - DNA, 7851 bp, Homo sapiens
caggaagggagcagaggcgagagccagcctccggcaggagggcgtagaccccggtgccagccagaacggctccagccttcccgcggccagagagccagcggcgggaggggacgggcgggacctccgcggacagccccgggtgcggaccagcgggcagcggccggcgagaccctccctggatccgcccagagcttaccggaccctgcgcgcccccgtcccggctcccggccggctcgggggagaaggcgcccgaggggaggcgccggacagatcgcgtttcggaggcggcgcaggtgctgtaaactgcaaaccataatcctgtcttaatactgcaaacaaatcatagtggaactaaggggaacttaatttactgtttccaggttaactaaggtctcagctgtaaaccaaaagtgagaggagacattaagattttcattcttaccgggttgtcttcttcctgaagagcaatggagccgcttttacttggaagaggactaatcgtatatctaatgttcctcctgttaaaattctcaaaagcaattgaaataccatcttcagttcaacaggttccaacaatcataaaacagtcaaaagtccaagttgcctttcccttcgatgagtattttcaaattgaatgtgaagctaaaggaaatccagaaccaacattttcgtggactaaggatggcaaccctttttatttcactgaccatcggataattccatcgaacaattcaggaacattcaggatcccaaacgaggggcacatatctcactttcaagggaaataccgctgctttgcttcaaataaactgggaatcgctatgtcagaagaaatagaatttatagttccaagtgttccaaaattcccaaaagaaaaaattgaccctcttgaagtggaggagggagatccaattgtcctcccatgcaatcctcccaaaggcctcccacctttacacatttattggatgaatattgaattagaacacatcgaacaagatgaaagagtatacatgagccaaaagggagatctatacttcgcaaacgtggaagaaaaggacagtcgcaatgactactgttgctttgctgcatttccaagattaaggactattgtacagaaaatgccaatgaaactaacagttaacagtttaaagcatgctaatgactcaagttcatccacagaaattggttccaaggcaaattccatcaagcaaagaaaacccaaactgctgttgcctcccactgagagtggcagtgagtcttcaattaccatcctcaaaggggaaatcttgctgcttgagtgttttgctgaaggcttgccaactccacaggttgattggaacaaaattggtggtgacttaccaaaggggagagaagcaaaagaaaattatggcaagactttgaagatagagaatgtctcctaccaggacaaaggaaattatcgctgcacagccagcaatttcttgggaacagccactcacgattttcacgttatagtagaagagcctcctcgctggacaaagaagcctcagagtgctgtgtatagcaccggaagcaatggcatcttgttatgtgaggctgaaggagaacctcaacccacaatcaagtggagagtcaatggctccccagttgacaatcatccatttgctggtgatgttgtcttccccagggaaatcagttttaccaaccttcaaccaaatcatactgctgtgtaccagtgtgaagcctcaaatgtccatggaactatccttgccaatgccaatattgatgttgtggatgtccgtccattgatacaaaccaaagatggagaaaattacgctacagtggttgggtacagtgctttcttacattgcgagttctttgcttcacctgaggcagtcgtgtcctggcagaaggtggaagaagtgaaacccctggagggcaggcggtatcatatctatgaaaatggcacattgcagatcaacagaaccaccgaagaagatgctgggtcttactcatgttgggtagaaaatgctataggaaaaactgcagtcacagccaatttggatattagaaatgctacaaaacttagagtttctcctaagaatcctcgtatccccaaattgcatatgcttgaattacattgtgaaagcaaatgtgactcacatttgaaacacagtttgaagttgtcctggagtaaagatggagaagcctttgaaattaatggcacagaagatggcaggataattattgatggagctaatttgaccatatctaatgtaactttagaggaccaaggtatttactgctgttcagctcatactgctctagacagtgctgccgatataactcaagtaactgttcttgatgttccggatccaccagaaaaccttcacttgtctgaaagacagaacaggagtgttcggctgacctgggaagctggagctgaccacaacagcaatattagcgagtatattgttgaatttgaaggaaacaaagaagagcctggaaggtgggaggaactgaccagagtccaaggaaagaaaaccacagttatcttacctttggctccatttgtgagataccagttcagggtcatagccgtgaacgaagtagggagaagtcagcctagccagccgtcagaccatcatgaaacaccaccagcagctccagataggaatccacaaaacataagggttcaagcctctcaacccaaggaaatgattataaagtgggagcctttgaaatccatggagcagaatggaccaggcctagagtacagagtgacctggaagccacagggagccccagtggagtgggaagaagaaacagtcacaaaccacacattgcgggtgatgacgcctgctgtctatgccccttatgatgtcaaggtccaggctatcaatcaactaggatctgggcctgaccctcagtcagtgactctctattctggagaagactatcctgatacagctccagtgatccatggggtggacgttataaacagtacattagttaaagttacctggtcaacagttccaaaggacagagtacatggacgtctgaaaggctatcagataaattggtggaaaacaaaaagtctgttggatggaagaacacatcccaaagaagtgaacattctaagattttcaggacaaagaaactctggaatggttccttccttagatgcctttagtgaatttcatttaacagtcttagcctataactctaaaggagctggtcctgaaagtgagccttatatatttcaaacaccagaaggagtacctgaacagccaacttttctaaaggtcatcaaagttgataaagacactgccactttatcttggggactacctaagaaattaaatggaaacttaactggctatcttttgcaatatcagataataaatgacacctacgagattggagaattaaatgatattaacattacaactccatcaaagcccagctggcacctctcaaacctgaatgcaactaccaagtacaaattctacttgagggcttgcacttcacagggctgtggaaaaccgatcacggaggaaagctccaccttaggagaagggagtaaaggtatcgggaagatatcaggagtaaatcttactcaaaagactcacccagtagaggtatttgagccgggagctgaacatatagttcgcctaatgactaagaattggggcgataacgatagcatttttcaagatgtaattgagacaagagggagagaatatgctggtttatatgatgacatctccactcaaggctggtttattggactgatgtgtgcgattgctcttctcacactactattattaactgtttgctttgtgaagaggaatagaggtggaaagtactcagttaaagaaaaggaagatttgcatccagacccagaaattcagtcagtaaaagatgaaacctttggtgaatacagtgacagtgatgaaaagcctctcaaaggaagccttcggtcccttaatagggatatgcagcctactgaaagtgctgacagcttagtcgaatacggagagggagaccatggtctcttcagtgaagatggatcatttattggtgcctacgctggatctaaggagaagggatctgttgaaagcaatggaagttctacagcaacttttccccttcgggcataaacacaacatatgtaagcaacgctactggttcaccccaaccttccatatttatctgttcaaaggagcaagaactttcatataggaatagaaacatgctggccgaagatttcatccagaagtcaacatcctgcaattatgttgaaaagagtagtactttcttcaaaatataaaatgccaagcacttcaggcctatgttttgcttatattgttttcaggtgctcaaaatgcaaaacacaaaacaaatcctgcatttagatacacctcaactaaatccaaagtccccattcagtatattccatatttgcctgattttactattcggtgtgtttgcatagatgttgctacttggtgggtttttctccgtatgcacattggtatacagtctctgagaactggcttggtgactttgcttcactacaggttaaaagaccataagcaaactggttatttaaaatgtaaaaaggaatatgaaagtcttattaaaacacttcattgaaaatatacagtctaaatttattatttaaattttactagcaaaagtcttaggtgaacaatcaactagtatttgttgagctcctatttgcccagagatggtcatatttaaacagaagtatacgtttttcagtttcaacatgaatttttttatttctgtcagttatgacatccacgagcatcactttttgtgtctgttttttttttttttcttggactaaattcaactgcatggaagcggtggtcagaaggttgttttatacgagaacaggcagaaagtgcccattgttcaggattctaatagctacatctacttaatatcttcatttctaaattgactgcttttacctttttctcatgtttatataatggtatgcttgcatatatttcatgaatacattgtacatattatgttaatatttacacaatttaaaatatagatgtgttttattttgaagtgagaaaatgaacattaacaggcatgtttgtacagctagaatatattagtaagatactgtttttcgtcattccagagctacaactaataacacgaggttccaaagctgaagactttgtataaagtatttgggttttgttcttgtattgctttctttcaacagtttcaaaataaaatatcatacaaatattgagggaaatgttttcatatttttcaaaataggtttttattgttgaatgtacatctaccccagcccctcaaaagaaaaactgtttacatagaaattcctacacatacgtttgcgtatatgttattttaaacatctttgtggtgagaattttttccccgatattctccttctgtcaaagtcagaacaaattcagggaatttattttctggcagttgtgctccagtccttttaaaattgtacatgaacatgttttagaaacaatatggaggatgatgcatacatgtcggtcaagttcagcgctcgacattttatggaaagatttttttaaccttaccacgaaatacttaactactgtttaagtgaattgacttatttcactttagtttttgaactgtgattattggtatactgttatatcctcaacttggatttatggtaaccccttttagttcatggagaccaaaatttggggtatttataatagtcagcgcaggaatgcacatggaatatctacttgtccttttgaacctcacgagtcatccagaatgtatagacaggaaaagcatgtcttatttaaaactgtaatttatgggctcaggatctgaccgcagtcccgggagtaagcatttcaaagggggaaggcagtgtggtccctaccctgtgtgaatgtgaggatgtagacatccatcagtgcaactcgagctccatcctcctccgatttctaaggttccagttttctggagggacagtcatcatgttttgatttatctgggagaaaactgtggtgcacagcttgtgaggagggcaaggttgtgacgttcgagcttagttctggtgttattctgtctcctcttctttgtcatcagccaaaacgtggtttttaaagagagtcatgcaggttagaaataatgtcaaaaatatttaggaatttaataacctttaagtcagaaactaaaacaaatactgaaatattagctcttcctacacttcgtgttcccctttagctgcctgaaaatcaagattgctcctactcagatcttctgagtggctaaaacttatggatatgaaaaatgagattgaatgatgactatgctttgctatcattgttacctttcctcaatactatttggcaactactgggactcttcagcacaaaaggaatagatctatgattgaccctgattttaattgtgaaattatatgattcatatattttatgaatcagaataaccttcaaataaaataaatctaagtcggttaaaatggatttcatgattttccctcagaaaatgagtaacggagtcccacggcgtgcaatggtaattataaattggtgatgcttgtttgcaaattgcccactcgtgataagtcaacagccaatatttaaaactttgttcgttactggctttaccctaactttctctagtctactgtcaatatcattttaatgtaattgattgtatatagtctcaagaatggttggtgggcatgagttcctagagaactgtccaagggttgggaaaatccaaattctcttcctggctccagcactgattttgtacataaacattaggcaggttgcttaacctttttatttcaaactctctcaactctaaagtgctaataataatctcagttaccttatctttgtcacagggtgttcttttttatgaagaaaaatttgaaaatgataaaagctaagatgccttctaacttcataagcaaacctttaactaattatgtatctgaaagtcacccccacataccaactcaacttttttcctgtgaacacataaatatatttttatagaaaaacaaatctacataaaataaatctactgtttagtgagcagtatgacttgtacatgccattgaaaattattaatcagaagaaaattaagcagggtctttgctatacaaaagtgttttccactaattttgcatgcgtatttataagaaaaatgtgaatttggtggttttattctatcggtataaaggcatcgatattttagatgcacccgtgtttgtaaaaatgtagagcacaatggaattatgctggaagtctcaaataatatttttttcctattttatactcatggaagagataagctaaagaggggacaataatgagaaatgttggtgtgcttttctaagcatttaaaacataattgccaattgaaaccctaaatatgtttacataccattaagatatgattcatgtaacaatgttaaattaattataatgggattgggtttgttatctgtggtagtatatatcctagtgttcctatagtgaaataagtagggttcagccaaagctttctttgttttgtaccttaaattgttcgattacgtcatcaaaagagatgaaaggtatgtagaacaggttcacgtgattacctttttcttttggcttggattaatattcatagtagaactttataaaacgtgtttgtattgtaggtggtgtttgtattatgcttatgactatgtatggtttgaaaatattttcattatacatgaaattcaactttccaaataaaagttctacttcatgtaaaaaaaaaaaa

SEQ ID NO: 292928 - DNA, 662 bp, Homo sapiens
caggaagggagcagaggcgagagccagcctccggcaggagggcgtagaccccggtgccagccagaacggctccagccttcccgcggccagagagccagcggcgggaggggacgggcgggacctccgcggacagccccgggtgcggaccagcgggcagcggccggcgagaccctccctggatccgcccagagcttaccggaccctgcgcgcccccgtcccggctcccggccggctcgggggagaaggcgcccgaggggaggcgccggacagatcgcgtttcggaggcggcgcaggtgctgtaaactgcaaaccataatcctgtcttaatactgcaaacaaatcatagtggaactaaggggaacttaatttactgaatctcttgtttggaaatttcctcccagaatacccaacctctcaagaattttaaaacgatggagtaaaataatcttcaagctctgattagattacaacatatgaatgctaattttgtttttacaggtttcaacacccaaatttatctgaacttagggcacaataagcagtttaactgttagaaatcttatgagattgagtttgtgcctatcagatgaatacatatttgtatataacatttcaattattgctacatttatgtataatttatccaaaagcgatgttatcca

SEQ ID NO: 292929 - DNA, 472 bp, Homo sapiens
tcatgagaaactcttttggttccatttggagtgaatttcacaaaagtgctttctccagaagaaacattatgaaaatttttgaaaaggatcctaacaatcacatttgcaggttattgaaaactaatcaatcttctatgattaacagatcctgatacagctccagtgatccatggggtggacgttataaacagtacattagttaaagttacctggtcaacagttccaaaggacagagtacatggacgtctgaaaggctatcaggtttttatcatcatggtttttcctcttcttgttgaattggtatctttcctgagaataaagaagaattgatttcagaagaagtcaaagagaatctgcgaccacaatggatatactaaaagattttggttttcattgcagataaatgggtggaatagcgaggtgccgatgaatagcgaggtgccgatgaatagcgaggtgccgatgaatagcg

SEQ ID NO: 292930 - DNA, 6689 bp, Homo sapiens
caggaagggagcagaggcgagagccagcctccggcaggagggcgtagaccccggtgccagccagaacggctccagccttcccgcggccagagagccagcggcgggaggggacgggcgggacctccgcggacagccccgggtgcggaccagcgggcagcggccggcgagaccctccctggatccgcccagagcttaccggaccctgcgcgcccccgtcccggctcccggccggctcgggggagaaggcgcccgaggggaggcgccggacagatcgcgtttcggaggcggcgcaggtgctgtaaactgcaaaccataatcctgtcttaatactgcaaacaaatcatagtggaactaaggggaacttaatttactgtttccaggttaactaaggtctcagctgtaaaccaaaagtgagaggagacattaagattttcattcttaccgggttgtcttcttcctgaagagcaatggagccgcttttacttggaagaggactaatcgtatatctaatgttcctcctgttaaaattctcaaaagcaattgaaataccatcttcagttcaacaggttccaacaatcataaaacagtcaaaagtccaagttgcctttcccttcgatgagtattttcaaattgaatgtgaagctaaaggaaatccagaaccaacattttcgtggactaaggatggcaaccctttttatttcactgaccatcggataattccatcgaacaattcaggaacattcaggatcccaaacgaggggcacatatctcactttcaagggaaataccgctgctttgcttcaaataaactgggaatcgctatgtcagaagaaatagaatttatagttccaagtgttccaaaattcccaaaagaaaaaattgaccctcttgaagtggaggagggagatccaattgtcctcccatgcaatcctcccaaaggcctcccacctttacacatttattggatgaatattgaattagaacacatcgaacaagatgaaagagtatacatgagccaaaagggagatctatacttcgcaaacgtggaagaaaaggacagtcgcaatgactactgttgctttgctgcatttccaagattaaggactattgtacagaaaatgccaatgaaactaacagttaacagtttaaagcatgctaatgactcaagttcatccacagaaattggttccaaggcaaattccatcaagcaaagaaaacccaaactgctgttgcctcccactgagagtggcagtgagtcttcaattaccatcctcaaaggggaaatcttgctgcttgagtgttttgctgaaggcttgccaactccacaggttgattggaacaaaattggtggtgacttaccaaaggggagagaagcaaaagaaaattatggcaagactttgaagatagagaatgtctcctaccaggacaaaggaaattatcgctgcacagccagcaatttcttgggaacagccactcacgattttcacgttatagtagaagagcctcctcgctggacaaagaagcctcagagtgctgtgtatagcaccggaagcaatggcatcttgttatgtgaggctgaaggagaacctcaacccacaatcaagtggagagtcaatggctccccagttgacaatcatccatttgctggtgatgttgtcttccccagggaaatcagttttaccaaccttcaaccaaatcatactgctgtgtaccagtgtgaagcctcaaatgtccatggaactatccttgccaatgccaatattgatgttgtggatgtccgtccattgatacaaaccaaagatggagaaaattacgctacagtggttgggtacagtgctttcttacattgcgagttctttgcttcacctgaggcagtcgtgtcctggcagaaggtggaagaagtgaaacccctggagggcaggcggtatcatatctatgaaaatggcacattgcagatcaacagaaccaccgaagaagatgctgggtcttactcatgttgggtagaaaatgctataggaaaaactgcagtcacagccaatttggatattagaaatgctacaaaacttagagtttctcctaagaatcctcgtatccccaaattgcatatgcttgaattacattgtgaaagcaaatgtgactcacatttgaaacacagtttgaagttgtcctggagtaaagatggagaagcctttgaaattaatggcacagaagatggcaggataattattgatggagctaatttgaccatatctaatgtaactttagaggaccaaggtatttactgctgttcagctcatactgctctagacagtgctgccgatataactcaagtaactgttcttgatgttccggatccaccagaaaaccttcacttgtctgaaagacagaacaggagtgttcggctgacctgggaagctggagctgaccacaacagcaatattagcgagtatattgttgaatttgaaggaaacaaagaagagcctggaaggtgggaggaactgaccagagtccaaggaaagaaaaccacagttatcttacctttggctccatttgtgagataccagttcagggtcatagccgtgaacgaagtagggagaagtcagcctagccagccgtcagaccatcatgaaacaccaccagcagctccagataggaatccacaaaacataagggttcaagcctctcaacccaaggaaatgattataaagtgggagcctttgaaatccatggagcagaatggaccaggcctagagtacagagtgacctggaagccacagggagccccagtggagtgggaagaagaaacagtcacaaaccacacattgcgggtgatgacgcctgctgtctatgccccttatgatgtcaaggtccaggctatcaatcaactaggatctgggcctgaccctcagtcagtgactctctattctggagaagactatcctgatacagctccagtgatccatggggtggacgttataaacaacaacatatgtaagcaacgctactggttcaccccaaccttccatatttatctgttcaaaggagcaagaactttcatataggaatagaaacatgctggccgaagatttcatccagaagtcaacatcctgcaattatgttgaaaagagtagtactttcttcaaaatataaaatgccaagcacttcaggcctatgttttgcttatattgttttcaggtgctcaaaatgcaaaacacaaaacaaatcctgcatttagatacacctcaactaaatccaaagtccccattcagtatattccatatttgcctgattttactattcggtgtgtttgcatagatgttgctacttggtgggtttttctccgtatgcacattggtatacagtctctgagaactggcttggtgactttgcttcactacaggttaaaagaccataagcaaactggttatttaaaatgtaaaaaggaatatgaaagtcttattaaaacacttcattgaaaatatacagtctaaatttattatttaaattttactagcaaaagtcttaggtgaacaatcaactagtatttgttgagctcctatttgcccagagatggtcatatttaaacagaagtatacgtttttcagtttcaacatgaatttttttatttctgtcagttatgacatccacgagcatcactttttgtgtctgttttttttttttttcttggactaaattcaactgcatggaagcggtggtcagaaggttgttttatacgagaacaggcagaaagtgcccattgttcaggattctaatagctacatctacttaatatcttcatttctaaattgactgcttttacctttttctcatgtttatataatggtatgcttgcatatatttcatgaatacattgtacatattatgttaatatttacacaatttaaaatatagatgtgttttattttgaagtgagaaaatgaacattaacaggcatgtttgtacagctagaatatattagtaagatactgtttttcgtcattccagagctacaactaataacacgaggttccaaagctgaagactttgtataaagtatttgggttttgttcttgtattgctttctttcaacagtttcaaaataaaatatcatacaaatattgagggaaatgttttcatatttttcaaaataggtttttattgttgaatgtacatctaccccagcccctcaaaagaaaaactgtttacatagaaattcctacacatacgtttgcgtatatgttattttaaacatctttgtggtgagaattttttccccgatattctccttctgtcaaagtcagaacaaattcagggaatttattttctggcagttgtgctccagtccttttaaaattgtacatgaacatgttttagaaacaatatggaggatgatgcatacatgtcggtcaagttcagcgctcgacattttatggaaagatttttttaaccttaccacgaaatacttaactactgtttaagtgaattgacttatttcactttagtttttgaactgtgattattggtatactgttatatcctcaacttggatttatggtaaccccttttagttcatggagaccaaaatttggggtatttataatagtcagcgcaggaatgcacatggaatatctacttgtccttttgaacctcacgagtcatccagaatgtatagacaggaaaagcatgtcttatttaaaactgtaatttatgggctcaggatctgaccgcagtcccgggagtaagcatttcaaagggggaaggcagtgtggtccctaccctgtgtgaatgtgaggatgtagacatccatcagtgcaactcgagctccatcctcctccgatttctaaggttccagttttctggagggacagtcatcatgttttgatttatctgggagaaaactgtggtgcacagcttgtgaggagggcaaggttgtgacgttcgagcttagttctggtgttattctgtctcctcttctttgtcatcagccaaaacgtggtttttaaagagagtcatgcaggttagaaataatgtcaaaaatatttaggaatttaataacctttaagtcagaaactaaaacaaatactgaaatattagctcttcctacacttcgtgttcccctttagctgcctgaaaatcaagattgctcctactcagatcttctgagtggctaaaacttatggatatgaaaaatgagattgaatgatgactatgctttgctatcattgttacctttcctcaatactatttggcaactactgggactcttcagcacaaaaggaatagatctatgattgaccctgattttaattgtgaaattatatgattcatatattttatgaatcagaataaccttcaaataaaataaatctaagtcggttaaaatggatttcatgattttccctcagaaaatgagtaacggagtcccacggcgtgcaatggtaattataaattggtgatgcttgtttgcaaattgcccactcgtgataagtcaacagccaatatttaaaactttgttcgttactggctttaccctaactttctctagtctactgtcaatatcattttaatgtaattgattgtatatagtctcaagaatggttggtgggcatgagttcctagagaactgtccaagggttgggaaaatccaaattctcttcctggctccagcactgattttgtacataaacattaggcaggttgcttaacctttttatttcaaactctctcaactctaaagtgctaataataatctcagttaccttatctttgtcacagggtgttcttttttatgaagaaaaatttgaaaatgataaaagctaagatgccttctaacttcataagcaaacctttaactaattatgtatctgaaagtcacccccacataccaactcaacttttttcctgtgaacacataaatatatttttatagaaaaacaaatctacataaaataaatctactgtttagtgagcagtatgacttgtacatgccattgaaaattattaatcagaagaaaattaagcagggtctttgctatacaaaagtgttttccactaattttgcatgcgtatttataagaaaaatgtgaatttggtggttttattctatcggtataaaggcatcgatattttagatgcacccgtgtttgtaaaaatgtagagcacaatggaattatgctggaagtctcaaataatatttttttcctattttatactcatggaagagataagctaaagaggggacaataatgagaaatgttggtgtgcttttctaagcatttaaaacataattgccaattgaaaccctaaatatgtttacataccattaagatatgattcatgtaacaatgttaaattaattataatgggattgggtttgttatctgtggtagtatatatcctagtgttcctatagtgaaataagtagggttcagccaaagctttctttgttttgtaccttaaattgttcgattacgtcatcaaaagagatgaaaggtatgtagaacaggttcacgtgattacctttttcttttggcttggattaatattcatagtagaactttataaaacgtgtttgtattgtaggtggtgtttgtattatgcttatgactatgtatggtttgaaaatattttcattatacatgaaattcaactttccaaataaaagttctacttcatgtaaaaaaaaaaaa

SEQ ID NO: 292931 - DNA, 5699 bp, Homo sapiens
gctcaaatggcttaggaagcaggcagctgcagctgtggggctggccgcccctccaccaggagctcggataattattgatggagctaatttgaccatatctaatgtaactttagaggaccaaggtatttactgctgttcagctcatactgctctagacagtgctgccgatataactcaagtaactgttcttgatgttccggatccaccagaaaaccttcacttgtctgaaagacagaacaggagtgttcggctgacctgggaagctggagctgaccacaacagcaatattagcgagtatattgttgaatttgaaggaaacaaagaagagcctggaaggtgggaggaactgaccagagtccaaggaaagaaaaccacagttatcttacctttggctccatttgtgagataccagttcagggtcatagccgtgaacgaagtagggagaagtcagcctagccagccgtcagaccatcatgaaacaccaccagcagctccagataggaatccacaaaacataagggttcaagcctctcaacccaaggaaatgattataaagtgggagcctttgaaatccatggagcagaatggaccaggcctagagtacagagtgacctggaagccacagggagccccagtggagtgggaagaagaaacagtcacaaaccacacattgcgggtgatgacgcctgctgtctatgccccttatgatgtcaaggtccaggctatcaatcaactaggatctgggcctgaccctcagtcagtgactctctattctggagaagactatcctgatacagctccagtgatccatggggtggacgttataaacagtacattagttaaagttacctggtcaacagttccaaaggacagagtacatggacgtctgaaaggctatcagataaattggtggaaaacaaaaagtctgttggatggaagaacacatcccaaagaagtgaacattctaagattttcaggacaaagaaactctggaatggttccttccttagatgcctttagtgaatttcatttaacagtcttagcctataactctaaaggagctggtcctgaaagtgagccttatatatttcaaacaccagaaggagtacctgaacagccaacttttctaaaggtcatcaaagttgataaagacactgccactttatcttggggactacctaagaaattaaatggaaacttaactggctatcttttgcaatatcagataataaatgacacctacgagattggagaattaaatgatattaacattacaactccatcaaagcccagctggcacctctcaaacctgaatgcaactaccaagtacaaattctacttgagggcttgcacttcacagggctgtggaaaaccgatcacggaggaaagctccaccttaggagaagggagtaaaggtatcgggaagatatcaggagtaaatcttactcaaaagactcacccagtagaggtatttgagccgggagctgaacatatagttcgcctaatgactaagaattggggcgataacgatagcatttttcaagatgtaattgagacaagagggagagaatatgctggtttatatgatgacatctccactcaaggctggtttattggactgatgtgtgcgattgctcttctcacactactattattaactgtttgctttgtgaagaggaatagaggtggaaagtactcagttaaagaaaaggaagatttgcatccagacccagaaattcagtcagtaaaagatgaaacctttggtgaatacagtgacagtgatgaaaagcctctcaaaggaagccttcggtcccttaatagggatatgcagcctactgaaagtgctgacagcttagtcgaatacggagagggagaccatggtctcttcagtgaagatggatcatttattggtgcctacgctggatctaaggagaagggatctgttgaaagcaatggaagttctacagcaacttttccccttcgggcataaacacaacatatgtaagcaacgctactggttcaccccaaccttccatatttatctgttcaaaggagcaagaactttcatataggaatagaaacatgctggccgaagatttcatccagaagtcaacatcctgcaattatgttgaaaagagtagtactttcttcaaaatataaaatgccaagcacttcaggcctatgttttgcttatattgttttcaggtgctcaaaatgcaaaacacaaaacaaatcctgcatttagatacacctcaactaaatccaaagtccccattcagtatattccatatttgcctgattttactattcggtgtgtttgcatagatgttgctacttggtgggtttttctccgtatgcacattggtatacagtctctgagaactggcttggtgactttgcttcactacaggttaaaagaccataagcaaactggttatttaaaatgtaaaaaggaatatgaaagtcttattaaaacacttcattgaaaatatacagtctaaatttattatttaaattttactagcaaaagtcttaggtgaacaatcaactagtatttgttgagctcctatttgcccagagatggtcatatttaaacagaagtatacgtttttcagtttcaacatgaatttttttatttctgtcagttatgacatccacgagcatcactttttgtgtctgttttttttttttttcttggactaaattcaactgcatggaagcggtggtcagaaggttgttttatacgagaacaggcagaaagtgcccattgttcaggattctaatagctacatctacttaatatcttcatttctaaattgactgcttttacctttttctcatgtttatataatggtatgcttgcatatatttcatgaatacattgtacatattatgttaatatttacacaatttaaaatatagatgtgttttattttgaagtgagaaaatgaacattaacaggcatgtttgtacagctagaatatattagtaagatactgtttttcgtcattccagagctacaactaataacacgaggttccaaagctgaagactttgtataaagtatttgggttttgttcttgtattgctttctttcaacagtttcaaaataaaatatcatacaaatattgagggaaatgttttcatatttttcaaaataggtttttattgttgaatgtacatctaccccagcccctcaaaagaaaaactgtttacatagaaattcctacacatacgtttgcgtatatgttattttaaacatctttgtggtgagaattttttccccgatattctccttctgtcaaagtcagaacaaattcagggaatttattttctggcagttgtgctccagtccttttaaaattgtacatgaacatgttttagaaacaatatggaggatgatgcatacatgtcggtcaagttcagcgctcgacattttatggaaagatttttttaaccttaccacgaaatacttaactactgtttaagtgaattgacttatttcactttagtttttgaactgtgattattggtatactgttatatcctcaacttggatttatggtaaccccttttagttcatggagaccaaaatttggggtatttataatagtcagcgcaggaatgcacatggaatatctacttgtccttttgaacctcacgagtcatccagaatgtatagacaggaaaagcatgtcttatttaaaactgtaatttatgggctcaggatctgaccgcagtcccgggagtaagcatttcaaagggggaaggcagtgtggtccctaccctgtgtgaatgtgaggatgtagacatccatcagtgcaactcgagctccatcctcctccgatttctaaggttccagttttctggagggacagtcatcatgttttgatttatctgggagaaaactgtggtgcacagcttgtgaggagggcaaggttgtgacgttcgagcttagttctggtgttattctgtctcctcttctttgtcatcagccaaaacgtggtttttaaagagagtcatgcaggttagaaataatgtcaaaaatatttaggaatttaataacctttaagtcagaaactaaaacaaatactgaaatattagctcttcctacacttcgtgttcccctttagctgcctgaaaatcaagattgctcctactcagatcttctgagtggctaaaacttatggatatgaaaaatgagattgaatgatgactatgctttgctatcattgttacctttcctcaatactatttggcaactactgggactcttcagcacaaaaggaatagatctatgattgaccctgattttaattgtgaaattatatgattcatatattttatgaatcagaataaccttcaaataaaataaatctaagtcggttaaaatggatttcatgattttccctcagaaaatgagtaacggagtcccacggcgtgcaatggtaattataaattggtgatgcttgtttgcaaattgcccactcgtgataagtcaacagccaatatttaaaactttgttcgttactggctttaccctaactttctctagtctactgtcaatatcattttaatgtaattgattgtatatagtctcaagaatggttggtgggcatgagttcctagagaactgtccaagggttgggaaaatccaaattctcttcctggctccagcactgattttgtacataaacattaggcaggttgcttaacctttttatttcaaactctctcaactctaaagtgctaataataatctcagttaccttatctttgtcacagggtgttcttttttatgaagaaaaatttgaaaatgataaaagctaagatgccttctaacttcataagcaaacctttaactaattatgtatctgaaagtcacccccacataccaactcaacttttttcctgtgaacacataaatatatttttatagaaaaacaaatctacataaaataaatctactgtttagtgagcagtatgacttgtacatgccattgaaaattattaatcagaagaaaattaagcagggtctttgctatacaaaagtgttttccactaattttgcatgcgtatttataagaaaaatgtgaatttggtggttttattctatcggtataaaggcatcgatattttagatgcacccgtgtttgtaaaaatgtagagcacaatggaattatgctggaagtctcaaataatatttttttcctattttatactcatggaagagataagctaaagaggggacaataatgagaaatgttggtgtgcttttctaagcatttaaaacataattgccaattgaaaccctaaatatgtttacataccattaagatatgattcatgtaacaatgttaaattaattataatgggattgggtttgttatctgtggtagtatatatcctagtgttcctatagtgaaataagtagggttcagccaaagctttctttgttttgtaccttaaattgttcgattacgtcatcaaaagagatgaaaggtatgtagaacaggttcacgtgattacctttttcttttggcttggattaatattcatagtagaactttataaaacgtgtttgtattgtaggtggtgtttgtattatgcttatgactatgtatggtttgaaaatattttcattatacatgaaattcaactttccaaataaaagttctacttcatgtaaaaaaaaaaaa

SEQ ID NO: 292932 - DNA, 4140 bp, Homo sapiens
cgctgtggtcgtctctacacggatcccccgacggtctttatcaaggctggtttattggactgatgtgtgcgattgctcttctcacactactattattaactgtttgctttgtgaagaggaatagaggtggaaagtactcagttaaagaaaaggaagatttgcatccagacccagaaattcagtcagtaaaagatgaaacctttggtgaatacagtgacagtgatgaaaagcctctcaaaggaagccttcggtcccttaatagggatatgcagcctactgaaagtgctgacagcttagtcgaatacggagagggagaccatggtctcttcagtgaagatggatcatttattggtgcctacgctggatctaaggagaagggatctgttgaaagcaatggaagttctacagcaacttttccccttcgggcataaacacaacatatgtaagcaacgctactggttcaccccaaccttccatatttatctgttcaaaggagcaagaactttcatataggaatagaaacatgctggccgaagatttcatccagaagtcaacatcctgcaattatgttgaaaagagtagtactttcttcaaaatataaaatgccaagcacttcaggcctatgttttgcttatattgttttcaggtgctcaaaatgcaaaacacaaaacaaatcctgcatttagatacacctcaactaaatccaaagtccccattcagtatattccatatttgcctgattttactattcggtgtgtttgcatagatgttgctacttggtgggtttttctccgtatgcacattggtatacagtctctgagaactggcttggtgactttgcttcactacaggttaaaagaccataagcaaactggttatttaaaatgtaaaaaggaatatgaaagtcttattaaaacacttcattgaaaatatacagtctaaatttattatttaaattttactagcaaaagtcttaggtgaacaatcaactagtatttgttgagctcctatttgcccagagatggtcatatttaaacagaagtatacgtttttcagtttcaacatgaatttttttatttctgtcagttatgacatccacgagcatcactttttgtgtctgttttttttttttttcttggactaaattcaactgcatggaagcggtggtcagaaggttgttttatacgagaacaggcagaaagtgcccattgttcaggattctaatagctacatctacttaatatcttcatttctaaattgactgcttttacctttttctcatgtttatataatggtatgcttgcatatatttcatgaatacattgtacatattatgttaatatttacacaatttaaaatatagatgtgttttattttgaagtgagaaaatgaacattaacaggcatgtttgtacagctagaatatattagtaagatactgtttttcgtcattccagagctacaactaataacacgaggttccaaagctgaagactttgtataaagtatttgggttttgttcttgtattgctttctttcaacagtttcaaaataaaatatcatacaaatattgagggaaatgttttcatatttttcaaaataggtttttattgttgaatgtacatctaccccagcccctcaaaagaaaaactgtttacatagaaattcctacacatacgtttgcgtatatgttattttaaacatctttgtggtgagaattttttccccgatattctccttctgtcaaagtcagaacaaattcagggaatttattttctggcagttgtgctccagtccttttaaaattgtacatgaacatgttttagaaacaatatggaggatgatgcatacatgtcggtcaagttcagcgctcgacattttatggaaagatttttttaaccttaccacgaaatacttaactactgtttaagtgaattgacttatttcactttagtttttgaactgtgattattggtatactgttatatcctcaacttggatttatggtaaccccttttagttcatggagaccaaaatttggggtatttataatagtcagcgcaggaatgcacatggaatatctacttgtccttttgaacctcacgagtcatccagaatgtatagacaggaaaagcatgtcttatttaaaactgtaatttatgggctcaggatctgaccgcagtcccgggagtaagcatttcaaagggggaaggcagtgtggtccctaccctgtgtgaatgtgaggatgtagacatccatcagtgcaactcgagctccatcctcctccgatttctaaggttccagttttctggagggacagtcatcatgttttgatttatctgggagaaaactgtggtgcacagcttgtgaggagggcaaggttgtgacgttcgagcttagttctggtgttattctgtctcctcttctttgtcatcagccaaaacgtggtttttaaagagagtcatgcaggttagaaataatgtcaaaaatatttaggaatttaataacctttaagtcagaaactaaaacaaatactgaaatattagctcttcctacacttcgtgttcccctttagctgcctgaaaatcaagattgctcctactcagatcttctgagtggctaaaacttatggatatgaaaaatgagattgaatgatgactatgctttgctatcattgttacctttcctcaatactatttggcaactactgggactcttcagcacaaaaggaatagatctatgattgaccctgattttaattgtgaaattatatgattcatatattttatgaatcagaataaccttcaaataaaataaatctaagtcggttaaaatggatttcatgattttccctcagaaaatgagtaacggagtcccacggcgtgcaatggtaattataaattggtgatgcttgtttgcaaattgcccactcgtgataagtcaacagccaatatttaaaactttgttcgttactggctttaccctaactttctctagtctactgtcaatatcattttaatgtaattgattgtatatagtctcaagaatggttggtgggcatgagttcctagagaactgtccaagggttgggaaaatccaaattctcttcctggctccagcactgattttgtacataaacattaggcaggttgcttaacctttttatttcaaactctctcaactctaaagtgctaataataatctcagttaccttatctttgtcacagggtgttcttttttatgaagaaaaatttgaaaatgataaaagctaagatgccttctaacttcataagcaaacctttaactaattatgtatctgaaagtcacccccacataccaactcaacttttttcctgtgaacacataaatatatttttatagaaaaacaaatctacataaaataaatctactgtttagtgagcagtatgacttgtacatgccattgaaaattattaatcagaagaaaattaagcagggtctttgctatacaaaagtgttttccactaattttgcatgcgtatttataagaaaaatgtgaatttggtggttttattctatcggtataaaggcatcgatattttagatgcacccgtgtttgtaaaaatgtagagcacaatggaattatgctggaagtctcaaataatatttttttcctattttatactcatggaagagataagctaaagaggggacaataatgagaaatgttggtgtgcttttctaagcatttaaaacataattgccaattgaaaccctaaatatgtttacataccattaagatatgattcatgtaacaatgttaaattaattataatgggattgggtttgttatctgtggtagtatatatcctagtgttcctatagtgaaataagtagggttcagccaaagctttctttgttttgtaccttaaattgttcgattacgtcatcaaaagagatgaaaggtatgtagaacaggttcacgtgattacctttttcttttggcttggattaatattcatagtagaactttataaaacgtgtttgtattgtaggtggtgtttgtattatgcttatgactatgtatggtttgaaaatattttcattatacatgaaattcaactttccaaataaaagttctacttcatgtaaaaaaaaaaaa

SEQ ID NO: 292933 - DNA, 3805 bp, Homo sapiens
caggaagggagcagaggcgagagccagcctccggcaggagggcgtagaccccggtgccagccagaacggctccagccttcccgcggccagagagccagcggcgggaggggacgggcgggacctccgcggacagccccgggtgcggaccagcgggcagcggccggcgagaccctccctggatccgcccagagcttaccggaccctgcgcgcccccgtcccggctcccggccggctcgggggagaaggcgcccgaggggaggcgccggacagatcgcgtttcggaggcggcgcaggtgctgtaaactgcaaaccataatcctgtcttaatactgcaaacaaatcatagtggaactaaggggaacttaatttactgtttccaggttaactaaggtctcagctgtaaaccaaaagtgagaggagacattaagattttcattcttaccgggttgtcttcttcctgaagagcaatggagccgcttttacttggaagaggactaatcgtatatctaatgttcctcctgttaaaattctcaaaagcaattgaaataccatcttcagttcaacaggttccaacaatcataaaacagtcaaaagtccaagttgcctttcccttcgatgagtattttcaaattgaatgtgaagctaaaggaaatccagaaccaacattttcgtggactaaggatggcaaccctttttatttcactgaccatcggataattccatcgaacaattcaggaacattcaggatcccaaacgaggggcacatatctcactttcaagggaaataccgctgctttgcttcaaataaactgggaatcgctatgtcagaagaaatagaatttatagttccaagtgttccaaaattcccaaaagaaaaaattgaccctcttgaagtggaggagggagatccaattgtcctcccatgcaatcctcccaaaggcctcccacctttacacatttattggatgaatattgaattagaacacatcgaacaagatgaaagagtatacatgagccaaaagggagatctatacttcgcaaacgtggaagaaaaggacagtcgcaatgactactgttgctttgctgcatttccaagattaaggactattgtacagaaaatgccaatgaaactaacagttaacagtttaaagcatgctaatgactcaagttcatccacagaaattggttccaaggcaaattccatcaagcaaagaaaacccaaactgctgttgcctcccactgagagtggcagtgagtcttcaattaccatcctcaaaggggaaatcttgctgcttgagtgttttgctgaaggcttgccaactccacaggttgattggaacaaaattggtggtgacttaccaaaggggagagaagcaaaagaaaattatggcaagactttgaagatagagaatgtctcctaccaggacaaaggaaattatcgctgcacagccagcaatttcttgggaacagccactcacgattttcacgttatagtagaagagcctcctcgctggacaaagaagcctcagagtgctgtgtatagcaccggaagcaatggcatcttgttatgtgaggctgaaggagaacctcaacccacaatcaagtggagagtcaatggctccccagttgacaatcatccatttgctggtgatgttgtcttccccagggaaatcagttttaccaaccttcaaccaaatcatactgctgtgtaccagtgtgaagcctcaaatgtccatggaactatccttgccaatgccaatattgatgttgtggatgtccgtccattgatacaaaccaaagatggagaaaattacgctacagtggttgggtacagtgctttcttacattgcgagttctttgcttcacctgaggcagtcgtgtcctggcagaaggtggaagaagtgaaacccctggagggcaggcggtatcatatctatgaaaatggcacattgcagatcaacagaaccaccgaagaagatgctgggtcttactcatgttgggtagaaaatgctataggaaaaactgcagtcacagccaatttggatattagaaatgctacaaaacttagagtttctcctaagaatcctcgtatccccaaattgcatatgcttgaattacattgtgaaagcaaatgtgactcacatttgaaacacagtttgaagttgtcctggagtaaagatggagaagcctttgaaattaatggcacagaagatggcaggataattattgatggagctaatttgaccatatctaatgtaactttagaggaccaaggtatttactgctgttcagctcatactgctctagacagtgctgccgatataactcaagtaactgttcttgatgttccggatccaccagaaaaccttcacttgtctgaaagacagaacaggagtgttcggctgacctgggaagctggagctgaccacaacagcaatattagcgagtatattgttgaatttgaaggaaacaaagaagagcctggaaggtgggaggaactgaccagagtccaaggaaagaaaaccacagttatcttacctttggctccatttgtgagataccagttcagggtcatagccgtgaacgaagtagggagaagtcagcctagccagccgtcagaccatcatgaaacaccaccagcagctccagataggaatccacaaaacataagggttcaagcctctcaacccaaggaaatgattataaagtgggagcctttgaaatccatggagcagaatggaccaggcctagagtacagagtgacctggaagccacagggagccccagtggagtgggaagaagaaacagtcacaaaccacacattgcgggtgatgacgcctgctgtctatgccccttatgatgtcaaggtccaggctatcaatcaactaggatctgggcctgaccctcagtcagtgactctctattctggagaagactatcctgatacagctccagtgatccatggggtggacgttataaacagtacattagttaaagttacctggtcaacagttccaaaggacagagtacatggacgtctgaaaggctatcagataaattggtggaaaacaaaaagtctgttggatggaagaacacatcccaaagaagtgaacattctaagattttcaggacaaagaaactctggaatggttccttccttagatgcctttagtgaatttcatttaacagtcttagcctataactctaaaggagctggtcctgaaagtgagccttatatatttcaaacaccagaaggagtacctgaacagccaacttttctaaaggtcatcaaagttgataaagacactgccactttatcttggggactacctaagaaattaaatggaaacttaactggctatcttttgcaatatcagataataaatgacacctacgagattggagaattaaatgatattaacattacaactccatcaaagcccagctggcacctctcaaacctgaatgcaactaccaagtacaaattctacttgagggcttgcacttcacagggctgtggaaaaccgatcacggaggaaagctccaccttaggagaagggaaatatgctggtttatatgatgacatctccactcaaggctggtttattggactgatgtgtgcgattgctcttctcacactactattattaactgtttgctttgtgaagaggaatagaggtggaaagtactcagttaaagaaaaggaagatttgcatccagacccagaaattcagtcagtaaaagatgaaacctttggtgaatacagaataaagaacaataaagagaaagaaagaaagagagaaaa

SEQ ID NO: 292934 - DNA, 3577 bp, Homo sapiens
caggaagggagcagaggcgagagccagcctccggcaggagggcgtagaccccggtgccagccagaacggctccagccttcccgcggccagagagccagcggcgggaggggacgggcgggacctccgcggacagccccgggtgcggaccagcgggcagcggccggcgagaccctccctggatccgcccagagcttaccggaccctgcgcgcccccgtcccggctcccggccggctcgggggagaaggcgcccgaggggaggcgccggacagatcgcgtttcggaggcggcgcaggtgctgtaaactgcaaaccataatcctgtcttaatactgcaaacaaatcatagtggaactaaggggaacttaatttactgtttccaggttaactaaggtctcagctgtaaaccaaaagtgagaggagacattaagattttcattcttaccgggttgtcttcttcctgaagagcaatggagccgcttttacttggaagaggactaatcgtatatctaatgttcctcctgttaaaattctcaaaagcaattgaaataccatcttcagttcaacaggttccaacaatcataaaacagtcaaaagtccaagttgcctttcccttcgatgagtattttcaaattgaatgtgaagctaaaggaaatccagaaccaacattttcgtggactaaggatggcaaccctttttatttcactgaccatcggataattccatcgaacaattcaggaacattcaggatcccaaacgaggggcacatatctcactttcaagggaaataccgctgctttgcttcaaataaactgggaatcgctatgtcagaagaaatagaatttatagttccaagtgttccaaaattcccaaaagaaaaaattgaccctcttgaagtggaggagggagatccaattgtcctcccatgcaatcctcccaaaggcctcccacctttacacatttattggatgaatattgaattagaacacatcgaacaagatgaaagagtatacatgagccaaaagggagatctatacttcgcaaacgtggaagaaaaggacagtcgcaatgactactgttgctttgctgcatttccaagattaaggactattgtacagaaaatgccaatgaaactaacagttaacagtttaaagcatgctaatgactcaagttcatccacagaaattggttccaaggcaaattccatcaagcaaagaaaacccaaactgctgttgcctcccactgagagtggcagtgagtcttcaattaccatcctcaaaggggaaatcttgctgcttgagtgttttgctgaaggcttgccaactccacaggttgattggaacaaaattggtggtgacttaccaaaggggagagaagcaaaagaaaattatggcaagactttgaagatagagaatgtctcctaccaggacaaaggaaattatcgctgcacagccagcaatttcttgggaacagccactcacgattttcacgttatagtagaagagcctcctcgctggacaaagaagcctcagagtgctgtgtatagcaccggaagcaatggcatcttgttatgtgaggctgaaggagaacctcaacccacaatcaagtggagagtcaatggctccccagttgacaatcatccatttgctggtgatgttgtcttccccagggaaatcagttttaccaaccttcaaccaaatcatactgctgtgtaccagtgtgaagcctcaaatgtccatggaactatccttgccaatgccaatattgatgttgtggatgtccgtccattgatacaaaccaaagatggagaaaattacgctacagtggttgggtacagtgctttcttacattgcgagttctttgcttcacctgaggcagtcgtgtcctggcagaaggtggaagaagtgaaacccctggagggcaggcggtatcatatctatgaaaatggcacattgcagatcaacagaaccaccgaagaagatgctgggtcttactcatgttgggtagaaaatgctataggaaaaactgcagtcacagccaatttggatattagaaatgctacaaaacttagagtttctcctaagaatcctcgtatccccaaattgcatatgcttgaattacattgtgaaagcaaatgtgactcacatttgaaacacagtttgaagttgtcctggagtaaagatggagaagcctttgaaattaatggcacagaagatggcaggataattattgatggagctaatttgaccatatctaatgtaactttagaggaccaaggtatttactgctgttcagctcatactgctctagacagtgctgccgatataactcaagtaactgttcttgatgttccggatccaccagaaaaccttcacttgtctgaaagacagaacaggagtgttcggctgacctgggaagctggagctgaccacaacagcaatattagcgagtatattgttgaatttgaaggaaacaaagaagagcctggaaggtgggaggaactgaccagagtccaaggaaagaaaaccacagttatcttacctttggctccatttgtgagataccagttcagggtcatagccgtgaacgaagtagggagaagtcagcctagccagccgtcagaccatcatgaaacaccaccagcagctccagataggaatccacaaaacataagggttcaagcctctcaacccaaggaaatgattataaagtgggagcctttgaaatccatggagcagaatggaccaggcctagagtacagagtgacctggaagccacagggagccccagtggagtgggaagaagaaacagtcacaaaccacacattgcgggtgatgacgcctgctgtctatgccccttatgatgtcaaggtccaggctatcaatcaactaggatctgggcctgaccctcagtcagtgactctctattctggagaagactatcctgatacagctccagtgatccatggggtggacgttataaacagtacattagttaaagttacctggtcaacagttccaaaggacagagtacatggacgtctgaaaggctatcagataaattggtggaaaacaaaaagtctgttggatggaagaacacatcccaaagaagtgaacattctaagattttcaggacaaagaaactctggaatggttccttccttagatgcctttagtgaatttcatttaacagtcttagcctataactctaaaggagctggtcctgaaagtgagccttatatatttcaaacaccagaaggagtacctgaacagccaacttttctaaaggtcatcaaagttgataaagacactgccactttatcttggggactacctaagaaattaaatggaaacttaactggctatcttttgcaatatcagataataaatgacacctacgagattggagaattaaatgatattaacattacaactccatcaaagcccagctggcacctctcaaacctgaatgcaactaccaagtacaaattctacttgagggcttgcacttcacagggctgtggaaaaccgatcacggaggaaagctccaccttaggagaagggagtaagtacatgaggct

SEQ ID NO: 292935 - DNA, 2184 bp, Homo sapiens
caggaagggagcagaggcgagagccagcctccggcaggagggcgtagaccccggtgccagccagaacggctccagccttcccgcggccagagagccagcggcgggaggggacgggcgggacctccgcggacagccccgggtgcggaccagcgggcagcggccggcgagaccctccctggatccgcccagagcttaccggaccctgcgcgcccccgtcccggctcccggccggctcgggggagaaggcgcccgaggggaggcgccggacagatcgcgtttcggaggcggcgcaggtgctgtaaactgcaaaccataatcctgtcttaatactgcaaacaaatcatagtggaactaaggggaacttaatttactgtttccaggttaactaaggtctcagctgtaaaccaaaagtgagaggagacattaagattttcattcttaccgggttgtcttcttcctgaagagcaatggagccgcttttacttggaagaggactaatcgtatatctaatgttcctcctgttaaaattctcaaaagcaattgaaataccatcttcagttcaacaggttccaacaatcataaaacagtcaaaagtccaagttgcctttcccttcgatgagtattttcaaattgaatgtgaagctaaaggaaatccagaaccaacattttcgtggactaaggatggcaaccctttttatttcactgaccatcggataattccatcgaacaattcaggaacattcaggatcccaaacgaggggcacatatctcactttcaagggaaataccgctgctttgcttcaaataaactgggaatcgctatgtcagaagaaatagaatttatagttccaagtgttccaaaattcccaaaagaaaaaattgaccctcttgaagtggaggagggagatccaattgtcctcccatgcaatcctcccaaaggcctcccacctttacacatttattggatgaatattgaattagaacacatcgaacaagatgaaagagtatacatgagccaaaagggagatctatacttcgcaaacgtggaagaaaaggacagtcgcaatgactactgttgctttgctgcatttccaagattaaggactattgtacagaaaatgccaatgaaactaacagttaacagtttaaagcatgctaatgactcaagttcatccacagaaattggttccaaggcaaattccatcaagcaaagaaaacccaaactgctgttgcctcccactgagagtggcagtgagtcttcaattaccatcctcaaaggggaaatcttgctgcttgagtgttttgctgaaggcttgccaactccacaggttgattggaacaaaattggtggtgacttaccaaaggggagagaagcaaaagaaaattatggcaagactttgaagatagagaatgtctcctaccaggacaaaggaaattatcgctgcacagccagcaatttcttgggaacagccactcacgattttcacgttatagtagaagagcctcctcgctggacaaagaagcctcagagtgctgtgtatagcaccggaagcaatggcatcttgttatgtgaggctgaaggagaacctcaacccacaatcaagtggagagtcaatggctccccagttgacaatcatccatttgctggtgatgttgtcttccccagggaaatcagttttaccaaccttcaaccaaatcatactgctgtgtaccagtgtgaagcctcaaatgtccatggaactatccttgccaatgccaatattgatgttgtggatgtccgtccattgatacaaaccaaagatggagaaaattacgctacagtggttgggtacagtgctttcttacattgcgagttctttgcttcacctgaggcagtcgtgtcctggcagaaggtggaagaagtgaaacccctggagggcaggcggtatcatatctatgaaaatggcacattgcagatcaacagaaccaccgaagaagatgctgggtcttactcatgttgggtagaaaatgctataggaaaaactgcagtcacagccaatttggatattagaagtatttttatttcactgttactttgcatgaattgtcacatgggttcagtctgtcttcatttgcccaaatggaataataccatttaagttggagtaccagataaagttctttgaaccgttatcaaaattccta

SEQ ID NO: 292936 - DNA, 3059 bp, Homo sapiens
caggaagggagcagaggcgagagccagcctccggcaggagggcgtagaccccggtgccagccagaacggctccagccttcccgcggccagagagccagcggcgggaggggacgggcgggacctccgcggacagccccgggtgcggaccagcgggcagcggccggcgagaccctccctggatccgcccagagcttaccggaccctgcgcgcccccgtcccggctcccggccggctcgggggagaaggcgcccgaggggaggcgccggacagatcgcgtttcggaggcggcgcaggtgctgtaaactgcaaaccataatcctgtcttaatactgcaaacaaatcatagtggaactaaggggaacttaatttactgtttccaggttaactaaggtctcagctgtaaaccaaaagtgagaggagacattaagattttcattcttaccgggttgtcttcttcctgaagagcaatggagccgcttttacttggaagaggactaatcgtatatctaatgttcctcctgttaaaattctcaaaagcaattgaaataccatcttcagttcaacaggttccaacaatcataaaacagtcaaaagtccaagttgcctttcccttcgatgagtattttcaaattgaatgtgaagctaaaggaaatccagaaccaacattttcgtggactaaggatggcaaccctttttatttcactgaccatcggataattccatcgaacaattcaggaacattcaggatcccaaacgaggggcacatatctcactttcaagggaaataccgctgctttgcttcaaataaactgggaatcgctatgtcagaagaaatagaatttatagttccaagtgttccaaaattcccaaaagaaaaaattgaccctcttgaagtggaggagggagatccaattgtcctcccatgcaatcctcccaaaggcctcccacctttacacatttattggatgaatattgaattagaacacatcgaacaagatgaaagagtatacatgagccaaaagggagatctatacttcgcaaacgtggaagaaaaggacagtcgcaatgactactgttgctttgctgcatttccaagattaaggactattgtacagaaaatgccaatgaaactaacagttaacagtttaaagcatgctaatgactcaagttcatccacagaaattggttccaaggcaaattccatcaagcaaagaaaacccaaactgctgttgcctcccactgagagtggcagtgagtcttcaattaccatcctcaaaggggaaatcttgctgcttgagtgttttgctgaaggcttgccaactccacaggttgattggaacaaaattggtggtgacttaccaaaggggagagaagcaaaagaaaattatggcaagactttgaagatagagaatgtctcctaccaggacaaaggaaattatcgctgcacagccagcaatttcttgggaacagccactcacgattttcacgttatagtagaagagcctcctcgctggacaaagaagcctcagagtgctgtgtatagcaccggaagcaatggcatcttgttatgtgaggctgaaggagaacctcaacccacaatcaagtggagagtcaatggctccccagttgacaatcatccatttgctggtgatgttgtcttccccagggaaatcagttttaccaaccttcaaccaaatcatactgctgtgtaccagtgtgaagcctcaaatgtccatggaactatccttgccaatgccaatattgatgttgtggatgtccgtccattgatacaaaccaaagatggagaaaattacgctacagtggttgggtacagtgctttcttacattgcgagttctttgcttcacctgaggcagtcgtgtcctggcagaaggtggaagaagtgaaacccctggagggcaggcggtatcatatctatgaaaatggcacattgcagatcaacagaaccaccgaagaagatgctgggtcttactcatgttgggtagaaaatgctataggaaaaactgcagtcacagccaatttggatattagaaatgctacaaaacttagagtttctcctaagaatcctcgtatccccaaattgcatatgcttgaattacattgtgaaagcaaatgtgactcacatttgaaacacagtttgaagttgtcctggagtaaagatggagaagcctttgaaattaatggcacagaagatggcaggataattattgatggagctaatttgaccatatctaatgtaactttagaggaccaaggtatttactgctgttcagctcatactgctctagacagtgctgccgatataactcaagtaactgttcttgatgttccggatccaccagaaaaccttcacttgtctgaaagacagaacaggagtgttcggctgacctgggaagctggagctgaccacaacagcaatattagcgagtatattgttgaatttgaaggaaacaaagaagagcctggaaggtgggaggaactgaccagagtccaaggaaagaaaaccacagttatcttacctttggctccatttgtgagataccagttcagggtcatagccgtgaacgaagtagggagaagtcagcctagccagccgtcagaccatcatgaaacaccaccagcagctccagataggaatccacaaaacataagggttcaagcctctcaacccaaggaaatgattataaagtgggagtaattctgaggatggtcttgtgaagaaagcatcatgaacgccttattctagatctggagatggcatccaggattatgaatgtcttgcccatcaccacacaaccagaaatccgcaaagctaggatttatgtatgaggatctttggactccaaacctcactttttcctcctttacatatctcggttaaatgttattaaatagacttcaccatttgaattttgcataaaaatgcccatctacccagataattttaattattctagggtcatttccaaattttttctgtaacagtggggcattttattttctctctactacttggatgtatttaatgaccagtatattg

SEQ ID NO: 292937 - DNA, 954 bp, Homo sapiens
caggaagggagcagaggcgagagccagcctccggcaggagggcgtagaccccggtgccagccagaacggctccagccttcccgcggccagagagccagcggcgggaggggacgggcgggacctccgcggacagccccgggtgcggaccagcgggcagcggccggcgagaccctccctggatccgcccagagcttaccggaccctgcgcgcccccgtcccggctcccggccggctcgggggagaaggcgcccgaggggaggcgccggacagatcgcgtttcggaggcggcgcaggtgctgtaaactgcaaaccataatcctgtcttaatactgcaaacaaatcatagtggaactaaggggaacttaatttactgtttccaggttaactaaggtctcagctgtaaaccaaaagtgagaggagacattaagattttcattcttaccgggttgtcttcttcctgaagagcaatggagccgcttttacttggaagaggactaatcgtatatctaatgttcctcctgttaaaattctcaaaagcaattgaaataccatcttcagttcaacaggttccaacaatcataaaacagtcaaaagtccaagttgcctttcccttcgatgagtattttcaaattgaatgtgaagctaaaggaaatccagaaccaacattttcgtggactaaggatggcaaccctttttatttcactgaccatcggataattccatcgaacaattcaggaacattcaggatcccaaacgaggggcacatatctcactttcaagggaaataccgctgctttgcttcaaataaactgggaatcgctatgtcagaagaaatagaatttatagttccaagtaagtactataacgggaatttcattttacaagtgttttagtgaagtgttaaataggagttagattgggttccaatgaaataaagcagttattaactaaatc

SEQ ID NO: 292938 - DNA, 511 bp, Homo sapiens
aaaacagacaccataatattctgctgttttctgtttgtattcgtatgactaggacatagaaaaatttaatttgcatatctttcttccacaaaagtttaaaactgcgtttatgttattttcaaatagatgtccgtccattgatacaaaccaaagatggagaaaattacgctacagtggttgggtacagtgctttcttacattgcgagttctttgcttcacctgaggcagtcgtgtcctggtaagccggtggctcatggttttcttaagagaatgtcaattgtagatttgaccttgtttcttcatccgtcatttgacaggctgtattgtgtctatattgttacatgtacccagtacctctgagacataaggtaacaaacttaccggtccaggaaattagctctactgaaagcattggctagatttctaggattttctcacatagagacatacagagagccacttgtgttcataaagaaaagcagagaattgaagagattacagagacaatttt

SEQ ID NO: 292939 - DNA, 357 bp, Homo sapiens
ttttttgcatgctttccattatatctaaccttgaagcttccaaagatgtgataggtagctggaaatgattctgagcccgattcttcattttgttttctacgggtatacttgaaaaaaattagaatgggaagaaattccagcttgttcacaccttgacttaggtagttactggcaggatgacttaccttcagtccaatagaattcctagcagagcttaatatttctccaacctgattagcatagagcacattaacctaatatgcaagaatcaaatattttaagctccacttgtttattcgaagtttcacagataccatttctttaactttactcaaattcaaagatataattgctgtt

SEQ ID NO: 292940 - DNA, 431 bp, Homo sapiens
tggccccgcccacatgccagggatgctgaccagggagctggagcccggagtgcccccaacaggccatatctgaaagtcatctccatcagggaagaaactgaggttcaggctccccagacacactgggccagcactttcccagggagcaggacgtcagatgaggagactgacgcctggggttcccagaagtatctgcaaattgttggagtttcagcagggaacaagtgttttggacgagggtgtctctgaaatcccttccacctgcaccccgcccccactgcctcctcccagctcgggcctccgggtctccagttgggccctcatgttgctccttcctgagtctgacaagtaagcctcacagctccctccgcctgcctcttcgtgtcactcggccgtgcagagcaacatggagtcctaatgatttccatccc

SEQ ID NO: 292941 - DNA, 1809 bp, Homo sapiens
aagaaagggaagtagggcagtgcatgactggccttaggttttttctttccaagtttattttcttgtgcttcagctactagaaaggtttaattcagggataagtcccaattgagtagttcaagatgatcagagactttgctattttcccctaagttctattccataatctaaaatgttctgtttctagtgccagttcttatgctaagcaggttacgtggaatatatcacttaactcaaaaagccctgttaagccaggactgttatctccatttaacagatgagaaaatggaggtttatggtctgttctcacactgctacgaagaaataccccaaactgggtaattattataaaggaaagaggtttaatggactcagttccgcattgctggtgaggcctcaggacacttatacaatcatggcagaaaaaggagaagcaggcacctttttcacagggcggcaggatgaaaatgactgccagcagtggaaatgccagacgcttataaaaccttcagatctcatgagaccggctcactatcacaggaacagcatggaggaaaccgcccccatgatccagttacctccacctggtcccacccttgacacgtggggattgctacaattcaaggttagatttgggtgaggacacagagccataccatatcagcccagatcaagtagtgacagagtagggatttgaatacaggttatagtcactattgtgttatttcttgacttttgtactattaaaaaactgtagccagtgaggcttctacccttagtacccagaactccttttaggtatagcaattgtttttaggtaaatttatattgagtttaacacctgtgtgattaaagacaactttccaatgtagtatctgtagccatgtcccctaatggctattagtgttcatggttagtgtgttgaagatgagccaggtacataacgcggcacattttctgcaggtcagcagtaaggtttcaaggtacagttatggaggaaagaagaaaatgacacattgataacacaggtctttattcccttttgaatgagacagtttttaaaagttgatttataaatacaaaaatacattctccaaagatagtatttccaaactgttatatacccatctactcccaacatggatataagttttttaaaaaaatagttgtatataacatacatatctgccccagtgttacttcacaggcctatgccctacgggaactccactctcccagccccactttttctcttggttctcccacattcttattctcccacatccctacccacgtttgagctggaaaggatgtccctaccctaggcatgaggtatattttattctgggcaccacacatttgccccatagataacaatacacgtgatgatgtcactagtactacctttctagtatttacatacttaaaagtagtaactagaacagttatcactggaactaagaattttccccacagaggtgaacagaccaagaactaaaatttcaggaaacctgtttaatttcttttgtatctttgaaaagttagttttatatctaagatttcttcacataggttataattcatctgtatgttcaagcttttatgtaaaaatatatagtgccttcagttttaacatagtttcacatgttctcagaactgctaaattcagtgctaccagtaaggcttaataagtagttcattgaccctgtaagataggagcactcagctctgtcacaatttgttgttaaacacatcactcaatgtaagtataaaaatatttattgataaaaaataaacttataattcagc

SEQ ID NO: 292942 - DNA, 1755 bp, Homo sapiens
aagaaagggaagtagggcagtgcatgactggccttaggttttttctttccaagtttattttcttgtgcttcagctactagaaaggtttaattcagggataagtcccaattgagtagttcaagatgatcagagactttgctattttcccctaagttctattccataatctaaaatgttctgtttctagtgccagttcttatgctaagcaggttacgtggaatatatcacttaactcaaaaagccctgttaagccaggactgttatctccatttaacagatgagaaaatggaggtttatggtctgttctcacactgctacgaagaaataccccaaactgggtaattattataaaggaaagaggtttaatggactcagttccgcattgctggtgaggcctcaggacacttatacaatcatggcagaaaaaggagaagcaggcacctttttcacagggcggcaggatgaaaatgactgccagcagtggaaatgccagacgcttataaaaccttcagatctcatgagaccggctcactatcacaggaacagcatggaggaaaccgcccccatgatccagttacctccacctggtcccacccttgacacgtggggattgctacaattcaaggttagatttgggtgaggacacagagccataccatatcagcccagatcaagtagtgacagagtagggatttgaatacaggttatagtcactattgtgttatttcttgacttttgtactattaaaaaaaattgtttttaggtaaatttatattgagtttaacacctgtgtgattaaagacaactttccaatgtagtatctgtagccatgtcccctaatggctattagtgttcatggttagtgtgttgaagatgagccaggtacataacgcggcacattttctgcaggtcagcagtaaggtttcaaggtacagttatggaggaaagaagaaaatgacacattgataacacaggtctttattcccttttgaatgagacagtttttaaaagttgatttataaatacaaaaatacattctccaaagatagtatttccaaactgttatatacccatctactcccaacatggatataagttttttaaaaaaatagttgtatataacatacatatctgccccagtgttacttcacaggcctatgccctacgggaactccactctcccagccccactttttctcttggttctcccacattcttattctcccacatccctacccacgtttgagctggaaaggatgtccctaccctaggcatgaggtatattttattctgggcaccacacatttgccccatagataacaatacacgtgatgatgtcactagtactacctttctagtatttacatacttaaaagtagtaactagaacagttatcactggaactaagaattttccccacagaggtgaacagaccaagaactaaaatttcaggaaacctgtttaatttcttttgtatctttgaaaagttagttttatatctaagatttcttcacataggttataattcatctgtatgttcaagcttttatgtaaaaatatatagtgccttcagttttaacatagtttcacatgttctcagaactgctaaattcagtgctaccagtaaggcttaataagtagttcattgaccctgtaagataggagcactcagctctgtcacaatttgttgttaaacacatcactcaatgtaagtataaaaatatttattgataaaaaataaacttataattcagc

SEQ ID NO: 292943 - DNA, 364 bp, Homo sapiens
agcagggctgtgttccctaagaaaaagtaaaacctcacatgaataccctgcagacgacccgctgagccaagccttgggactcctcagctttctcttccccttgtgcctccttttccagagccctgtcttgtgcacccctctagggtgcccgccagctgtgaacacgcttgcccaggctctctgcctccatcaagcatcatttgggaatcatattttaaaattcagaaagttctttgtttactctgagaacagatttttcccaaaggagaacctataataatgatgtgtactgtattatctatcctctgaggtcgataggcctaattccataagtttgtctacattaaaattattgggatggcgt

SEQ ID NO: 292944 - DNA, 575 bp, Homo sapiens
tctcaccatttctattcaacattacaccacaggcgattaggcaagaaaaaaaattctaaaatacaaattggaaagaaagaagtaaaacatgtctatttgcagataataggatctcatacatagaaaattcatagggatgtaattaaaaactattaaaaataataaactgggccgggtgtggtggctcacgcctgtaatcccagcactttaggagggtgaggcgggtggatcacctgaggtcgggagttcaagaccagcctggccaacatggtgaaaccccatctctactaaaaatacaaaaattactgggcgtggtggcgggcgcctgtagtcccagctactttggaggctgaggcaggagaatggtgtgaacccgggaggcagagcttgcagtgagttgagattgttccactgcactccatcctgggcgacagagcgagacgccatccataaataaataaataaagtaaagtaaaaaacctattaaattgaggctagagctggagatgtaattggtttttgagaaaccttagtataaagcttgcccttgttgtgtggaagaagccctttgcgct

SEQ ID NO: 292945 - DNA, 2354 bp, Homo sapiens
cccttctgtcgcgcggccttatagttccggctgtggcgcgcggacggaaagtttatgccgacggaaagtttatgccgacggactgtgtccggcgatgggcacgggcatttcttcgtttatagctgtctgtttgcattctgattgggaacactgggatcattttcatcatgccgacagtggtggtaatggatgtatccctttccatgacccgacctgtgtctattgaggggtccgaggaataccagcgtaagcacctagcagcccatggtttaacgatgctgtttgagcacatggccacaaattacaagcttgaatttacagcacttgtggttttttcatcactttgggagttgatggtccccttcacgagagattataataccctacaggaagcactaagtaatatggatgattatgacaaaacctgcttggagtctgcattagttggtgtttgcaatatcgttcagcaagaatggggtggtgcaattccttgccaggttgtcctggtgacagacggctgtcttggcattggtagagggtcactgcgacattccctagccactcaaaatcaacgaagtgagagcaacaggtttccactaccttttcctttcccatctaagttatatatcatgtgcatggcgaatttggaggagctccagagcaccgattccttggaatgccttgaacgtctcatagatttaaacaatggtgaagggcagatttttactattgatggccccctgtgcttgaagaatgtacagtctatgtttggaaaactgatagatttggcatatacgcctttccatgctgttctcaagtgtggccacctaactgctgatgtacaagtcttccccaggccagaaccttttgttgtagatgaagaaattgatcctatccctaaagtcattaacacagatttggaaatagtgggatttattgatatagctgatatttcaagtcccccagttctgtccagacatctggtcttacctatagcacttaacaaagaaggtgatgaggtgggtactggcatcactgatgacaatgaagatgaaaattcagccaatcagattgcaggcaaaatacccaacttttgtgtcctgctccatggtagcctaaaagtggaaggaatggtagcgattgttcaattaggtcctgaatggcatggaatgctctactcccaagctgacagcaagaagaaatcaaacctcatgatgtctctctttgagcctggcccagaacctctcccatggctagggaaaatggcacagttgggtcctatttcagatgctaaagaaaacccttatggcgaggatgacaataagagtccattccccctgcagcccaaaaacaaacgcagttatgcccagaatgtgactgtctggatcaaacccagcggcctgcagacagatgtacagaagattttaagaaatgcaaggaaactacctgaaaaaacacagacattctataaggagctgaaccgtttgcgaaaggccgctctagcctttggtttcctggacctgctgaaaggggtggctgacatgctggaaagggaatgcacactgctgcctgagacagcccaccctgatgctgcattccagctgacccatgctgcccagcagctcaagctggccagtaccggcacctctgagtatgccgcttatgaccagaacatcacacctttgcacacggacttctctgggagcagcactgaaagaatttgaaactgacttttggagctttccttcttttttcatttcaactgaaaatgctttaggtaaaaacctttccagtatgttcacctctagaatagccacccaaagaccttcctgaggctgcctcagaagcaccacttgctgttttgaatgactctactagtatgagaaggatgtgaaggtggttggctggttgggctttaacttcctgggattcataatttttaagcttggaagatagctgctgttcccatgatgggcacatttcctgagaagcttgaatgactgatgagcatagagcacccctgccttcctcaggaaacctgaccggcaggggctctctggcttcctgaaagcttcacctcttccctcgtttatatctcaactgtaagggcattttcaagcttctgttcatggaatgagcaactcagactgtctggagcttgctgagtacaaacacaccaccactaagtttcagaactttccttagaacttgggcaaaatgtggtggtaactcttaagtgcttttggtatctcttgagattctaacttttaaagagcaaccattaatgtgtaaaatgattcctattattcaaggtttttttttaatgaaaataaaatatttgattttctagaaaa

SEQ ID NO: 292946 - DNA, 796 bp, Homo sapiens
aggctggtctcgaactcctgacctcaagagatccgcccacctgggcctctcaaagtgttgggattacaggcatgagccactgtgcccgaccttacatattctttaattttgttcttttccttcacagttgaagcaccattggccagtttatgtacaatgaatactactgaggctgacagtttattacttttgttatgtgtaatgatttccaatttgtctaatttggtttatgactttactagtcctttcatttttatatttggcattcattttactaaaacaagagcaccaaccaacaaaataattaaacacatgcagtaatactgcaaaaaggttgtgacagtgccaaaaaacaatggttgttgtcaaatagcaccaacatatgacaactagaaatgttcttcagtaaattaagtgttaggagatgtgggagtttattaagttgcataaaagtcgaatgtgtgaaagttaagggctacctgaatttagcagggctttttttttccagtagatatatttagatggtccttgatttatggtcacttaatgggtgattctaagagtggtccttacaatgaactaagctgctcacttccctctcactgagttctctacagattattcctcacctcaacttaaatggtgtttgcctctgctaatttctgagaagttagttaaagttatggtgaaaaatattattttctctccatgacatgtaagaacgtatttattttctgcagcatttatgatctgtctgttcttgcatccatagaagggagtttaggcaccaatcact

SEQ ID NO: 292947 - DNA, 356 bp, Homo sapiens
ccagatgtcatttcaagaatgtcttttcttttaagatgctaaagaaaacccttatggcgaggatgacaataagagtccattccccctgcagcccaaaaacaaacgcagttatgcccagaatgtgactgtctggatcaaacccagcggcctgcaggtaacattaccatttatgttgctttccactggggacaggagacatttggggtagggcaggcaggcattttatttgattttcttttcctttgatacttaggtaattcatttacttctaatgtttgtcattatttcccaaaagggatttgagatgccctacagtaaaacatgtatatagcaaaatcattttttacaaaatttag

SEQ ID NO: 292948 - DNA, 2656 bp, Homo sapiens
cccttctgtcgcgcggccttatagttccggctgtggcgcgcggacggaaagtttatgccgacggaaagtttatgccgacggactgtgtccggcgatgggcacggggtgagtggggaggccgagggcccgggactgcctttcgctgcttgttggggttacaggtgaaggggttatgggtgaagaacaacccagggccagcgcttggccttcccgccaccgtggcggccgccccgcgctgtctgtgaggcgccagttccggggcgctgctcccggcctcccctcgctctgaggctcggggtccccagctccgcgtaaactgcacgatttcgccctctgctcagctcccctctgccccctctttccaagagagacttccagatcccacattttcttgactgatttttaagcatttcttcgtttatagctgtctgtttgcattctgattgggaacactgggatcattttcatcatgccgacagtggtggtaatggatgtatccctttccatgacccgacctgtgtctattgaggggtccgaggaataccagcgtaagcacctagcagcccatggtttaacgatgctgtttgagcacatggccacaaattacaagcttgaatttacagcacttgtggttttttcatcactttgggagttgatggtccccttcacgagagattataataccctacaggaagcactaagtaatatggatgattatgacaaaacctgcttggagtctgcattagttggtgtttgcaatatcgttcagcaagaatggggtggtgcaattccttgccaggttgtcctggtgacagacggctgtcttggcattggtagagggtcactgcgacattccctagccactcaaaatcaacgaagtgagagcaacaggtttccactaccttttcctttcccatctaagttatatatcatgtgcatggcgaatttggaggagctccagagcaccgattccttggaatgccttgaacgtctcatagatttaaacaatggtgaagggcagatttttactattgatggccccctgtgcttgaagaatgtacagtctatgtttggaaaactgatagatttggcatatacgcctttccatgctgttctcaagtgtggccacctaactgctgatgtacaagtcttccccaggccagaaccttttgttgtagatgaagaaattgatcctatccctaaagtcattaacacagatttggaaatagtgggatttattgatatagctgatatttcaagtcccccagttctgtccagacatctggtcttacctatagcacttaacaaagaaggtgatgaggtgggtactggcatcactgatgacaatgaagatgaaaattcagccaatcagattgcaggcaaaatacccaacttttgtgtcctgctccatggtagcctaaaagtggaaggaatggtagcgattgttcaattaggtcctgaatggcatggaatgctctactcccaagctgacagcaagaagaaatcaaacctcatgatgtctctctttgagcctggcccagaacctctcccatggctagggaaaatggcacagttgggtcctatttcagatgctaaagaaaacccttatggcgaggatgacaataagagtccattccccctgcagcccaaaaacaaacgcagttatgcccagaatgtgactgtctggatcaaacccagcggcctgcagacagatgtacagaagattttaagaaatgcaaggaaactacctgaaaaaacacagacattctataaggagctgaaccgtttgcgaaaggccgctctagcctttggtttcctggacctgctgaaaggggtggctgacatgctggaaagggaatgcacactgctgcctgagacagcccaccctgatgctgcattccagctgacccatgctgcccagcagctcaagctggccagtaccggcacctctgagtatgccgcttatgaccagaacatcacacctttgcacacggacttctctgggagcagcactgaaagaatttgaaactgacttttggagctttccttcttttttcatttcaactgaaaatgctttaggtaaaaacctttccagtatgttcacctctagaatagccacccaaagaccttcctgaggctgcctcagaagcaccacttgctgttttgaatgactctactagtatgagaaggatgtgaaggtggttggctggttgggctttaacttcctgggattcataatttttaagcttggaagatagctgctgttcccatgatgggcacatttcctgagaagcttgaatgactgatgagcatagagcacccctgccttcctcaggaaacctgaccggcaggggctctctggcttcctgaaagcttcacctcttccctcgtttatatctcaactgtaagggcattttcaagcttctgttcatggaatgagcaactcagactgtctggagcttgctgagtacaaacacaccaccactaagtttcagaactttccttagaacttgggcaaaatgtggtggtaactcttaagtgcttttggtatctcttgagattctaacttttaaagagcaaccattaatgtgtaaaatgattcctattattcaaggtttttttttaatgaaaataaaatatttgattttctagaaaa

SEQ ID NO: 292949 - DNA, 2766 bp, Homo sapiens
cccttctgtcgcgcggccttatagttccggctgtggcgcgcggacggaaagtttatgccgacggaaagtttatgccgacggactgtgtccggcgatgggcacggggtgagtggggaggccgagggcccgggactgcctttcgctgcttgttggggttacaggtgaaggggttatgggtgaagaacaacccagggccagcgcttggccttcccgccaccgtggcggccgccccgcgctgtctgtgaggcgccagttccggggcgctgctcccggcctcccctcgctctgaggctcggggtccccagctccgcgtaaactgcacgatttcgccctctgctcagctcccctctgccccctctttccaagagagacttccagatcccacattttcttgactgatttttaaggtaaaaatacatctcccagatgtgattttcagtctggacttttagagatgaaattatatctgagaactggggagggactcccggaggctgacgggaaagccaaagagcagcatttcttcgtttatagctgtctgtttgcattctgattgggaacactgggatcattttcatcatgccgacagtggtggtaatggatgtatccctttccatgacccgacctgtgtctattgaggggtccgaggaataccagcgtaagcacctagcagcccatggtttaacgatgctgtttgagcacatggccacaaattacaagcttgaatttacagcacttgtggttttttcatcactttgggagttgatggtccccttcacgagagattataataccctacaggaagcactaagtaatatggatgattatgacaaaacctgcttggagtctgcattagttggtgtttgcaatatcgttcagcaagaatggggtggtgcaattccttgccaggttgtcctggtgacagacggctgtcttggcattggtagagggtcactgcgacattccctagccactcaaaatcaacgaagtgagagcaacaggtttccactaccttttcctttcccatctaagttatatatcatgtgcatggcgaatttggaggagctccagagcaccgattccttggaatgccttgaacgtctcatagatttaaacaatggtgaagggcagatttttactattgatggccccctgtgcttgaagaatgtacagtctatgtttggaaaactgatagatttggcatatacgcctttccatgctgttctcaagtgtggccacctaactgctgatgtacaagtcttccccaggccagaaccttttgttgtagatgaagaaattgatcctatccctaaagtcattaacacagatttggaaatagtgggatttattgatatagctgatatttcaagtcccccagttctgtccagacatctggtcttacctatagcacttaacaaagaaggtgatgaggtgggtactggcatcactgatgacaatgaagatgaaaattcagccaatcagattgcaggcaaaatacccaacttttgtgtcctgctccatggtagcctaaaagtggaaggaatggtagcgattgttcaattaggtcctgaatggcatggaatgctctactcccaagctgacagcaagaagaaatcaaacctcatgatgtctctctttgagcctggcccagaacctctcccatggctagggaaaatggcacagttgggtcctatttcagatgctaaagaaaacccttatggcgaggatgacaataagagtccattccccctgcagcccaaaaacaaacgcagttatgcccagaatgtgactgtctggatcaaacccagcggcctgcagacagatgtacagaagattttaagaaatgcaaggaaactacctgaaaaaacacagacattctataaggagctgaaccgtttgcgaaaggccgctctagcctttggtttcctggacctgctgaaaggggtggctgacatgctggaaagggaatgcacactgctgcctgagacagcccaccctgatgctgcattccagctgacccatgctgcccagcagctcaagctggccagtaccggcacctctgagtatgccgcttatgaccagaacatcacacctttgcacacggacttctctgggagcagcactgaaagaatttgaaactgacttttggagctttccttcttttttcatttcaactgaaaatgctttaggtaaaaacctttccagtatgttcacctctagaatagccacccaaagaccttcctgaggctgcctcagaagcaccacttgctgttttgaatgactctactagtatgagaaggatgtgaaggtggttggctggttgggctttaacttcctgggattcataatttttaagcttggaagatagctgctgttcccatgatgggcacatttcctgagaagcttgaatgactgatgagcatagagcacccctgccttcctcaggaaacctgaccggcaggggctctctggcttcctgaaagcttcacctcttccctcgtttatatctcaactgtaagggcattttcaagcttctgttcatggaatgagcaactcagactgtctggagcttgctgagtacaaacacaccaccactaagtttcagaactttccttagaacttgggcaaaatgtggtggtaactcttaagtgcttttggtatctcttgagattctaacttttaaagagcaaccattaatgtgtaaaatgattcctattattcaaggtttttttttaatgaaaataaaatatttgattttctagaaaa

SEQ ID NO: 292950 - DNA, 2994 bp, Homo sapiens
aggctggtctcgaactcctgacctcaagagatccgcccacctgggcctctcaaagtgttgggattacaggcatgagccactgtgcccgaccttacatattctttaattttgttcttttccttcacagttgaagcaccattggccagtttatgtacaatgaatactactgaggctgacagtttattacttttgttatgtgtaatgatttccaatttgtctaatttggtttatgactttactagtcctttcatttttatatttggcattcattttactaaaacaagagcaccaaccaacaaaataattaaacacatgcagtaatactgcaaaaaggttgtgacagtgccaaaaaacaatggttgttgtcaaatagcaccaacatatgacaactagaaatgttcttcagtaaattaagtgttaggagatgtgggagtttattaagttgcataaaagtcgaatgtgtgaaagttaagggctacctgaatttagcagggctttttttttccagtagatatatttagatggtccttgatttatggtcacttaatgggtgattctaagagtggtccttacaatgaactaagctgctcacttccctctcactgagttctctacagattattcctcacctcaacttaaatggtgtttgcctctgctaatttctgagaagttagttaaagttatggtgaaaaatattattttctctccatgacatgtaagaacgtatttattttctgcagcatttcatttcttcgtttatagctgtctgtttgcattctgattgggaacactgggatcattttcatcatgccgacagtggtggtaatggatgtatccctttccatgacccgacctgtgtctattgaggggtccgaggaataccagcgtaagcacctagcagcccatggtttaacgatgctgtttgagcacatggccacaaattacaagcttgaatttacagcacttgtggttttttcatcactttgggagttgatggtccccttcacgagagattataataccctacaggaagcactaagtaatatggatgattatgacaaaacctgcttggagtctgcattagttggtgtttgcaatatcgttcagcaagaatggggtggtgcaattccttgccaggttgtcctggtgacagacggctgtcttggcattggtagagggtcactgcgacattccctagccactcaaaatcaacgaagtgagagcaacaggtttccactaccttttcctttcccatctaagttatatatcatgtgcatggcgaatttggaggagctccagagcaccgattccttggaatgccttgaacgtctcatagatttaaacaatggtgaagggcagatttttactattgatggccccctgtgcttgaagaatgtacagtctatgtttggaaaactgatagatttggcatatacgcctttccatgctgttctcaagtgtggccacctaactgctgatgtacaagtcttccccaggccagaaccttttgttgtagatgaagaaattgatcctatccctaaagtcattaacacagatttggaaatagtgggatttattgatatagctgatatttcaagtcccccagttctgtccagacatctggtcttacctatagcacttaacaaagaaggtgatgaggtgggtactggcatcactgatgacaatgaagatgaaaattcagccaatcagattgcaggcaaaatacccaacttttgtgtcctgctccatggtagcctaaaagtggaaggaatggtagcgattgttcaattaggtcctgaatggcatggaatgctctactcccaagctgacagcaagaagaaatcaaacctcatgatgtctctctttgagcctggcccagaacctctcccatggctagggaaaatggcacagttgggtcctatttcagatgctaaagaaaacccttatggcgaggatgacaataagagtccattccccctgcagcccaaaaacaaacgcagttatgcccagaatgtgactgtctggatcaaacccagcggcctgcagacagatgtacagaagattttaagaaatgcaaggaaactacctgaaaaaacacagacattctataaggagctgaaccgtttgcgaaaggccgctctagcctttggtttcctggacctgctgaaaggggtggctgacatgctggaaagggaatgcacactgctgcctgagacagcccaccctgatgctgcattccagctgacccatgctgcccagcagctcaagctggccagtaccggcacctctgagtatgccgcttatgaccagaacatcacacctttgcacacggacttctctgggagcagcactgaaagaatttgaaactgacttttggagctttccttcttttttcatttcaactgaaaatgctttaggtaaaaacctttccagtatgttcacctctagaatagccacccaaagaccttcctgaggctgcctcagaagcaccacttgctgttttgaatgactctactagtatgagaaggatgtgaaggtggttggctggttgggctttaacttcctgggattcataatttttaagcttggaagatagctgctgttcccatgatgggcacatttcctgagaagcttgaatgactgatgagcatagagcacccctgccttcctcaggaaacctgaccggcaggggctctctggcttcctgaaagcttcacctcttccctcgtttatatctcaactgtaagggcattttcaagcttctgttcatggaatgagcaactcagactgtctggagcttgctgagtacaaacacaccaccactaagtttcagaactttccttagaacttgggcaaaatgtggtggtaactcttaagtgcttttggtatctcttgagattctaacttttaaagagcaaccattaatgtgtaaaatgattcctattattcaaggtttttttttaatgaaaataaaatatttgattttctagaaaa

SEQ ID NO: 292951 - DNA, 2513 bp, Homo sapiens
cccttctgtcgcgcggccttatagttccggctgtggcgcgcggacggaaagtttatgccgacggaaagtttatgccgacggactgtgtccggcgatgggcacggggtgagtggggaggccgagggcccgggactgcctttcgctgcttgttggggttacaggtgaaggggttatgggtgaagaacaacccagggccagcgcttggccttcccgccaccgtggcggccgccccgcgctgtctgtgaggcgccagttccggggcgctgctcccggcctcccctcgctctgaggctcggggtccccagctccgcgtaaactgcacgatttcgccctctgctcagctcccctctgccccctctttccaagagagacttccagatcccacattttcttgactgatttttaagcatttcttcgtttatagctgtctgtttgcattctgattgggaacactgggatcattttcatcatgccgacagtggtggtaatggatgtatccctttccatgacccgacctgtgtctattgaggggtccgaggaataccagcgaagcactaagtaatatggatgattatgacaaaacctgcttggagtctgcattagttggtgtttgcaatatcgttcagcaagaatggggtggtgcaattccttgccaggttgtcctggtgacagacggctgtcttggcattggtagagggtcactgcgacattccctagccactcaaaatcaacgaagtgagagcaacaggtttccactaccttttcctttcccatctaagttatatatcatgtgcatggcgaatttggaggagctccagagcaccgattccttggaatgccttgaacgtctcatagatttaaacaatggtgaagggcagatttttactattgatggccccctgtgcttgaagaatgtacagtctatgtttggaaaactgatagatttggcatatacgcctttccatgctgttctcaagtgtggccacctaactgctgatgtacaagtcttccccaggccagaaccttttgttgtagatgaagaaattgatcctatccctaaagtcattaacacagatttggaaatagtgggatttattgatatagctgatatttcaagtcccccagttctgtccagacatctggtcttacctatagcacttaacaaagaaggtgatgaggtgggtactggcatcactgatgacaatgaagatgaaaattcagccaatcagattgcaggcaaaatacccaacttttgtgtcctgctccatggtagcctaaaagtggaaggaatggtagcgattgttcaattaggtcctgaatggcatggaatgctctactcccaagctgacagcaagaagaaatcaaacctcatgatgtctctctttgagcctggcccagaacctctcccatggctagggaaaatggcacagttgggtcctatttcagatgctaaagaaaacccttatggcgaggatgacaataagagtccattccccctgcagcccaaaaacaaacgcagttatgcccagaatgtgactgtctggatcaaacccagcggcctgcagacagatgtacagaagattttaagaaatgcaaggaaactacctgaaaaaacacagacattctataaggagctgaaccgtttgcgaaaggccgctctagcctttggtttcctggacctgctgaaaggggtggctgacatgctggaaagggaatgcacactgctgcctgagacagcccaccctgatgctgcattccagctgacccatgctgcccagcagctcaagctggccagtaccggcacctctgagtatgccgcttatgaccagaacatcacacctttgcacacggacttctctgggagcagcactgaaagaatttgaaactgacttttggagctttccttcttttttcatttcaactgaaaatgctttaggtaaaaacctttccagtatgttcacctctagaatagccacccaaagaccttcctgaggctgcctcagaagcaccacttgctgttttgaatgactctactagtatgagaaggatgtgaaggtggttggctggttgggctttaacttcctgggattcataatttttaagcttggaagatagctgctgttcccatgatgggcacatttcctgagaagcttgaatgactgatgagcatagagcacccctgccttcctcaggaaacctgaccggcaggggctctctggcttcctgaaagcttcacctcttccctcgtttatatctcaactgtaagggcattttcaagcttctgttcatggaatgagcaactcagactgtctggagcttgctgagtacaaacacaccaccactaagtttcagaactttccttagaacttgggcaaaatgtggtggtaactcttaagtgcttttggtatctcttgagattctaacttttaaagagcaaccattaatgtgtaaaatgattcctattattcaaggtttttttttaatgaaaataaaatatttgattttctagaaaa

SEQ ID NO: 292952 - DNA, 2211 bp, Homo sapiens
cccttctgtcgcgcggccttatagttccggctgtggcgcgcggacggaaagtttatgccgacggaaagtttatgccgacggactgtgtccggcgatgggcacgggcatttcttcgtttatagctgtctgtttgcattctgattgggaacactgggatcattttcatcatgccgacagtggtggtaatggatgtatccctttccatgacccgacctgtgtctattgaggggtccgaggaataccagcgaagcactaagtaatatggatgattatgacaaaacctgcttggagtctgcattagttggtgtttgcaatatcgttcagcaagaatggggtggtgcaattccttgccaggttgtcctggtgacagacggctgtcttggcattggtagagggtcactgcgacattccctagccactcaaaatcaacgaagtgagagcaacaggtttccactaccttttcctttcccatctaagttatatatcatgtgcatggcgaatttggaggagctccagagcaccgattccttggaatgccttgaacgtctcatagatttaaacaatggtgaagggcagatttttactattgatggccccctgtgcttgaagaatgtacagtctatgtttggaaaactgatagatttggcatatacgcctttccatgctgttctcaagtgtggccacctaactgctgatgtacaagtcttccccaggccagaaccttttgttgtagatgaagaaattgatcctatccctaaagtcattaacacagatttggaaatagtgggatttattgatatagctgatatttcaagtcccccagttctgtccagacatctggtcttacctatagcacttaacaaagaaggtgatgaggtgggtactggcatcactgatgacaatgaagatgaaaattcagccaatcagattgcaggcaaaatacccaacttttgtgtcctgctccatggtagcctaaaagtggaaggaatggtagcgattgttcaattaggtcctgaatggcatggaatgctctactcccaagctgacagcaagaagaaatcaaacctcatgatgtctctctttgagcctggcccagaacctctcccatggctagggaaaatggcacagttgggtcctatttcagatgctaaagaaaacccttatggcgaggatgacaataagagtccattccccctgcagcccaaaaacaaacgcagttatgcccagaatgtgactgtctggatcaaacccagcggcctgcagacagatgtacagaagattttaagaaatgcaaggaaactacctgaaaaaacacagacattctataaggagctgaaccgtttgcgaaaggccgctctagcctttggtttcctggacctgctgaaaggggtggctgacatgctggaaagggaatgcacactgctgcctgagacagcccaccctgatgctgcattccagctgacccatgctgcccagcagctcaagctggccagtaccggcacctctgagtatgccgcttatgaccagaacatcacacctttgcacacggacttctctgggagcagcactgaaagaatttgaaactgacttttggagctttccttcttttttcatttcaactgaaaatgctttaggtaaaaacctttccagtatgttcacctctagaatagccacccaaagaccttcctgaggctgcctcagaagcaccacttgctgttttgaatgactctactagtatgagaaggatgtgaaggtggttggctggttgggctttaacttcctgggattcataatttttaagcttggaagatagctgctgttcccatgatgggcacatttcctgagaagcttgaatgactgatgagcatagagcacccctgccttcctcaggaaacctgaccggcaggggctctctggcttcctgaaagcttcacctcttccctcgtttatatctcaactgtaagggcattttcaagcttctgttcatggaatgagcaactcagactgtctggagcttgctgagtacaaacacaccaccactaagtttcagaactttccttagaacttgggcaaaatgtggtggtaactcttaagtgcttttggtatctcttgagattctaacttttaaagagcaaccattaatgtgtaaaatgattcctattattcaaggtttttttttaatgaaaataaaatatttgattttctagaaaa

SEQ ID NO: 292953 - DNA, 2070 bp, Homo sapiens
cccttctgtcgcgcggccttatagttccggctgtggcgcgcggacggaaagtttatgccgacggaaagtttatgccgacggactgtgtccggcgatgggcacggggaagcactaagtaatatggatgattatgacaaaacctgcttggagtctgcattagttggtgtttgcaatatcgttcagcaagaatggggtggtgcaattccttgccaggttgtcctggtgacagacggctgtcttggcattggtagagggtcactgcgacattccctagccactcaaaatcaacgaagtgagagcaacaggtttccactaccttttcctttcccatctaagttatatatcatgtgcatggcgaatttggaggagctccagagcaccgattccttggaatgccttgaacgtctcatagatttaaacaatggtgaagggcagatttttactattgatggccccctgtgcttgaagaatgtacagtctatgtttggaaaactgatagatttggcatatacgcctttccatgctgttctcaagtgtggccacctaactgctgatgtacaagtcttccccaggccagaaccttttgttgtagatgaagaaattgatcctatccctaaagtcattaacacagatttggaaatagtgggatttattgatatagctgatatttcaagtcccccagttctgtccagacatctggtcttacctatagcacttaacaaagaaggtgatgaggtgggtactggcatcactgatgacaatgaagatgaaaattcagccaatcagattgcaggcaaaatacccaacttttgtgtcctgctccatggtagcctaaaagtggaaggaatggtagcgattgttcaattaggtcctgaatggcatggaatgctctactcccaagctgacagcaagaagaaatcaaacctcatgatgtctctctttgagcctggcccagaacctctcccatggctagggaaaatggcacagttgggtcctatttcagatgctaaagaaaacccttatggcgaggatgacaataagagtccattccccctgcagcccaaaaacaaacgcagttatgcccagaatgtgactgtctggatcaaacccagcggcctgcagacagatgtacagaagattttaagaaatgcaaggaaactacctgaaaaaacacagacattctataaggagctgaaccgtttgcgaaaggccgctctagcctttggtttcctggacctgctgaaaggggtggctgacatgctggaaagggaatgcacactgctgcctgagacagcccaccctgatgctgcattccagctgacccatgctgcccagcagctcaagctggccagtaccggcacctctgagtatgccgcttatgaccagaacatcacacctttgcacacggacttctctgggagcagcactgaaagaatttgaaactgacttttggagctttccttcttttttcatttcaactgaaaatgctttaggtaaaaacctttccagtatgttcacctctagaatagccacccaaagaccttcctgaggctgcctcagaagcaccacttgctgttttgaatgactctactagtatgagaaggatgtgaaggtggttggctggttgggctttaacttcctgggattcataatttttaagcttggaagatagctgctgttcccatgatgggcacatttcctgagaagcttgaatgactgatgagcatagagcacccctgccttcctcaggaaacctgaccggcaggggctctctggcttcctgaaagcttcacctcttccctcgtttatatctcaactgtaagggcattttcaagcttctgttcatggaatgagcaactcagactgtctggagcttgctgagtacaaacacaccaccactaagtttcagaactttccttagaacttgggcaaaatgtggtggtaactcttaagtgcttttggtatctcttgagattctaacttttaaagagcaaccattaatgtgtaaaatgattcctattattcaaggtttttttttaatgaaaataaaatatttgattttctagaaaa

SEQ ID NO: 292954 - DNA, 2849 bp, Homo sapiens
  misc_feature (2381)..(2381): n is a, c, g, or t
  misc_feature (2387)..(2387): n is a, c, g, or t
  misc_feature (2399)..(2399): n is a, c, g, or t
  misc_feature (2402)..(2402): n is a, c, g, or t
cccttctgtcgcgcggccttatagttccggctgtggcgcgcggacggaaagtttatgccgacggaaagtttatgccgacggactgtgtccggcgatgggcacgggcatttcttcgtttatagctgtctgtttgcattctgattgggaacactgggatcattttcatcatgccgacagtggtggtaatggatgtatccctttccatgacccgacctgtgtctattgaggggtccgaggaataccagcgtaagcacctagcagcccatggtttaacgatgctgtttgagcacatggccacaaattacaagcttgaatttacagcacttgtggttttttcatcactttgggagttgatggtccccttcacgagagattataataccctacaggaagcactaagtaatatggatgattatgacaaaacctgcttggagtctgcattagttggtgtttgcaatatcgttcagcaagaatggggtggtgcaattccttgccaggttgtcctggtgacagacggctgtcttggcattggtagagggtcactgcgacattccctagccactcaaaatcaacgaagtgagagcaacaggtttccactaccttttcctttcccatctaagttatatatcatgtgcatggcgaatttggaggagctccagagcaccgattccttggaatgccttgaacgtctcatagatttaaacaatggtgaagggcagatttttactattgatggccccctgtgcttgaagaatgtacagtctatgtttggaaaactgatagatttggcatatacgcctttccatgctgttctcaagtgtggccacctaactgctgatgtacaagtcttccccaggccagaaccttttgttgtagatgaagaaattgatcctatccctaaagtcattaacacagatttggaaatagtgggatttattgatatagctgatatttcaagtcccccagttctgtccagacatctggtcttacctatagcacttaacaaagaaggtgatgaggtgggtactggcatcactgatgacaatgaagatgaaaattcagccaatcagattgcaggcaaaatacccaacttttgtgtcctgctccatggtagcctaaaagtggaaggaatggtagcgattgttcaattaggtcctgaatggcatggaatgctctactcccaagctgacagcaagaagaaatcaaacctcatgatgtctctctttgagcctggcccagaacctctcccatggctagggaaaatggcacagttgggtcctatttcagatgctaaagaaaacccttatggcgaggatgacaataagagtccattccccctgcagcccaaaaacaaacgcagttatgcccagaatgtgactgtctggatcaaacccagcggcctgcagacagatgtacagaagattttaagaaatgcaaggaaactacctgaaaaaacacagacattctataaggagctgaaccgtttgcgaaaggccgctctagcctttggtttcctggacctgctgaaaggggtggctgacatgctggaaagggaatgcacactgctgcctgagacagcccaccctgatgctgcattccagctgacccatgctgcccagcagctcaagctggccagtaccggcacctctgagtatgccgcttatgaccagaacatcacacctttgcacacggacttctctgggagcagcactgaaagaatttgaaactgacttttggagctttccttcttttttcatttcaactgaaaatgctttaggtaaaaacctttccagtatgttcacctctagaatagccacccaaagaccttcctgaggctgcctcagaagcaccacttgctgttttgaatgactctactagtatgagaaggatgtgaaggtggttggctggttgggctttaacttcctgggattcataatttttaagcttggaagatagctgctgttcccatgatgggcacatttcctgagaagcttgaatgactgatgagcatagagcacccctgccttcctcaggaaacctgaccggcaggggctctctggcttcctgaaagcttcacctcttccctcgtttatatctcaactgtaagggcattttcaagcttctgttcatggaatgagcaactcagactgtctggagcttgctgagtacaaacacaccaccactaagtttcagaactttccttagaacttgggcaaaatgtggtggtaactcttaagtgcttttggtatctcttgagattctaacttttaaagagcaaccattaatgtgtaaaatgattcctattattcaaggtttttttttaatgaaaataaaatatttgattttctagaaaatggtttcactatgaaactaaaggtcanaaaaanaaaagaaaaganaanaaaaagaaaaaaagggggggggccggcaaaaaattcccgccgggggggccccagatttagggagttcccgggtttttttggtcacaagggggggccccttaaggggggggggattaaaaaggcggggagccgggggcgggccgttttaaacaacccggcctgttgtgatggtgggaacaacccgtgccccgtcgcggggagcatctcttggcgggggaggggaaccctatattgcgcgggggcgggggcaccattcttgggcgcgaccacatccctccacggagagattttttaaggctcgaggagggggaaaacatcttcaacatcttggaggcgcttctccgggtgtggtgctcaacccacgacgggcggataatagtctgccggttctgggaaaagatttgggctcaacaggaaggtatgtcctctgacaaatattttttgcga

SEQ ID NO: 292955 - DNA, 1168 bp, Homo sapiens
aagagcaggatgagcagagggattctatgcttgaagtcgagtcacttgaaaaagatctctttgaatgtggaagagatctgagcagatgaaaataaaatcagatgctaaagaaaacccttatggcgaggatgacaataagagtccattccccctgcagcccaaaaacaaacgcagttatgcccagaatgtgactgtctggatcaaacccagcggcctgcagacagatgtacagaagattttaagaaatgcaaggaaactacctgaaaaaacacagacattctataaggagctgaaccgtttgcgaaaggccgctctagcctttggtttcctggacctgctgaaaggggtggctgacatgctggaaagggaatgcacactgctgcctgagacagcccaccctgatgctgcattccagctgacccatgctgcccagcagctcaagctggccagtaccggcacctctgagtatgccgcttatgaccagaacatcacacctttgcacacggacttctctgggagcagcactgaaagaatttgaaactgacttttggagctttccttcttttttcatttcaactgaaaatgctttaggtaaaaacctttccagtatgttcacctctagaatagccacccaaagaccttcctgaggctgcctcagaagcaccacttgctgttttgaatgactctactagtatgagaaggatgtgaaggtggttggctggttgggctttaacttcctgggattcataatttttaagcttggaagatagctgctgttcccatgatgggcacatttcctgagaagcttgaatgactgatgagcatagagcacccctgccttcctcaggaaacctgaccggcaggggctctctggcttcctgaaagcttcacctcttccctcgtttatatctcaactgtaagggcattttcaagcttctgttcatggaatgagcaactcagactgtctggagcttgctgagtacaaacacaccaccactaagtttcagaactttccttagaacttgggcaaaatgtggtggtaactcttaagtgcttttggtatctcttgagattctaacttttaaagagcaaccattaatgtgtaaaatgattcctattattcaaggtttttttttaatgaaaataaaatatttgattttctagaaaa

SEQ ID NO: 292956 - DNA, 1604 bp, Homo sapiens
ctttgtatccctggtattctgaatttcagaatgttggtctcttcattgattttgctaggcactcagtggaccctttccatctggcaattcatgatcttcagtactgggaagatcaattatttctttgatttcctctttctgtattctctgttctccttttctggaacatatatttgtgatttgtgtttgtaattttctatctctttctgcccattttcccatttttaaaatttttgttctgtcttctgtatcttcaaatttatcttataacttttattttttgtttatactatctttttaaaatttcttctttcataaatgtaatatttcctgtctcctaagccagttagttaccacatataggctccagacaactaatgacagtacaaaataggctctgattagatgttgaaatgtttggtactgatactaagtgctaggggataaaagggtctacaaaaaccactatctgccagaaaaacttgaaacaatttcatggaaggggtaagataggatctggacttggaatataggtagatgctaaagaaaacccttatggcgaggatgacaataagagtccattccccctgcagcccaaaaacaaacgcagttatgcccagaatgtgactgtctggatcaaacccagcggcctgcagacagatgtacagaagattttaagaaatgcaaggaaactacctgaaaaaacacagacattctataaggagctgaaccgtttgcgaaaggccgctctagcctttggtttcctggacctgctgaaaggggtggctgacatgctggaaagggaatgcacactgctgcctgagacagcccaccctgatgctgcattccagctgacccatgctgcccagcagctcaagctggccagtaccggcacctctgagtatgccgcttatgaccagaacatcacacctttgcacacggacttctctgggagcagcactgaaagaatttgaaactgacttttggagctttccttcttttttcatttcaactgaaaatgctttaggtaaaaacctttccagtatgttcacctctagaatagccacccaaagaccttcctgaggctgcctcagaagcaccacttgctgttttgaatgactctactagtatgagaaggatgtgaaggtggttggctggttgggctttaacttcctgggattcataatttttaagcttggaagatagctgctgttcccatgatgggcacatttcctgagaagcttgaatgactgatgagcatagagcacccctgccttcctcaggaaacctgaccggcaggggctctctggcttcctgaaagcttcacctcttccctcgtttatatctcaactgtaagggcattttcaagcttctgttcatggaatgagcaactcagactgtctggagcttgctgagtacaaacacaccaccactaagtttcagaactttccttagaacttgggcaaaatgtggtggtaactcttaagtgcttttggtatctcttgagattctaacttttaaagagcaaccattaatgtgtaaaatgattcctattattcaaggtttttttttaatgaaaataaaatatttgattttctagaaaa

SEQ ID NO: 292957 - DNA, 2824 bp, Homo sapiens
  misc_feature (2356)..(2356): n is a, c, g, or t
  misc_feature (2362)..(2362): n is a, c, g, or t
  misc_feature (2374)..(2374): n is a, c, g, or t
  misc_feature (2377)..(2377): n is a, c, g, or t
cccttctgtcgcgcggccttatagttccggctgtggcgcgcggacggaaagtttatgccgacggaaagtttatgccgacggactgtgtccggcgatgggcacgggcatttcttcgtttatagctgtctgtttgcattctgattgggaacactgggatcattttcatcatgccgacagtggtggtaatggatgtatccctttccatgacccgacctgtgtctattgaggggtccgaggaataccagcgtaagcacctagcagcccatggtttaacgatgctgtttgagcacatggccacaaattacaagcttgaatttacagcacttgtggttttttcatcactttgggagttgatggtccccttcacgagagattataataccctacaggaagcactaagtaatatggatgattatgacaaaacctgcttggagtctgcattagttggtgtttgcaatatcgttcagcaagaatggggtggtgcaattccttgccaggttgtcctggtgacagacggctgtcttggcattggtagagggtcactgcgacattccctagccactcaaaatcaacgaagtgagagcaacaggtttccactaccttttcctttcccatctaagttatatatcatgtgcatggcgaatttggaggagctccagagcaccgattccttggaatgccttgaacgtctcatagatttaaacaatggtgaagggcagatttttactattgatggccccctgtgcttgaagaatgtacagtctatgtttggaaaactgatagatttggcatatacgcctttccatgctgttctcaagtgtggccacctaactgctgatgtacaagtcttccccaggccagaaccttttgttgtagatgaagaaattgatcctatccctaaagtcattaacacagatttggaaatagtgggatttattgatatagctgatatttcaagtcccccagttctgtccagacatctggtcttacctatagcacttaacaaagaaggtgatgaggtgggtactggcatcactgatgacaatgaagatgaaaattcagccaatcagattgcaggcaaaatacccaacttttgtgtcctgctccatggtagcctaaaagtggaaggaatggtagcgattgttcaattaggtcctgaatggcatggaatgctctactcccaagctgacagcaagaagaaatcaaacctcatgatgtctctctttgagcctggcccagaacctctcccatggctagggaaaatggcacagttgggtcctatttcagatgctaaagaaaacccttatggcgaggatgacaataagagtccattccccctgcagcccaaaaacaaacgcagttatgcccagaatgtgactgtctggatcaaacccagcggcctgcagacagatgtacagaagattttaagaaatgcaaggaaactacctgaaaaaacacagacattctataaggagctgaaccgtttgcgaaaggccgctctagcctttggtttcctggacctgctgaaaggggtggctgacatgctggaaagggaatgcacactgctgcctgagacagcccaccctgatgctgcattccagctgacccatgctgcccagcagctcaagctggccagtaccggcacctctgagtatgccgcttatgaccagaacatcacacctttgcacacggacttctctgggagcagcactgaaagaatttgaaactgacttttggagctttccttcttttttcatttcaactgaaaatgctttaggtaaaaacctttccagtatgttcacctctagaatagccacccaaagaccttcctgaggctgcctcagaagcaccacttgctgttttgaatgactctactagtatgagaaggatgtgaaggtggttggctggttgggctttaacttcctgggattcataatttttaagcttggaagatagctgctgttcccatgatgggcacatttcctgagaagcttgaatgactgatgagcatagagcacccctgccttcctcaggaaacctgaccggcaggggctctctggcttcctgaaagcttcacctcttccctcgtttatatctcaactgtaagggcattttcaagcttctgttcatggaatgagcaactcagactgtctggagcttgctgagtacaaacacaccaccactaagtttcagaactttccttagaacttgggcaaaatgtggtggtaactcttaagtgcttttggtatctcttgagattctaacttttaaagagcaaccattaatgtgtaaaatgattcctattattcaaggtttttttttaatgaaaataaaatatttgattttctagaaaaanaaaaanaaaagaaaaganaanaaaaagaaaaaaagggggggggccggcaaaaaattcccgccgggggggccccagatttagggagttcccgggtttttttggtcacaagggggggccccttaaggggggggggattaaaaaggcggggagccgggggcgggccgttttaaacaacccggcctgttgtgatggtgggaacaacccgtgccccgtcgcggggagcatctcttggcgggggaggggaaccctatattgcgcgggggcgggggcaccattcttgggcgcgaccacatccctccacggagagattttttaaggctcgaggagggggaaaacatcttcaacatcttggaggcgcttctccgggtgtggtgctcaacccacgacgggcggataatagtctgccggttctgggaaaagatttgggctcaacaggaaggtatgtcctctgacaaatattttttgcga

SEQ ID NO: 292958 - DNA, 945 bp, Homo sapiens
attttcatctctttaaacatttagatccattcttttatattatttcccttttttaccacagaattctaatgttggatttttttttttacccttaatagacagatgtacagaagattttaagaaatgcaaggaaactacctgaatttggtttcctggacctgctgaaaggggtggctgacatgtgcattccagctgacccatgctgcccagcagctcaagctggccagtaccggcacctctgagtatgccgcttatgaccagaacatcacacctttgcacacggacttctctgggagcagcactgaaagaatttgaaactgacttttggagctttccttcttttttcatttcaactgaaaatgctttaggtaaaaacctttccagtatgttcacctctagaatagccacccaaagaccttcctgaggctgcctcagaagcaccacttgctgttttgaatgactctactagtatgagaaggatgtgaaggtggttggctggttgggctttaacttcctgggattcataatttttaagcttggaagatagctgctgttcccatgatgggcacatttcctgagaagcttgaatgactgatgagcatagagcacccctgccttcctcaggaaacctgaccggcaggggctctctggcttcctgaaagcttcacctcttccctcgtttatatctcaactgtaagggcattttcaagcttctgttcatggaatgagcaactcagactgtctggagcttgctgagtacaaacacaccaccactaagtttcagaactttccttagaacttgggcaaaatgtggtggtaactcttaagtgcttttggtatctcttgagattctaacttttaaagagcaaccattaatgtgtaaaatgattcctattattcaaggtttttttttaatgaaaataaaatatttgattttctagaaaa

SEQ ID NO: 292959 - DNA, 1007 bp, Homo sapiens
cccttctgtcgcgcggccttatagttccggctgtggcgcgcggacggaaagtttatgccgacggaaagtttatgccgacggactgtgtccggcgatgggcacggggtgagtggggaggccgagggcccgggactgcctttcgctgcttgttggggttacaggtgaaggggttatgggtgaagaacaacccagggccagcgcttggccttcccgccaccgtggcggccgccccgcgctgtctgtgaggcgccagttccggggcgctgctcccggcctcccctcgctctgaggctcggggtccccagctccgcgtaaactgcacgatttcgccctctgctcagctcccctctgccccctctttccaagagagacttccagatcccacattttcttgactgatttttaagcatttcttcgtttatagctgtctgtttgcattctgattgggaacactgggatcattttcatcatgccgacagtggtggtaatggatgtatccctttccatgacccgacctgtgtctattgaggggtccgaggaataccagcgtaagcacctagcagcccatggtttaacgatgctgtttgagcacatggccacaaattacaagcttgaatttacagcacttgtggttttttcatcactttgggagttgatggtccccttcacgagagattataataccctacaggtacaaaatgtagtaagttattgtatgtacagggcctaaatttattgggaggaaaacagtgttataatgcgttgaatatttagaactttggcattatttaataagtctatgagtacttaatatgtgtaactaaacagcaagaattcacaaccagtaggtcttatgcctactgtttcttcggtacagctatgagttacagctgtgagttgttcccttattttcctctcttggttttctggaattctctgtggaaaagtgagcatctcaggatgtagtgttccattccctaaaatttaggatctttaggctcaacact

SEQ ID NO: 292960 - DNA, 3561 bp, Homo sapiens
gctgcagctgccatgctgactcatgtgcccgcagctagcaggagctggcagcatgggctccccaggggctacgacaggctgggggcttctggattataagacggagaagtatgtgatgaccaggaactggcgggtgggcgccctgcagaggctgctgcagtttgggatcgtggtctatgtggtagggtgggctctcctcgccaaaaaaggctaccaggagcgggacctggaaccccagttttccatcatcaccaaactcaaaggggtttccgtcactcagatcaaggagcttggaaaccggctgtgggatgtggccgacttcgtgaagccacctcagggagagaacgtgttcttcttggtgaccaacttccttgtgacgccagcccaagttcagggcagatgcccagagcacccgtccgtcccactggctaactgctgggtcgacgaggactgccccgaaggggagggaggcacacacagccacggtgtaaaaacaggccagtgtgtggtgttcaatgggacccacaggacctgtgagatctggagttggtgcccagtggagagtggcgttgtgccctcgaggcccctgctggcccaggcccagaacttcacactgttcatcaaaaacacagtcaccttcagcaagttcaacttctctaagtccaatgccttggagacctgggaccccacctattttaagcactgccgctatgaaccacaattcagcccctactgtcccgtgttccgcattggggacctcgtggccaaggctggagggaccttcgaggacctggcgttgctgggtggctctgtaggcatcagagttcactgggattgtgacctggacaccggggactctggctgctggcctcactactccttccagctgcaggagaagagctacaacttcaggacagccactcactggtgggagcaaccgggtgtggaggcccgcaccctgctcaagctctatggaatccgcttcgacatcctcgtcaccgggcaggcagggaagttcgggctcatccccacggccgtcacactgggcaccggggcagcttggctgggcgtggtcacctttttctgtgacctgctactgctgtatgtggatagagaagcccatttctactggaggacaaagtatgaggaggccaaggccccgaaagcaaccgccaactctgtgtggagggagctggcccttgcatcccaagcccgactggccgagtgcctcagacggagctcagcacctgcacccacggccactgctgctgggagtcagacacagacaccaggatggccctgtccaagttctgacacccacttgccaacccattccgggagcctgtagccgttccctgctggttgagagttgggggctgggaagggcggggccctgcctggggatttcaaggatgaggccccagcatggaggattgggggtagaattccacccttgaaccccagcaaacagtccctcccctgactcccaccttggtagggtgctgcctcagggagccataaaagtcggctgtgttttgagacggcgacagaacctgacccgtggagactgggagagcccagcaggcacctgtattgcagggctccgactgcatgtggcaggggctcctgctgcgtctgggcctgaaggtctctctcccagtgctctgtccccagtgttcctagcagaggtatgcttaccagctgtcagcacaaaccctcctgctgcctgggtcctggccctcctcccccatctgcacccccatcataggtagagaccccaccctcccatcggtcctacatggggctgtgcagctggagccaaaaaggcaaggtagaaagaggagtgatgggggagggggattgtttcagcttctctggtgctgtgatgccccaggagagtcctaatctagggaatggggtggagtaggcagataatccacctccctatcccccaggcaagggcggagcatgtgtcttgggcccacacctgcttagtttatgaggaccggctgctttccagtggtagcccttttgccatggaggtctgggagagagagcagagggcggcagggctaagttggtgatcactgggttcttcaggaccttctatatccctcctcggtgaccccccagcccaaccccttggaatctttcctccaggcttcctgagagccctgggggtgggaggctgtgggaggctgtacatctgaaattcacttcagtccaagtcatacctaggaagctgtctgggcagctgctcgagggaggccctggctctgatcccaggctggatggagtggctggaaggaatggttccaaacaacaccaccgagatctccctcaggctggccaggttttgcagctggaattctcctcttggtcccagggcggggcagggaattctaagtgtccaccccagggaggcaaggggctgctttccactgtgggtacctggtgatcagggcaagctgtggagggccaggggtggggctgagactgggctgacatctagaatcacctgccacctggagcctcagtaaaatgcctggggtccctgctgcctctcaatctccagagccatgtccatggggaggtgggctctgaagggtgaaggtgggagagcagggcccctgaggcctgggtatccaaggaggggcacgtgcacctgattctccttggggcccagaggaagctgatgtcatggctggacaaagtcacggagtaaagccagcaaagccaccctcttcctgtgtagtccttacaggcatgactggaaagttggggggcatctatggtagacatggcacagccatgaagagaccagtggggtggtgcagggtggacttggggaccctacccctgaagactgaggccctgcagctaccaggtgggctagaaggtaactggaacaggcctgggcacttgtgcacccatgtaggagcatgagggccacactcttttcacctcaaagcccttgaagagtgggcaaagacagcaagagagctgcagcctgggcccgagctcagaaacagctgtcgcctcagtctgcgcacaagcatgcaccccagggtagtgcctgcagggatgcatgtgtccccgtgggggtgcctgtgccaggcaggcctcaggtgcatgccatgctcagaaccctgctgccctttctaggcagcctccttggggcccaagctctgctccctggatctgccacctagcagacgtggggagcctgaccccatgcctgtcatggaaccctccttgcctggtgtgtgtggctcccctcttcactgggcacctggatccaggcccacctgtgtccctgactcagggtggtcccaggcctggcacctactctttagagagccccagcatctttgatgtggattggagacaattgcctggttccctggggcaggtgaagacttggtgccacaaagaatgccacagtggatacgccagcaggccacatggctggccaagcaattattattatggatcccttgggctgtgggccttcccatccaccccaccacaactgcccaggtagctggagctgatcataaa

SEQ ID NO: 292961 - DNA, 3413 bp, Homo sapiens
gctgcagctgccatgctgactcatgtgcccgcagctagcaggagctggcagcatgggctccccaggggctacgacaggctgggggcttctggattataagacggagaagtatgtgatgaccaggaactggcgggtgggcgccctgcagaggctgctgcagtttgggatcgtggtctatgtggtagggtgggctctcctcgccaaaaaaggctaccaggagcgggacctggaaccccagttttccatcatcaccaaactcaaaggggtttccgtcactcagatcaaggagcttggaaaccggctgtgggatgtggccgacttcgtgaagccacctcaggtgtaaaaacaggccagtgtgtggtgttcaatgggacccacaggacctgtgagatctggagttggtgcccagtggagagtggcgttgtgccctcgaggcccctgctggcccaggcccagaacttcacactgttcatcaaaaacacagtcaccttcagcaagttcaacttctctaagtccaatgccttggagacctgggaccccacctattttaagcactgccgctatgaaccacaattcagcccctactgtcccgtgttccgcattggggacctcgtggccaaggctggagggaccttcgaggacctggcgttgctgggtggctctgtaggcatcagagttcactgggattgtgacctggacaccggggactctggctgctggcctcactactccttccagctgcaggagaagagctacaacttcaggacagccactcactggtgggagcaaccgggtgtggaggcccgcaccctgctcaagctctatggaatccgcttcgacatcctcgtcaccgggcaggcagggaagttcgggctcatccccacggccgtcacactgggcaccggggcagcttggctgggcgtggtcacctttttctgtgacctgctactgctgtatgtggatagagaagcccatttctactggaggacaaagtatgaggaggccaaggccccgaaagcaaccgccaactctgtgtggagggagctggcccttgcatcccaagcccgactggccgagtgcctcagacggagctcagcacctgcacccacggccactgctgctgggagtcagacacagacaccaggatggccctgtccaagttctgacacccacttgccaacccattccgggagcctgtagccgttccctgctggttgagagttgggggctgggaagggcggggccctgcctggggatttcaaggatgaggccccagcatggaggattgggggtagaattccacccttgaaccccagcaaacagtccctcccctgactcccaccttggtagggtgctgcctcagggagccataaaagtcggctgtgttttgagacggcgacagaacctgacccgtggagactgggagagcccagcaggcacctgtattgcagggctccgactgcatgtggcaggggctcctgctgcgtctgggcctgaaggtctctctcccagtgctctgtccccagtgttcctagcagaggtatgcttaccagctgtcagcacaaaccctcctgctgcctgggtcctggccctcctcccccatctgcacccccatcataggtagagaccccaccctcccatcggtcctacatggggctgtgcagctggagccaaaaaggcaaggtagaaagaggagtgatgggggagggggattgtttcagcttctctggtgctgtgatgccccaggagagtcctaatctagggaatggggtggagtaggcagataatccacctccctatcccccaggcaagggcggagcatgtgtcttgggcccacacctgcttagtttatgaggaccggctgctttccagtggtagcccttttgccatggaggtctgggagagagagcagagggcggcagggctaagttggtgatcactgggttcttcaggaccttctatatccctcctcggtgaccccccagcccaaccccttggaatctttcctccaggcttcctgagagccctgggggtgggaggctgtgggaggctgtacatctgaaattcacttcagtccaagtcatacctaggaagctgtctgggcagctgctcgagggaggccctggctctgatcccaggctggatggagtggctggaaggaatggttccaaacaacaccaccgagatctccctcaggctggccaggttttgcagctggaattctcctcttggtcccagggcggggcagggaattctaagtgtccaccccagggaggcaaggggctgctttccactgtgggtacctggtgatcagggcaagctgtggagggccaggggtggggctgagactgggctgacatctagaatcacctgccacctggagcctcagtaaaatgcctggggtccctgctgcctctcaatctccagagccatgtccatggggaggtgggctctgaagggtgaaggtgggagagcagggcccctgaggcctgggtatccaaggaggggcacgtgcacctgattctccttggggcccagaggaagctgatgtcatggctggacaaagtcacggagtaaagccagcaaagccaccctcttcctgtgtagtccttacaggcatgactggaaagttggggggcatctatggtagacatggcacagccatgaagagaccagtggggtggtgcagggtggacttggggaccctacccctgaagactgaggccctgcagctaccaggtgggctagaaggtaactggaacaggcctgggcacttgtgcacccatgtaggagcatgagggccacactcttttcacctcaaagcccttgaagagtgggcaaagacagcaagagagctgcagcctgggcccgagctcagaaacagctgtcgcctcagtctgcgcacaagcatgcaccccagggtagtgcctgcagggatgcatgtgtccccgtgggggtgcctgtgccaggcaggcctcaggtgcatgccatgctcagaaccctgctgccctttctaggcagcctccttggggcccaagctctgctccctggatctgccacctagcagacgtggggagcctgaccccatgcctgtcatggaaccctccttgcctggtgtgtgtggctcccctcttcactgggcacctggatccaggcccacctgtgtccctgactcagggtggtcccaggcctggcacctactctttagagagccccagcatctttgatgtggattggagacaattgcctggttccctggggcaggtgaagacttggtgccacaaagaatgccacagtggatacgccagcaggccacatggctggccaagcaattattattatggatcccttgggctgtgggccttcccatccaccccaccacaactgcccaggtagctggagctgatcataaa

SEQ ID NO: 292962 - DNA, 3335 bp, Homo sapiens
gctgcagctgccatgctgactcatgtgcccgcagctagcaggagctggcagcatgggctccccaggggctacgacaggctgggggcttctggattataagacggagaagtgggctctcctcgccaaaaaaggctaccaggagcgggacctggaaccccagttttccatcatcaccaaactcaaaggggtttccgtcactcagatcaaggagcttggaaaccggctgtgggatgtggccgacttcgtgaagccacctcaggtgtaaaaacaggccagtgtgtggtgttcaatgggacccacaggacctgtgagatctggagttggtgcccagtggagagtggcgttgtgccctcgaggcccctgctggcccaggcccagaacttcacactgttcatcaaaaacacagtcaccttcagcaagttcaacttctctaagtccaatgccttggagacctgggaccccacctattttaagcactgccgctatgaaccacaattcagcccctactgtcccgtgttccgcattggggacctcgtggccaaggctggagggaccttcgaggacctggcgttgctgggtggctctgtaggcatcagagttcactgggattgtgacctggacaccggggactctggctgctggcctcactactccttccagctgcaggagaagagctacaacttcaggacagccactcactggtgggagcaaccgggtgtggaggcccgcaccctgctcaagctctatggaatccgcttcgacatcctcgtcaccgggcaggcagggaagttcgggctcatccccacggccgtcacactgggcaccggggcagcttggctgggcgtggtcacctttttctgtgacctgctactgctgtatgtggatagagaagcccatttctactggaggacaaagtatgaggaggccaaggccccgaaagcaaccgccaactctgtgtggagggagctggcccttgcatcccaagcccgactggccgagtgcctcagacggagctcagcacctgcacccacggccactgctgctgggagtcagacacagacaccaggatggccctgtccaagttctgacacccacttgccaacccattccgggagcctgtagccgttccctgctggttgagagttgggggctgggaagggcggggccctgcctggggatttcaaggatgaggccccagcatggaggattgggggtagaattccacccttgaaccccagcaaacagtccctcccctgactcccaccttggtagggtgctgcctcagggagccataaaagtcggctgtgttttgagacggcgacagaacctgacccgtggagactgggagagcccagcaggcacctgtattgcagggctccgactgcatgtggcaggggctcctgctgcgtctgggcctgaaggtctctctcccagtgctctgtccccagtgttcctagcagaggtatgcttaccagctgtcagcacaaaccctcctgctgcctgggtcctggccctcctcccccatctgcacccccatcataggtagagaccccaccctcccatcggtcctacatggggctgtgcagctggagccaaaaaggcaaggtagaaagaggagtgatgggggagggggattgtttcagcttctctggtgctgtgatgccccaggagagtcctaatctagggaatggggtggagtaggcagataatccacctccctatcccccaggcaagggcggagcatgtgtcttgggcccacacctgcttagtttatgaggaccggctgctttccagtggtagcccttttgccatggaggtctgggagagagagcagagggcggcagggctaagttggtgatcactgggttcttcaggaccttctatatccctcctcggtgaccccccagcccaaccccttggaatctttcctccaggcttcctgagagccctgggggtgggaggctgtgggaggctgtacatctgaaattcacttcagtccaagtcatacctaggaagctgtctgggcagctgctcgagggaggccctggctctgatcccaggctggatggagtggctggaaggaatggttccaaacaacaccaccgagatctccctcaggctggccaggttttgcagctggaattctcctcttggtcccagggcggggcagggaattctaagtgtccaccccagggaggcaaggggctgctttccactgtgggtacctggtgatcagggcaagctgtggagggccaggggtggggctgagactgggctgacatctagaatcacctgccacctggagcctcagtaaaatgcctggggtccctgctgcctctcaatctccagagccatgtccatggggaggtgggctctgaagggtgaaggtgggagagcagggcccctgaggcctgggtatccaaggaggggcacgtgcacctgattctccttggggcccagaggaagctgatgtcatggctggacaaagtcacggagtaaagccagcaaagccaccctcttcctgtgtagtccttacaggcatgactggaaagttggggggcatctatggtagacatggcacagccatgaagagaccagtggggtggtgcagggtggacttggggaccctacccctgaagactgaggccctgcagctaccaggtgggctagaaggtaactggaacaggcctgggcacttgtgcacccatgtaggagcatgagggccacactcttttcacctcaaagcccttgaagagtgggcaaagacagcaagagagctgcagcctgggcccgagctcagaaacagctgtcgcctcagtctgcgcacaagcatgcaccccagggtagtgcctgcagggatgcatgtgtccccgtgggggtgcctgtgccaggcaggcctcaggtgcatgccatgctcagaaccctgctgccctttctaggcagcctccttggggcccaagctctgctccctggatctgccacctagcagacgtggggagcctgaccccatgcctgtcatggaaccctccttgcctggtgtgtgtggctcccctcttcactgggcacctggatccaggcccacctgtgtccctgactcagggtggtcccaggcctggcacctactctttagagagccccagcatctttgatgtggattggagacaattgcctggttccctggggcaggtgaagacttggtgccacaaagaatgccacagtggatacgccagcaggccacatggctggccaagcaattattattatggatcccttgggctgtgggccttcccatccaccccaccacaactgcccaggtagctggagctgatcataaa

SEQ ID NO: 292963 - DNA, 640 bp, Homo sapiens
acccacagagttgcgcccctcaacttccaccttggggaacgaggccagatacacattttcaaaaaaaaaaaaaaaaaaagaaaaagtaaaagcttgtagtattctgtcttgctgcctgctatttgatgttttacctgtgcattttcaatgttagctttgaggtctggtatcattcatattagagtggtttgggacctccagtgatttcctagaagagtgtgtttcctgttggattctttaggagatcccatctggtagatttttagagaactcgatggaaaaatgttctctttagttcatctcagcagacatatttagggaaaacagcaaagcaagcaggagaacaaagggaaaaattcaccaattcctcaatataaccattgttcaaaggaaataactcagattagcatataaaataatcattaggcttttactatccaatatttcttcaggttaccatgtaattacaattatggcatcagcttgaagtttatcatgtatgattgaccactgtgtttactttagctaaccttcagttttgtggtttaactttttaatgtgttagaattttttctttctttttttctttctttctttcttttctttctttctttcttttccttcctttcttccttccttc

SEQ ID NO: 292964 - DNA, 330 bp, Homo sapiens
agacactacaggtagctcttcatcactcagccttccctgaccaccattcaccaattcctcaatataaccattgttcaaaggaaataactcagattagcatataaaataatcattaggcttttactatccaatatttcttcaggttaccatgtaattacaattatggcatcagcttgaagtttatcatgtatgattgaccactgtgtttactttagctaaccttcagttttgtggtttaactttttaatgtgttagaattttttctttctttttttctttctttctttcttttctttctttctttcttttccttcctttcttccttccttc

SEQ ID NO: 292965 - DNA, 432 bp, Homo sapiens
ggcagaggttacggtgagacaagatcgccccattgcactccagcctgggcaacaagagcgaaactccatcttaaaaaaaaaaaatctaactgaggtgcatttttagtaaattactacattgagagaaacaaaattcatccttaaccaactataaactgccaattaacatctaattacataaccaggaaattttcacctttattttacaaattaagaaactatgtatctgaacctaaccaattactgaatttggttttcttcatcatgctgtttataaaagtctttacttcaagccccgcccataaaccataaattacaaaccacagctgggtgctccacaatttttgaatcacgctttgattaaatgctttagtgttttaacggtgactcccatacattttcaacagaagaggaactggaaccccacggacc

SEQ ID NO: 292966 - DNA, 504 bp, Homo sapiens
gtctccagagagacagcctgtgtcttactcagatcccttattaaaatcctgacatccctgggtcttattaaggacctagagaagtgcctggaactcggttcagcacaggtgtgaggcctgatttcctcttgtgatcaactcacagtgtgctggcaagacctgccaatccactcctctgggagcccatctgtcactatgcggaggtgtcactacaagaaaatggtcagggtcactttgctgttgtcttcatatggctgcaagtcttttctttagtgagtgcaagaagacttgattcagtctaccctgaaatagggtctttggttcttttgtcttcaattttgctgttcaagaattttttatttcaaattgcaacttccttggattttgcagatacatatatcatcttttttttttactagctatagtagagaaatgaaaacagtttaataaatgaagaaaaggaaagtatgaatatttgaagaaatagatttggcagttaaatac

SEQ ID NO: 292967 - DNA, 915 bp, Homo sapiens
cgccgctgccgctgcccccggcccgctcgctcgctcgccgcgcgctctcttcctcttacaaactttcgggttctgcagtcgacaagaaaccggggcgaccctcagcaagtcttccccgtgcaggctggggggaactgaaggggacgggacggagacggggtttctccatgttggccagaatggtcttgaactccagacctccagtgatttgcctgcctcggccttccaaagtgctgggattacatgcgtgagccaccacgcccgcctcctgtccacaatctaactgtcaaacaaagatgggctaattaaacggatgccaactaatcggaaaacttctggaattgccgtccctggaaatcctagcaagacacaggacccagaatcctccccattaatattgacgctgtagtgaccaatcaccattaagaggtgccagaaaggaactggaactggcaagtagtcaggtctttcagcggcacccccagaaatcctgtcctataaatggtacttcactctaatgcaaactttgctaaatgttttaaccttgttgtgtaacgcgggggtaaaaagagtacttgatagggttaacacatataatgcatttagaagagcaattcgcaggtggttaacatctgtaacatttgctattattattattggtagtaaaaattatctagcatctgtaaacacttgctattattattgatactaaaagttatccatgagctttttttcttcttcttcttactatgcaaagttgggattctgaagtgaacagctgcacggtgttatcatctttctacacattcacacataacaatcttaatgatatatcacaatgaataatttgacgttatttagctctccttactctgagctgtggactgcatcaaacccaactcgaatagcgttcct

SEQ ID NO: 292968 - DNA, 431 bp, Homo sapiens
cgccgctgccgctgcccccggcccgctcgctcgctcgccgcgcgctctcttcctcttacaaactttcgggttctgcagtcgacaagaaaccggggcgaccctcagcaagtcttccccgtgcaggctggggggaactgaaggggacgggacgggtgagtaggccgaggggccaggacagagagggcagcgggctccgaggacccgcgagtgcgcgtggagggaagagaggatgcggctcagggaatccctgcaaggatccagagaccgggaaatcggcccgagccaaagtctcagcaccttccccaggatctcacaaagttgcaacaacaaaaaggaggggggaggaatagggagaagggggtgggatggggatacgatcacgggcgcaaggtttggagttacaactgtttatttagtccttattctcacag

SEQ ID NO: 292969 - DNA, 5892 bp, Homo sapiens
  misc_feature (508)..(508): n is a, c, g, or t
ggcgaggatggggagcaatgcaaagactctgctcgccccccatctcaccccccaagcggatactggtcttctcgtcggattgcccatgcacttgttgcagaaacagccaaggccctggctgtggagaatgctgaaggaagaagacgcagaagcaggacgaccctgaaagattcagcctcttcatcctcaaacaggaccaggcctcctcttcccacctgtccagcagcatgaaagcagcatgattggccgaccgcaggagaagcccccagaaccaggcccccaactcagccatctgcggaggtcaaggtgtgagcgacgtctcctcaccacagtgctgtgtggtctatacctcagccagggagaggatgtgaaaccccccgccctgcacatgagtggtacaggccaacaggaacacctggctccagccacgttcacagacatgtcagccgtggagtagtgctgacacttttctctcagcttctcagggtttcagtccttttgggtttgntttatttaccttttttatggttttgtggctggacgttcacaaccaaggcagacagcatgggtgaccagcaactgtacaagaccaaccatgtggcccatggtagtgagaaccttttctaccaacagccaccacttggcgtccacagcgggctgaaccacaactatgggaatgcagttacagggggcggaatggatgcccctcaggcctcgccaatctccccccacttccctcaagatacacgggatggtctgggcttgcctgttggctccaaaaaccttggccaaatggatacctcgaggcagggagggtggggaagtcatgcagggcctggaaaccatgtccagctacgtggaaacctggccaactcaaacatgatgtggggggcaccagcccaggctgagcccactgatggctaccaatacacctactcccaggccagcgagatccggacccagaagcttaccagcggtgtcttacacaagctggactctttcacccaggtgtttgccaaccaaaacctgcgaattcaggtcaacaatatggcccaggtgctgcacactcagtcagcagtgatggatggagcccctgacagtgctctccgccagctgctgtctcagaagcccatggagcccccagcaccggctatcccttcccgctaccagcaggtgccccagcagcctcaccctggtttcactggtgggctgtccaaaccagctcttcaggtcgggcagcaccctacccaagggcacctgtattatgactaccagcagcctctggctcaggtgccagtgcagggaggacagccactgcaggccccacagatgctgtcacagcacatgcaacagatgcagcagcaccagtattacccaccgcagcaacagcagcaagccgggcaacagcgtatctccatgcaagaaatacagacgcagccgcaacaaattcgcccatcacagccacagccgccgccacagcagcagcagccgcagcagctacagctgcagcagcggcagggttcaatgcagatacctcagtattatcagccccaacccatgatgcagcacttgcaagagcagcagcagcaacagatgcacctgcagcctccttcttatcacagggaccctcaccagtataccccagagcaggcacacactgtccagctgattcccctgggctccatgtcccagtactactaccaggagccccagcagccctacagccaccccctctaccagcagagccacctgtcccagcaccagcagcgtgaggacagtcagctgaagacctactctagtgacagacaggcccaggccatgctgagctcccatggggacctggggcctcctgacacaggaatgggagacccagcgagctcagatctgacccgggtcagcagcaccctcccccatcgccccctcctatcccccagtgggatccacctcaacaacatggggcctcagcatcagcagctgtctcccagtgccatgtggccccagatgcacctacctgatgggagagcccagccagggtcccctgagtcaagtggccaacccaaaggagcgtttggggagcagtttgatgccaagaacaagctgacatgctccatctgcctgaaggagttcaagaacctgcctgccctgaatggccacatgcggtcccacgggggaatgagggcctcccccaacctcaaacaggaggaaggagagaaggtcctgccgcctcagccccagccaccactgccgcctccgcctccgcctccgccgccaccacagctccctcccgaggcagaaagcctcacgcctatggtcatgcccgtgtctgtccctgtcaagcttctcccgcccaagcccagctctcaggggttcaccaacagcaccgttgccgccccctccgccagagacaagccagccagctcgatgtcggacgacgagatgcctgtgctcgaaatccccaggaagcatcagccgagtgtgcccaaagccgaggagcccctcaagaccgtgcaggagaagaaaaagttccggcaccggccggaacctctcttcatcccgccgccgccctcctacaacccgaaccccgctgcctcctactcgggcgccaccctgtaccagagccagctgcgctccccgcgcgtcctcggggaccacctgctcctggaccccacccacgagctgcccccttacacgcccccacccatgctgagcccggtgcgccagggctcggggctcttcagcaatgtcctcatctccggccacggccctggcgcccacccgcagctgcccctgacgcccctgacgcccacaccacgggtgctgctgtgtcgctccaacagcatcgatggcagcaacgtgacggtcaccccagggcctggagagcagactgtagatgttgaaccacgcatcaacattggcttgagattccaagcagaaatccctgaactccaagatatctctgccctggcccaggacacacacaaggccacactggtatggaagccctggccagaactagaaaaccatgacctccagcaaagagtggagaatcttctgaatttgtgctgttccagtgcattgccaggtggagggaccaattctgaatttgctttgcactctctgtttgaggccaaaggtgatgtgatggttgctctggaaatgctgctactgcggaagcctgtcaggttaaaatgtcatcctttagcaaattaccactatgccggttcggacaagtggacctccctagaaagaaaactgtttaacaaagcactagccacttacagcaaagactttatttttgtacagaagatggtgaagtccaagacggtggctcagtgcgtggagtactactacacgtggaaaaagatcatgcggctggggcggaaacaccggacacgcctggcagaaatcatcgacgattgtgtgacaagtgaagaagaagaagagttagaggaggaggaggaggaggacccggaagaagataggaaatccacaaaagaagaagagagtgaggtgccgaagtccccggagccaccacccgtccccgtcctggctcccacggaggggccgcccctgcaggccctgggccagccctcaggctccttcatctgtgaaatgcccaactgtggggctgtgttcagctcccgacaggcactgaatggccatgcccgcatccacgggggcaccaaccaggtgaccaaggcccgaggtgccatcccctctgggaagcagaagcctggtggcacccagagtgggtactgttcggtaaagagctcaccctctcacagcaccaccagcggcgagacagaccccaccaccatcttcccctgcaaggagtgtggcaaagtcttcttcaagatcaaaagccgaaatgcacacatgaaaactcacaggcagcaggaggaacaacagaggcaaaaggctcagaaggcggcttttgcagctgagatggcagccacgattgagaggactacggggcccgtgggggcgccggggctgctgcccctggaccagctgagtctgatcaaacccatcaaggatgtggacatcctcgacgacgacgtcgtccagcagttgggaggtgtcatggaagaggctgaagttgtggacaccgatcttctcttggatgatcaagattcagtcttgcttcagggtgacgcagaactataaagccctgtgtgtcacttagagacagtgaaaacccacggcctccatcttcattaatcaggaaacctggactgcctgcttgttttgtaacccttttaaactacctgttttaaaagtggtcattttattcaggtttagaaaaaaaaatcctatttcttttccttttatttaaaaaaatttgtttttgtggggggttgggggaataaataattggcacaactatctttaagaggtgtttcatctgggctaccttctcatgaaatcattcccagtagggactgaagctgaccttcatgttccattgcattcagatgtcaaccatcccggttgccttttatcccaaagcttgctgtgagtgtgtgtgtgtgagacgcaggcgaccctcttagtactggggtcttggggccaacttttcccatcaagcgttactttgattctgttctgacctcattccatagtttgcagtgagcatggcatctttgcctggagatactatgctaggggcagctttccaggggcaaagcaagccctcgtgttacacggctctcctccagctcacacgacatgtgaggagatgaccaaatgtgaaaacaggtttcccctgtgttgcccgtcatcctttggcccgttcacaggaatggagtactgtataattttaggctttcattcccagcagtgtttactgaggacctggttttctagaacaggtgtgtcctgtcctcttccatgttccctgggggctggtcagctccaagttgtgggtggcagagctgtgtttcagcatgaactgactagagacccatctggaggcaaatattaagttgccaggactgctttcacttcagggtgattgaaggacacatattgaagtacctagaatgccagaaagtgttctattgcccaaaaaacaaatcagaaaagcctattcttttttgcaacgctgttaatgattagtggagttctgaaattactttgtgccacttggaagtactgtgaaaccgcattcactgggattttgctgtaattcacatccgctggactgaagtttaccttgatgttagctataagaaatagttttctaacacatacgatagcaaatacaagacaaatagcattgaaggccaacaaaaatggcttcagatacaccttagctataatgtttgcattcaaacaatgaatgtattcatcacaagtcacttaccaaagcacttctagacttctccaacctccatgactttgctctgcttcctcctgtccctgtcagcagggttgctgtttgtacttgaaggtaataaacctgtaatccttcaaaaatgccatttagccccaggcttctgagctgagtcagactgacccatcccaccgttagggcaaaagtcaggctgggacacagcgccagtacagagaggatcctgcttcatgcaactccccttttggagttaatgcagcgtgatttcctgggccggtgttttcaggcatcgcccaccccaggtatgctggttcccagctccacgtaggtgtgcctatcacgctgggccactttgctgacaacattcatagcttgacatgagagagaatatcagcagaagcatgagagtaggacctgacgtctttgactctgcaaaagcatttagcacacactcattggggggaactggctgtgagccacagcagccccacacagacagtggtctctgaacttcaggaaagccatggacagaaaaaaaa

SEQ ID NO: 292970 - DNA, 548 bp, Homo sapiens
cactaacacatgcacacacagagcactatcatttgcaccaaagcacaaagcctaggactgtgcagaagagccacctcttactgtcttaagactgtgctccctgacccagccctgtatcccttggaatgggagagtgacatagaggggcagggagaacatgcagcccactccatctcaggatgagttgtacagaatgcacactccggaatcaggaagccaccaaatcctatgacagagcagcagtcttaaaaaccaccaggaatcagcagggagaaggtctccttcccccacgaggtttggggatctctcctaacagatgggccaggaagttacatcaccagtggagttgcatctggcaagcaatttggaaacatgaagggacatgcttctcagaaatcgacaggcctgggaactgaacactgcttttggggccagaaatcaggttcggacaagtggacctccctagaaagaaaactgtttaacaaagcactagccacttacagcaaagactttatttttgtacagaagatggtaagcatgatttttcc

SEQ ID NO: 292971 - DNA, 5446 bp, Homo sapiens
  misc_feature (558)..(558): n is a, c, g, or t
ggcgaggatggggagcaatgcaaagactctgctcgccccccatctcaccccccaagcggatactggtcttctcgtcggattgcccatgcacttgttgcagaaacagccaaggccctggctgtggagaatgctgaaggaagaagacgcagaagcaggacgaccctgaaagattcagcctcttcatcctcaaacaggtcgcttctcgggagttcttggtgttggaatattttacagcaaagcagtcgaccaggcctcctcttcccacctgtccagcagcatgaaagcagcatgattggccgaccgcaggagaagcccccagaaccaggcccccaactcagccatctgcggaggtcaaggtgtgagcgacgtctcctcaccacagtgctgtgtggtctatacctcagccagggagaggatgtgaaaccccccgccctgcacatgagtggtacaggccaacaggaacacctggctccagccacgttcacagacatgtcagccgtggagtagtgctgacacttttctctcagcttctcagggtttcagtccttttgggtttgntttatttaccttttttatggttttgtggctggacgttcacaaccaaggcagacagcatgggtgaccagcaactgtacaagaccaaccatgtggcccatggtagtgagaaccttttctaccaacagccaccacttggcgtccacagcgggctgagcccactgatggctaccaatacacctactcccaggccagcgagatccggacccagaagcttaccagcggtgtcttacacaagctggactctttcacccaggtgtttgccaaccaaaacctgcgaattcaggtcaacaatatggcccaggtgctgcacactcagtcagcagtgatggatggagcccctgacagtgctctccgccagctgctgtctcagaagcccatggagcccccagcaccggctatcccttcccgctaccagcaggtgccccagcagcctcaccctggtttcactggtgggctgtccaaaccagctcttcaggtcgggcagcaccctacccaagggcacctgtattatgactaccagcagcctctggctcaggtgccagtgcagggaggacagccactgcaggccccacagatgctgtcacagcacatgcaacagatgcagcagcaccagtattacccaccgcagcaacagcagcaagccgggcaacagcgtatctccatgcaagaaatacagacgcagccgcaacaaattcgcccatcacagccacagccgccgccacagcagcagcagccgcagcagctacagctgcagcagcggcagggttcaatgcagatacctcagtattatcagccccaacccatgatgcagcacttgcaagagcagcagcagcaacagatgcacctgcagcctccttcttatcacagggaccctcaccagtataccccagagcaggcacacactgtccagctgattcccctgggctccatgtcccagtactactaccaggagccccagcagccctacagccaccccctctaccagcagagccacctgtcccagcaccagcagcgtgaggacagtcagctgaagacctactctagtgacagacaggcccaggccatgctgagctcccatggggacctggggcctcctgacacaggaatgggagacccagcgagctcagatctgacccgggtcagcagcaccctcccccatcgccccctcctatcccccagtgggatccacctcaacaacatggggcctcagcatcagcagctgtctcccagtgccatgtggccccagatgcacctacctgatgggagagcccagccagggtcccctgagtcaagtggccaacccaaaggagcgtttggggagcagtttgatgccaagaacaagctgacatgctccatctgcctgaaggagttcaagaacctgcctgccctgaatggccacatgcggtcccacgggggaatgagggcctcccccaacctcaaacaggaaatccccaggaagcatcagccgagtgtgcccaaagccgaggagcccctcaagaccgtgcaggagaagaaaaagttccggcaccggccggaacctctcttcatcccgccgccgccctcctacaacccgaaccccgctgcctcctactcgggcgccaccctgtaccagagccagctgcgctccccgcgcgtcctcggggaccacctgctcctggaccccacccacgagctgcccccttacacgcccccacccatgctgagcccggtgcgccagggctcggggctcttcagcaatgtcctcatctccggccacggccctggcgcccacccgcagctgcccctgacgcccctgacgcccacaccacgggtgctgctgtgtcgctccaacagcatcgatggcagcaacgtgacggtcaccccagggcctggagagcagactgtagatgttgaaccacgcatcaacattggcttgagattccaagcagaaatccctgaactccaagatatctctgccctggcccaggacacacacaaggccacactggtatggaagccctggccagaactagaaaaccatgacctccagcaaagagtggagaatcttctgaatttgtgctgttccagtgcattgccaggtggagggaccaattctgaatttgctttgcactctctgtttgaggccaaaggtgatgtgatggttgctctggaaatgctgctactgcggaagcctgtcaggttaaaatgtcatcctttagcaaattaccactatgccggttcggacaagtggacctccctagaaagaaaactgtttaacaaagcactagccacttacagcaaagactttatttttgtacagaagatggtgaagtccaagacggtggctcagtgcgtggagtactactacacgtggaaaaagatcatgcggctggggcggaaacaccggacacgcctggcagaaatcatcgacgattgtgtgacaagtgaagaagaagaagagttagaggaggaggaggaggaggacccggaagaagataggaaatccacaaaagaagaagagagtgaggtgccgaagtccccggagccaccacccgtccccgtcctggctcccacggaggggccgcccctgcaggccctgggccagccctcaggctccttcatctgtgaaatgcccaactgtggggctgtgttcagctcccgacaggcactgaatggccatgcccgcatccacgggggcaccaaccaggtgaccaaggcccgaggtgccatcccctctgggaagcagaagcctggtggcacccagagtgggtactgttcggtaaagagctcaccctctcacagcaccaccagcggcgagacagaccccaccaccatcttcccctgcaaggagtgtggcaaagtcttcttcaagatcaaaagccgaaatgcacacatgaaaactcacaggcagcaggaggaacaacagaggcaaaaggctcagaaggcggcttttgcagctgagatggcagccacgattgagaggactacggggcccgtgggggcgccggggctgctgcccctggaccagctgagtctgatcaaacccatcaaggatgtggacatcctcgacgacgacgtcgtccagcagttgggaggtgtcatggaagaggctgaagttgtggacaccgatcttctcttggatgatcaagattcagtcttgcttcagggtgacgcagaactataaagccctgtgtgtcacttagagacagtgaaaacccacggcctccatcttcattaatcaggaaacctggactgcctgcttgttttgtaacccttttaaactacctgttttaaaagtggtcattttattcaggtttagaaaaaaaaatcctatttcttttccttttatttaaaaaaatttgtttttgtggggggttgggggaataaataattggcacaactatctttaagaggtgtttcatctgggctaccttctcatgaaatcattcccagtagggactgaagctgaccttcatgttccattgcattcagatgtcaaccatcccggttgccttttatcccaaagcttgctgtgagtgtgtgtgtgtgagacgcaggcgaccctcttagtactggggtcttggggccaacttttcccatcaagcgttactttgattctgttctgacctcattccatagtttgcagtgagcatggcatctttgcctggagatactatgctaggggcagctttccaggggcaaagcaagccctcgtgttacacggctctcctccagctcacacgacatgtgaggagatgaccaaatgtgaaaacaggtttcccctgtgttgcccgtcatcctttggcccgttcacaggaatggagtactgtataattttaggctttcattcccagcagtgtttactgaggacctggttttctagaacaggtgtgtcctgtcctcttccatgttccctgggggctggtcagctccaagttgtgggtggcagagctgtgtttcagcatgaactgactagagacccatctggaggcaaatattaagttgccaggactgctttcacttcagggtgattgaaggacacatattgaagtacctagaatgccagaaagtgttctattgcccaaaaaacaaatcagaaaagcctattcttttttgcaacgctgttaatgattagtggagttctgaaattactttgtgccacttggaagtactgtgaaaccgcattcactgggattttgctgtaattcacatccgctggactgaagtttaccttgatgttagctataagaaatagttttctaacacatacgatagcaaatacaagacaaatagcattgaaggccaacaaaaatggcttcagatacaccttagctataatgtttgcattcaaacaatgaatgtattcatcacaagtcacttaccaaagcacttctagacttctccaacctccatgactttgctctgcttcctcctgtccctgtcagcagggttgctgtttgtacttgaaggtaataaacctgtaatccttcaaaaatgccatttagccccaggcttctgagctgagtcagactgacccatcccaccgttagggcaaaagtcaggctgggacacagcgccagtacagagaggatcctgcttcatgcaactccccttttggagttaatgcagcgtgatttcctgggccggtgttttcaggcatcgcccaccccaggtatgctggttcccagctccacgtaggtgtgcctatcacgctgggccactttgctgacaacattcatagcttgacatgagagagaatatcagcagaagcatgagagtaggacctgacgtctttgactctgcaaaagcatttagcacacactcattggggggaactggctgtgagccacagcagccccacacagacagtggtctctgaacttcaggaaagccatggacagaaaaaaaa

SEQ ID NO: 292972 - DNA, 5482 bp, Homo sapiens
  misc_feature (558)..(558): n is a, c, g, or t
ggcgaggatggggagcaatgcaaagactctgctcgccccccatctcaccccccaagcggatactggtcttctcgtcggattgcccatgcacttgttgcagaaacagccaaggccctggctgtggagaatgctgaaggaagaagacgcagaagcaggacgaccctgaaagattcagcctcttcatcctcaaacaggtcgcttctcgggagttcttggtgttggaatattttacagcaaagcagtcgaccaggcctcctcttcccacctgtccagcagcatgaaagcagcatgattggccgaccgcaggagaagcccccagaaccaggcccccaactcagccatctgcggaggtcaaggtgtgagcgacgtctcctcaccacagtgctgtgtggtctatacctcagccagggagaggatgtgaaaccccccgccctgcacatgagtggtacaggccaacaggaacacctggctccagccacgttcacagacatgtcagccgtggagtagtgctgacacttttctctcagcttctcagggtttcagtccttttgggtttgntttatttaccttttttatggttttgtggctggacgttcacaaccaaggcagacagcatgggtgaccagcaactgtacaagaccaaccatgtggcccatggtagtgagaaccttttctaccaacagccaccacttggcgtccacagcgggctgagcccactgatggctaccaatacacctactcccaggccagcgagatccggacccagaagcttaccagcggtgtcttacacaagctggactctttcacccaggtgtttgccaaccaaaacctgcgaattcaggtcaacaatatggcccaggtgctgcacactcagtcagcagtgatggatggagcccctgacagtgctctccgccagctgctgtctcagaagcccatggagcccccagcaccggctatcccttcccgctaccagcaggtgccccagcagcctcaccctggtttcactggtgggctgtccaaaccagctcttcaggtcgggcagcaccctacccaagggcacctgtattatgactaccagcagcctctggctcaggtgccagtgcagggaggacagccactgcaggccccacagatgctgtcacagcacatgcaacagatgcagcagcaccagtattacccaccgcagcaacagcagcaagccgggcaacagcgtatctccatgcaagaaatacagacgcagccgcaacaaattcgcccatcacagccacagccgccgccacagcagcagcagccgcagcagctacagctgcagcagcggcagggttcaatgcagatacctcagtattatcagccccaacccatgatgcagcacttgcaagagcagcagcagcaacagatgcacctgcagcctccttcttatcacagggaccctcaccagtataccccagagcaggcacacactgtccagctgattcccctgggctccatgtcccagtactactaccaggagccccagcagccctacagccaccccctctaccagcagagccacctgtcccagcaccagcagcgtgaggacagtcagctgaagacctactctagtgacagacaggcccaggccatgctgagctcccatggggacctggggcctcctgacacaggaatgggagacccagcgagctcagatctgacccgggtcagcagcaccctcccccatcgccccctcctatcccccagtgggatccacctcaacaacatggggcctcagcatcagcagctgtctcccagtgccatgtggccccagatgcacctacctgatgggagagcccagccagggtcccctgagtcaagtggccaacccaaaggagcgtttggggagcagtttgatgccaagaacaagctgacatgctccatctgcctgaaggagttcaagaacctgcctgccctgaatggccacatgcggtcccacgggggaatgagggcctcccccaacctcaaacaggaaatccccaggaagcatcagccgagtgtgcccaaagccgaggagcccctcaagaccgtgcaggagaagaaaaagttccggcaccggccggaacctctcttcatcccgccgccgccctcctacaacccgaaccccgctgcctcctactcgggcgccaccctgtaccagagccagctgcgctccccgcgcgtcctcggggaccacctgctcctggaccccacccacgagctgcccccttacacgcccccacccatgctgagcccggtgcgccagggctcggggctcttcagcaatgtcctcatctccggccacggccctggcgcccacccgcagctgcccctgacgcccctgacgcccacaccacgggtgctgctgtgtcgctccaacagcatcgatggcagcaacgtgacggtcaccccagggcctggagagcagactgtagatgttgaaccacgcatcaacattggcttgagattccaagcagaaatccctgaactccaagatatctctgccctggcccaggacacacacaaggccacactggtatggaagccctggccagaactagaaaaccatgacctccagcaaagagtggagaatcttctgaatttgtgctgttccagtgcattgccaggtggagggaccaattctgaatttgctttgcactctctgtttgaggccaaaggtgatgtgatggttgctctggaaatgctgctactgcggaagcctgtcaggttaaaatgtcatcctttagcaaattaccactatgccggttcggacaagtggacctccctagaaagaaaactgtttaacaaagcactagccacttacagcaaagactttatttttgtacagaagatggtgaagtccaagacggtggctcagtgcgtggagtactactacacgtggaaaaagatcatgcggctggggcggaaacaccggacacgcctggcagaaatcatcgacgattgtgtgacaagtgaagaagaagaagagttagaggaggaggaggaggaggacccggaagaagataggaaatccacaaaagaagaagagagtgaggtgccgaagtccccggagccaccacccgtccccgtcctggctcccacggaggggccgcccctgcaggccctgggccagccctcaggctccttcatctgtgaaatgcccaactgtggggctgactgtagatgtcatgtcactccctttcttccccaggtgttcagctcccgacaggcactgaatggccatgcccgcatccacgggggcaccaaccaggtgaccaaggcccgaggtgccatcccctctgggaagcagaagcctggtggcacccagagtgggtactgttcggtaaagagctcaccctctcacagcaccaccagcggcgagacagaccccaccaccatcttcccctgcaaggagtgtggcaaagtcttcttcaagatcaaaagccgaaatgcacacatgaaaactcacaggcagcaggaggaacaacagaggcaaaaggctcagaaggcggcttttgcagctgagatggcagccacgattgagaggactacggggcccgtgggggcgccggggctgctgcccctggaccagctgagtctgatcaaacccatcaaggatgtggacatcctcgacgacgacgtcgtccagcagttgggaggtgtcatggaagaggctgaagttgtggacaccgatcttctcttggatgatcaagattcagtcttgcttcagggtgacgcagaactataaagccctgtgtgtcacttagagacagtgaaaacccacggcctccatcttcattaatcaggaaacctggactgcctgcttgttttgtaacccttttaaactacctgttttaaaagtggtcattttattcaggtttagaaaaaaaaatcctatttcttttccttttatttaaaaaaatttgtttttgtggggggttgggggaataaataattggcacaactatctttaagaggtgtttcatctgggctaccttctcatgaaatcattcccagtagggactgaagctgaccttcatgttccattgcattcagatgtcaaccatcccggttgccttttatcccaaagcttgctgtgagtgtgtgtgtgtgagacgcaggcgaccctcttagtactggggtcttggggccaacttttcccatcaagcgttactttgattctgttctgacctcattccatagtttgcagtgagcatggcatctttgcctggagatactatgctaggggcagctttccaggggcaaagcaagccctcgtgttacacggctctcctccagctcacacgacatgtgaggagatgaccaaatgtgaaaacaggtttcccctgtgttgcccgtcatcctttggcccgttcacaggaatggagtactgtataattttaggctttcattcccagcagtgtttactgaggacctggttttctagaacaggtgtgtcctgtcctcttccatgttccctgggggctggtcagctccaagttgtgggtggcagagctgtgtttcagcatgaactgactagagacccatctggaggcaaatattaagttgccaggactgctttcacttcagggtgattgaaggacacatattgaagtacctagaatgccagaaagtgttctattgcccaaaaaacaaatcagaaaagcctattcttttttgcaacgctgttaatgattagtggagttctgaaattactttgtgccacttggaagtactgtgaaaccgcattcactgggattttgctgtaattcacatccgctggactgaagtttaccttgatgttagctataagaaatagttttctaacacatacgatagcaaatacaagacaaatagcattgaaggccaacaaaaatggcttcagatacaccttagctataatgtttgcattcaaacaatgaatgtattcatcacaagtcacttaccaaagcacttctagacttctccaacctccatgactttgctctgcttcctcctgtccctgtcagcagggttgctgtttgtacttgaaggtaataaacctgtaatccttcaaaaatgccatttagccccaggcttctgagctgagtcagactgacccatcccaccgttagggcaaaagtcaggctgggacacagcgccagtacagagaggatcctgcttcatgcaactccccttttggagttaatgcagcgtgatttcctgggccggtgttttcaggcatcgcccaccccaggtatgctggttcccagctccacgtaggtgtgcctatcacgctgggccactttgctgacaacattcatagcttgacatgagagagaatatcagcagaagcatgagagtaggacctgacgtctttgactctgcaaaagcatttagcacacactcattggggggaactggctgtgagccacagcagccccacacagacagtggtctctgaacttcaggaaagccatggacagaaaaaaaa

SEQ ID NO: 292973 - DNA, 2496 bp, Homo sapiens
ctcttgcttttattaccttaacactagacaagtgaagaagaagaagagttagaggaggaggaggaggaggacccggaagaagataggaaatccacaaaagaagaagagagtgaggtgccgaagtccccggagccaccacccgtccccgtcctggctcccacggaggggccgcccctgcaggccctgggccagccctcaggctccttcatctgtgaaatgcccaactgtggggctgtgttcagctcccgacaggcactgaatggccatgcccgcatccacgggggcaccaaccaggtgaccaaggcccgaggtgccatcccctctgggaagcagaagcctggtggcacccagagtgggtactgttcggtaaagagctcaccctctcacagcaccaccagcggcgagacagaccccaccaccatcttcccctgcaaggagtgtggcaaagtcttcttcaagatcaaaagccgaaatgcacacatgaaaactcacaggcagcaggaggaacaacagaggcaaaaggctcagaaggcggcttttgcagctgagatggcagccacgattgagaggactacggggcccgtgggggcgccggggctgctgcccctggaccagctgagtctgatcaaacccatcaaggatgtggacatcctcgacgacgacgtcgtccagcagttgggaggtgtcatggaagaggctgaagttgtggacaccgatcttctcttggatgatcaagattcagtcttgcttcagggtgacgcagaactataaagccctgtgtgtcacttagagacagtgaaaacccacggcctccatcttcattaatcaggaaacctggactgcctgcttgttttgtaacccttttaaactacctgttttaaaagtggtcattttattcaggtttagaaaaaaaaatcctatttcttttccttttatttaaaaaaatttgtttttgtggggggttgggggaataaataattggcacaactatctttaagaggtgtttcatctgggctaccttctcatgaaatcattcccagtagggactgaagctgaccttcatgttccattgcattcagatgtcaaccatcccggttgccttttatcccaaagcttgctgtgagtgtgtgtgtgtgagacgcaggcgaccctcttagtactggggtcttggggccaacttttcccatcaagcgttactttgattctgttctgacctcattccatagtttgcagtgagcatggcatctttgcctggagatactatgctaggggcagctttccaggggcaaagcaagccctcgtgttacacggctctcctccagctcacacgacatgtgaggagatgaccaaatgtgaaaacaggtttcccctgtgttgcccgtcatcctttggcccgttcacaggaatggagtactgtataattttaggctttcattcccagcagtgtttactgaggacctggttttctagaacaggtgtgtcctgtcctcttccatgttccctgggggctggtcagctccaagttgtgggtggcagagctgtgtttcagcatgaactgactagagacccatctggaggcaaatattaagttgccaggactgctttcacttcagggtgattgaaggacacatattgaagtacctagaatgccagaaagtgttctattgcccaaaaaacaaatcagaaaagcctattcttttttgcaacgctgttaatgattagtggagttctgaaattactttgtgccacttggaagtactgtgaaaccgcattcactgggattttgctgtaattcacatccgctggactgaagtttaccttgatgttagctataagaaatagttttctaacacatacgatagcaaatacaagacaaatagcattgaaggccaacaaaaatggcttcagatacaccttagctataatgtttgcattcaaacaatgaatgtattcatcacaagtcacttaccaaagcacttctagacttctccaacctccatgactttgctctgcttcctcctgtccctgtcagcagggttgctgtttgtacttgaaggtaataaacctgtaatccttcaaaaatgccatttagccccaggcttctgagctgagtcagactgacccatcccaccgttagggcaaaagtcaggctgggacacagcgccagtacagagaggatcctgcttcatgcaactccccttttggagttaatgcagcgtgatttcctgggccggtgttttcaggcatcgcccaccccaggtatgctggttcccagctccacgtaggtgtgcctatcacgctgggccactttgctgacaacattcatagcttgacatgagagagaatatcagcagaagcatgagagtaggacctgacgtctttgactctgcaaaagcatttagcacacactcattggggggaactggctgtgagccacagcagccccacacagacagtggtctctgaacttcaggaaagccatggacagaaaaaaaa

SEQ ID NO: 292974 - DNA, 309 bp, Homo sapiens
ttgccaggagccctgtgtcctgttgcctcctgacgacgggctgcttgcatgttcggttgtgtcactttctagcaatggataacaccggttctgtcctaatcaccacttgtgatctcaaggcctcctagggcagagctatgtctgttgctttggctctgttggcatttgtctgttggcataagctcctgccccttgtgggtgtgccaagacctgggtgacagtggacagtgcctgcacgtgtggcaaggagacgagtgcatgagaccagagagagccacagaaggtacaatcagcagccccctgcttttg

SEQ ID NO: 292975 - DNA, 361 bp, Homo sapiens
ccagtgcccccgcccctgacctccacagtgctaaccgcttttcccctttgggtagatgatctccataggacacacagaccagttgctgactcttgccttttctctcctttgggtctgcaggttgctctggaaatgctgctactgcggaagcctgtcaggttaaaatgtcatcctttagcaaattaccactatgccggtaggttgccaggagccctgtgtcctgttgcctcctgacgacgggctgcttgcatgttcggttgtgtcactttctagcaatggataacaccggttctgtcctaatcaccacttgtgatctcaaggcctcctagggcagagctatgtctgttgctttggctctgtt

SEQ ID NO: 292976 - DNA, 483 bp, Homo sapiens
aaatcaagcatagagaggctaggatctctttctggagcaagaataattgcatagaaatcataccgcttagcagaccattgtgggacagctggcttctcctcaccctgtgtgagaaatgggtaaccctaagttattttgcaccatactccacccagctccctggaaactgtcaaggataactctggcaggagctgggtaggagagaagctctattatggctggttaggtaactgctcatttgctttagtctttttcaacattccttccctgttgactagtgacctctgatttttgtgttttagacagcatcgatggcagcaacgtgacggtcaccccagggcctggagagcagactgtagatgttgaaccgtaaggaaaagtcaattactctttagaacagaagcctcagcttcttgagaagtatagttaatacttttgtagtcagaggattacactgagagagcagttgtagaaattgtagga

SEQ ID NO: 292977 - DNA, 819 bp, Homo sapiens
gcggccgccgcagtcccgccggcagccgccgccaaccaccaccatcaccaccaccatgcgctccacgaggcgcccaagttcaccgtggagaccctggagcacacggtcaacaacgactcggagatctggggtctcctgcagccctaccagcacctgatctgcgggaagaacgccagcggggtgctgtgcctaccagacagcctgaatcttcacagagacccacagcggtcaaacaagccaggggaactgcccatgttcagccagtcggagctgaggaccatcgagcagtctttgctggccacgcgcgtaggcagcatcgccgaattgagtgacctggtgtcccgtgcaatgcatcacctgcagcccctcaatgccaagcaccacggcaatggcacccccctgcaccacaagcagggggcactgtactgggagcccgaggccctgtacaccctttgctatttcatgcactgcccacaaatggaatgggaaaaccccaacgtggagccttccaaagtcaacctccaggtggaaagaggcccttcctcgtgctgccgccgctgatggagtggatccgggtggccgtggcgcacgccggccaccgccgcagcttctccatggacagcgacgacgtccgccaggcggcccggctgctgctgcccggcgtggactgcgagccgcgccagctcagggccgacgactgcttttgtgcatctcgaaagctggatgcggtggccatcgaagccaagtttaagcaggacctgggtttccggatgctgaactgtggacgaacagacctggtgaagcaggcagtgtctctgc

SEQ ID NO: 292978 - DNA, 513 bp, Homo sapiens
gcggccgccgcagtcccgccggcagccgccgccaaccaccaccatcaccaccaccatgcgctccacgaggcgcccaagttcaccgtggagaccctggagcacacggtcaacaacgactcggagatctggggtctcctgcagccctaccagcacctgatctgcgggaagaacgccagcggtgacctggtgtcccgtgcaatgcatcacctgcagcccctcaatgccaaaggcccttcctcgtgctgccgccgctgatggagtggatccgggtggccgtggcgcacgccggccaccgccgcagcttctccatggacagcgacgacgtccgccaggcggcccggctgctgctgcccggcgtggactgcgagccgcgccagctcagggccgacgactgcttttgtgcatctcgaaagctggatgcggtggccatcgaagccaagtttaagcaggacctgggtttccggatgctgaactgtggacgaacagacctggtgaagcaggcagtgtctctgc

SEQ ID NO: 292979 - DNA, 286 bp, Homo sapiens
ccggcagccgccgccaaccaccaccatcaccaccaccatgcgctccacgaggcgcccaagttcaccgtggagaccctggagcacacggtcaacaacgactcggagatctggggtctcctgcagccctaccagcacctgatctgcgggaagaacgccagcggtaagtgtctgcgcgggtgccactccctctcacctaacctggccaactcttggcgcaagtttgcctcgcgtccccctcccgcgtcttcccagccacgcgctgctgtcccaagccgctgaggaggcg

SEQ ID NO: 292980 - DNA, 276 bp, Homo sapiens
gaaaataaaggaggagctgcgagggaggaagaaaaaaaaggtcaccagaggaagggaggtggtgaaaaggtgcacagggaagttgagtctgttcctggccttgccactgatgtgtgtgaccctggacagtggcagcaattcctttcatgtctccaggcctcagctttctcactcaatccatatgtttccatgggcaaggaaatagaaggcagtgttgaccttggttactgtttctgtgatccagctctaaagctttcctgttcttgtggtgtgagt

SEQ ID NO: 292981 - DNA, 4049 bp, Homo sapiens
  misc_feature (1296)..(1296): n is a, c, g, or t
ggagaccgcagctttaaagggggaaaatgcagacgttggataaaaacagcaagaaatagtcattttcattaataggtctcaaacagtttacgaaacagccattattatctaagcttcatacacatcctttctgcagacccctctcttcagtattactcccaaaggagacttggggggactcttcgatcgcgacctggatttggattccctcttggacactgggggaggactcctggaccgagaccgggacctggaccgcgaacgagatctggagaccgacgaggacttggacttggaccttcgtgcggatctggacttggaggtcgaccgagatcgagaacgagtgcgggaccgagacttcgagcggctgtagcgagatcggctgcgagacctggaacggctccgactccgggatcggctgcggcgacgccgcctagggctgcgggcgggacgagcaagcacagcggggttaattccaggcagcggggccggccccgcccgcgcgctcccgcccaggccgccattatctcgccgccagacgccatttccccagtcgcgaggcggggtcctccgccccgcgccgcccacaccccggccactcccgggtcgcagacggcggaagctcgcggggtggccggagggtcgcgagacgcggcgtgcacccccgccccgtccgggcccgcaccacgtgcttcgccgcggacctttgtgaggtcgcccgggcctcccgcgcgccccgccccgcctcccgcggtcccctcagccccgtttacctgcggctccggcgtccgtagccaccgcccccgtacctgcggggtggcggtccccggcggctgtggtgtgagtccggggggcggccgtagcgcgccatttgcacccgcagctcgcggccgtccagcacggccccgtccatggcatccatagcgtcctcagcgtcgcgcttgtcgtgaaagcgaacgaaggcgaagccgcgggactccttggtgtagcgatcccgcgggatgtacacgtcgccgacgcgcccgtacttctcgaagacgcgcctcagcgtgtcgggcgaggtgcggtaggtcaggttgtccaccttgagggaggtcataccctccacatcgggaggggggcggccgtagctcatagctctgagtggcggcccggagccccgcgaactggcgccggcttcctcagctctgggcggtgcgacgccgcgcctctcaggcagttgccttccgcgtggggacactgggaaaggccttgccgcagaacagcacggacgggctccgcaggctagcgcacctnagtaacaactgggcgggcagccggcctctgcgcccgtttatatcgctcctcacaaaatggcgcccgcgccacccggaaatgaaaccttctgattggcccaccgcgccccgcttcgtaacgaccctgccgcgcgccccgcccctacccgaagcgcctgcgcacagcccggcgggcgggccaaaaagcgcggagtcacggctggagggagggggagcggaattagcgggcagttggaaagcccgcgaaacgctttttccgcctgggaggccggacgatcgcgattgggcaggaggaagaggaggtgctccccatctgggcccccacctttttttcatgccaatactccaagttcacgccccttttttgctcagccgtcagccccgtctccgtctgaagagtgcttctgccctcatttgcctctccctgtgaccccggccccctcagactccgctgcgtcgtctctcggccccgtccagccgttcctgactgctcttcgccggagtccgcttcccaaccccctttcgccagagcccgagagctccgtcggctctgcgtcctggcggtggggactccccgccgagcgcttgcgcgtgccaggtcacccgggactacgtttcccagcgggccgagcggccggcgccgcggctgcggtcaggtgacccggtcgcctggccgcagtgagtcaggctgggagggcggggccgcgccggctgctgcggctggcacttggccctttaatccccttcgtgggcccctcaacctggagcggataaattcttggcgcttctccgggggttgtgctcttccgtactcggatcgcttcttaggagtatcctaactgccggtggggagaacttcgccctaaacctggggttccgatccaggaactggaagttgacagcttggctgcctggctcctacatctgccttctccactcaccatctcatttctttctccaggattgtcagtggcttcgccccgaggagagctgactgccctgggctgctgcctccggcagagctgagccaaaatgtccccggaatctaaaaagcttttcaacatcattattttaggagttgcctttatgtttatgttcactgcctttcaaacttgtggaaatgtggcgcaaactgtcatcaggagcttaaataggacagattttcacggcagtggatataccagcatggctattatctatggagtgttctctgcttcaaatttgattacaccgtcagtggttgccattgtaggacctcaactctctatgtttgccagtggtttattttacagcatgtacattgccgttttcatccagcctttcccgtggtccttctacacagcctctgttttcattggaattgctgctgctgtgctttggacagcacaaggaaactgcctgacaatcaattcggatgagcacagcattgggagaaacagtgggattttctgggcacttctgcagtctagcttgttctttggaaatctctacatatattttgcctggcaagggaaaactcagatatcagagagtgaccgaagaacagtgtttattgccctaacggtgattagccttgtggggacagttctattctttctcattcggaaaccagattctgaaaatgtcctaggagaagatgagtcttctgatgaccaggacatggaagtcaacgagtctgcccagaacaatctgacaaaggcagtagatgcttttaaaaagtcttttaagttatgtgtcaccaaggagatgctccttcttagtattacaactgcttatacaggtctggaattaactttcttctctggtgtatatggaacctgtattggtgctacaaataaatttggagcagaagagaaaagccttattggactttctggcagtttcatcggcattggagaaattttaggtggaagcctcttcggcctgctgagcaagaacaatcgttttggtagaaatccagttgtgctgttgggcatcctggtgcacttcatagctttttatctaatatttctcaacatgcctggagatgccccgattgctcctgttaaaggaactgacagcagtgcttacatcaaatccagcaaagaagttgccattctctgcagttttctgttgggccttggagacagctgctttaatacccagctgcttagtatcttgggctttctgtattctgaagacagcgccccagcatttgccatcttcaagtttgttcagtctatttgcgcagccgtggcatttttctacagcaactaccttctccttcactggcaactcctggtcatggtgatatttgggttttttggaacaatttctttcttcactgtggaatgggaagctgccgcctttgtagcccgcggctctgactaccgaagtatctgatctggtgtccgtgaggggacacgtatgacctcagaaacacagctggacacagagcttggtggaagaagtcgcctttgatcttcactatatattgggtgatgttcagtatggaaaatcaagggattaagactgttaaatcagccagagttggtgttcaagtttacagatatgagttatttaaagcaagtagaataagggaaagctgttctgtcaactgtaattgttcaaagatgttgtttttcatttcatctatctcaattcttataatcatgttatagaatgtaaatgttttcttctctctcctgctcttgttggaagatcctgccttgatttagaatactaggccatatgtcatataaatattttttctgg

SEQ ID NO: 292982 - DNA, 2859 bp, Homo sapiens
ggagaccgcagctttaaagggggaaaatgcagacgttggataaaaacagcaagaaatagtcattttcattaataggtctcaaacagtttacgaaacagccattattatctaagcttcatacacatcctttctgcagacccctctcttcagtattactcccaaaggagacttggggggactcttcgatcgcgacctggatttggattccctcttggacactgggggaggactcctggaccgagaccgggacctggaccgcgaacgagatctggagaccgacgaggacttggacttggaccttcgtgcggatctggacttggaggtcgaccgagatcgagaacgagtgcgggaccgagacttcgagcggctgtagcgagatcggctgcgagacctggaacggctccgactccgggatcggctgcggcgacgccgcctagggctgcgggcgggacgagcaagcacagcggggttaattccaggcagcggggccggccccgcccgcgcgctcccgcccaggccgccattatctcgccgccagacgccatttccccagtcgcgaggcggggtcctccgccccgcgccgcccacaccccggccactcccgggtcgcagacggcggaagctcgcggggtggccggagggtcgcgagacgcggcgtgcacccccgccccgtccgggcccgcaccacgtgcttcgccgcggacctttgtgaggtcgcccgggcctcccgcgcgccccgccccgcctcccgcggtcccctcagccccgtttacctgcggctccggcgtccgtagccaccgcccccgtacctgcggggtggcggtccccggcggctgtggtgtgagtccggggggcggccgtagcgcgccatttgcacccgcagctcgcggccgtccagcacggccccgtccatggcatccatagcgtcctcagcgtcgcgcttgtcgtgaaagcgaacgaaggcgaagccgcgggactccttggtgtagcgatcccgcgggatgtacacgtcgccgacgcgcccgtacttctcgaagacgcgcctcagcgtgtcgggcgaggtgcggattgtcagtggcttcgccccgaggagagctgactgccctgggctgctgcctccggcagagctgagccaaaatgtccccggaatctaaaaagcttttcaacatcattattttaggagttgcctttatgtttatgttcactgcctttcaaacttgtggaaatgtggcgcaaactgtcatcaggagcttaaataggacagattttcacggcagtggatataccagcatggctattatctatggagtgttctctgcttcaaatttgattacaccgtcagtggttgccattgtaggacctcaactctctatgtttgccagtggtttattttacagcatgtacattgccgttttcatccagcctttcccgtggtccttctacacagcctctgttttcattggaattgctgctgctgtgctttggacagcacaaggaaactgcctgacaatcaattcggatgagcacagcattgggagaaacagtgggattttctgggcacttctgcagtctagcttgttctttggaaatctctacatatattttgcctggcaagggaaaactcagatatcagagagtgaccgaagaacagtgtttattgccctaacggtgattagccttgtggggacagttctattctttctcattcggaaaccagattctgaaaatgtcctaggagaagatgagtcttctgatgaccaggacatggaagtcaacgagtctgcccagaacaatctgacaaaggcagtagatgcttttaaaaagtcttttaagttatgtgtcaccaaggagatgctccttcttagtattacaactgcttatacaggtctggaattaactttcttctctggtgtatatggaacctgtattggtgctacaaataaatttggagcagaagagaaaagccttattggactttctggcagtttcatcggcattggagaaattttaggtggaagcctcttcggcctgctgagcaagaacaatcgttttggtagaaatccagttgtgctgttgggcatcctggtgcacttcatagctttttatctaatatttctcaacatgcctggagatgccccgattgctcctgttaaaggaactgacagcagtgcttacatcaaatccagcaaagaagttgccattctctgcagttttctgttgggccttggagacagctgctttaatacccagctgcttagtatcttgggctttctgtattctgaagacagcgccccagcatttgccatcttcaagtttgttcagtctatttgcgcagccgtggcatttttctacagcaactaccttctccttcactggcaactcctggtcatggtgatatttgggttttttggaacaatttctttcttcactgtggaatgggaagctgccgcctttgtagcccgcggctctgactaccgaagtatctgatctggtgtccgtgaggggacacgtatgacctcagaaacacagctggacacagagcttggtggaagaagtcgcctttgatcttcactatatattgggtgatgttcagtatggaaaatcaagggattaagactgttaaatcagccagagttggtgttcaagtttacagatatgagttatttaaagcaagtagaataagggaaagctgttctgtcaactgtaattgttcaaagatgttgtttttcatttcatctatctcaattcttataatcatgttatagaatgtaaatgttttcttctctctcctgctcttgttggaagatcctgccttgatttagaatactaggccatatgtcatataaatattttttctgg

SEQ ID NO: 292983 - DNA, 4181 bp, Homo sapiens
  misc_feature (1296)..(1296): n is a, c, g, or t
ggagaccgcagctttaaagggggaaaatgcagacgttggataaaaacagcaagaaatagtcattttcattaataggtctcaaacagtttacgaaacagccattattatctaagcttcatacacatcctttctgcagacccctctcttcagtattactcccaaaggagacttggggggactcttcgatcgcgacctggatttggattccctcttggacactgggggaggactcctggaccgagaccgggacctggaccgcgaacgagatctggagaccgacgaggacttggacttggaccttcgtgcggatctggacttggaggtcgaccgagatcgagaacgagtgcgggaccgagacttcgagcggctgtagcgagatcggctgcgagacctggaacggctccgactccgggatcggctgcggcgacgccgcctagggctgcgggcgggacgagcaagcacagcggggttaattccaggcagcggggccggccccgcccgcgcgctcccgcccaggccgccattatctcgccgccagacgccatttccccagtcgcgaggcggggtcctccgccccgcgccgcccacaccccggccactcccgggtcgcagacggcggaagctcgcggggtggccggagggtcgcgagacgcggcgtgcacccccgccccgtccgggcccgcaccacgtgcttcgccgcggacctttgtgaggtcgcccgggcctcccgcgcgccccgccccgcctcccgcggtcccctcagccccgtttacctgcggctccggcgtccgtagccaccgcccccgtacctgcggggtggcggtccccggcggctgtggtgtgagtccggggggcggccgtagcgcgccatttgcacccgcagctcgcggccgtccagcacggccccgtccatggcatccatagcgtcctcagcgtcgcgcttgtcgtgaaagcgaacgaaggcgaagccgcgggactccttggtgtagcgatcccgcgggatgtacacgtcgccgacgcgcccgtacttctcgaagacgcgcctcagcgtgtcgggcgaggtgcggtaggtcaggttgtccaccttgagggaggtcataccctccacatcgggaggggggcggccgtagctcatagctctgagtggcggcccggagccccgcgaactggcgccggcttcctcagctctgggcggtgcgacgccgcgcctctcaggcagttgccttccgcgtggggacactgggaaaggccttgccgcagaacagcacggacgggctccgcaggctagcgcacctnagtaacaactgggcgggcagccggcctctgcgcccgtttatatcgctcctcacaaaatggcgcccgcgccacccggaaatgaaaccttctgattggcccaccgcgccccgcttcgtaacgaccctgccgcgcgccccgcccctacccgaagcgcctgcgcacagcccggcgggcgggccaaaaagcgcggagtcacggctggagggagggggagcggaattagcgggcagttggaaagcccgcgaaacgctttttccgcctgggaggccggacgatcgcgattgggcaggaggaagaggaggtgctccccatctgggcccccacctttttttcatgccaatactccaagttcacgccccttttttgctcagccgtcagccccgtctccgtctgaagagtgcttctgccctcatttgcctctccctgtgaccccggccccctcagactccgctgcgtcgtctctcggccccgtccagccgttcctgactgctcttcgccggagtccgcttcccaaccccctttcgccagagcccgagagctccgtcggctctgcgtcctggcggattgtcagtggcttcgccccgaggagagctgactgccctgggctgctgcctccggcagagctgagccaaaatgtccccggaatctaaaaagcttttcaacatcattattttaggagttgcctttatgtttatgttcactgcctttcaaacttgtggaaatgtggcgcaaactgtcatcaggagcttaaataggacagattttcacggcagtggatataccagcatggctattatctatggagtgttctctgcttcaaatttgattacaccgtcagtggttgccattgtaggacctcaactctctatgtttgccagtggtttattttacagcatgtacattgccgttttcatccagcctttcccgtggtccttctacacagcctctgttttcattggaattgctgctgctgtgctttggacagcacaaggaaactgcctgacaatcaattcggatgagcacagcattgggagaaacagtgggattttctgggcacttctgcagtctagcttgttctttggaaatctctacatatattttgcctggcaagggaaaactcagatatcagagagtgaccgaagaacagtgtttattgccctaacggtgattagccttgtggggacagttctattctttctcattcggaaaccagattctgaaaatgtcctaggagaagatgagtcttctgatgaccaggacatggaagtcaacgagtctgcccagaacaatctgacaaaggcagtagatgcttttaaaaagtcttttaagttatgtgtcaccaaggagatgctccttcttagtattacaactgcttatacaggtctggaattaactttcttctctggtgtatatggaacctgtattggtgctacaaataaatttggagcagaagagaaaagccttattggactttctggcagtttcatcggcattggagaaattttaggtggaagcctcttcggcctgctgagcaagaacaatcgttttggtagaaatccagttgtgctgttgggcatcctggtgcacttcatagctttttatctaatatttctcaacatgcctggagatgccccgattgctcctgttaaaggaactgacagcagtgcttacatcaaatccagcaaagaagttgccattctctgcagttttctgttgggccttggagacagctgctttaatacccagctgcttagtatcttgggctttctgtattctgaagacagcgccccagcatttgccatcttcaagtttgttcagtctatttgcgcagccgtggcatttttctacagcaactaccttctccttcactggcaactcctggtcatggtgatatttgggttttttggaacaatttctttcttcactgtggaatgggaagctgccgcctttgtagcccgcggctctgactaccgaagtatctgatctggtgtccgtgaggggacacgtatgacctcagaaacacagctggacacagagcttggtggaagaagtcgcctttgatcttcactatatattgggtgatgttcagtatggaaaatcaagggattaagactgttaaatcagccagagttggtgttcaagtttacagatatgagttatttaaagcaagtagaataagggaaagctgttctgtcaactgtaattgttcaaagatgttgtttttcatttcatctatctcaattcttataatcatgttatagaatgtaaatgttttcttctctctcctgctcttgttggaagatcctgccttgatttagaatactaggccatatgtcatataaatattttttctggatatggagtatgttttgctatgtaataatgggaagcatatgtcattccccatatgtgttggagaatgacatttaaataaatagcaaagctgggtgtggtgttgcaccgctatactcccagctgttggggaggctgagacggaaggatcgcttcagcccgggagattgaggctgcggtgagctatgatcgcgccactgcactccaggctgggcaacggagtgagaccctgtcttgaaaataataataggctggtcacggtggctcatgcctgtggtcccagcactttgggaggctgaggtgggtggatcgcctgaggtcgggggtttgagaccggcctggccagcgtggtgaagcctcatctctgctgagaatgcagagatgtgttgggtttggtggtgcatgcctgtgatcctagctgctggggaggctgaggtaggagaattcgcttgagcctgggaggcggaggttgcagtgagccgagatcgtgccattgcactccagcctggatgacaagagtgaaactccatctc

SEQ ID NO: 292984 - DNA, 3933 bp, Homo sapiens
  misc_feature (1296)..(1296): n is a, c, g, or t
ggagaccgcagctttaaagggggaaaatgcagacgttggataaaaacagcaagaaatagtcattttcattaataggtctcaaacagtttacgaaacagccattattatctaagcttcatacacatcctttctgcagacccctctcttcagtattactcccaaaggagacttggggggactcttcgatcgcgacctggatttggattccctcttggacactgggggaggactcctggaccgagaccgggacctggaccgcgaacgagatctggagaccgacgaggacttggacttggaccttcgtgcggatctggacttggaggtcgaccgagatcgagaacgagtgcgggaccgagacttcgagcggctgtagcgagatcggctgcgagacctggaacggctccgactccgggatcggctgcggcgacgccgcctagggctgcgggcgggacgagcaagcacagcggggttaattccaggcagcggggccggccccgcccgcgcgctcccgcccaggccgccattatctcgccgccagacgccatttccccagtcgcgaggcggggtcctccgccccgcgccgcccacaccccggccactcccgggtcgcagacggcggaagctcgcggggtggccggagggtcgcgagacgcggcgtgcacccccgccccgtccgggcccgcaccacgtgcttcgccgcggacctttgtgaggtcgcccgggcctcccgcgcgccccgccccgcctcccgcggtcccctcagccccgtttacctgcggctccggcgtccgtagccaccgcccccgtacctgcggggtggcggtccccggcggctgtggtgtgagtccggggggcggccgtagcgcgccatttgcacccgcagctcgcggccgtccagcacggccccgtccatggcatccatagcgtcctcagcgtcgcgcttgtcgtgaaagcgaacgaaggcgaagccgcgggactccttggtgtagcgatcccgcgggatgtacacgtcgccgacgcgcccgtacttctcgaagacgcgcctcagcgtgtcgggcgaggtgcggtaggtcaggttgtccaccttgagggaggtcataccctccacatcgggaggggggcggccgtagctcatagctctgagtggcggcccggagccccgcgaactggcgccggcttcctcagctctgggcggtgcgacgccgcgcctctcaggcagttgccttccgcgtggggacactgggaaaggccttgccgcagaacagcacggacgggctccgcaggctagcgcacctnagtaacaactgggcgggcagccggcctctgcgcccgtttatatcgctcctcacaaaatggcgcccgcgccacccggaaatgaaaccttctgattggcccaccgcgccccgcttcgtaacgaccctgccgcgcgccccgcccctacccgaagcgcctgcgcacagcccggcgggcgggccaaaaagcgcggagtcacggctggagggagggggagcggaattagcgggcagttggaaagcccgcgaaacgctttttccgcctgggaggccggacgatcgcgattgggcaggaggaagaggaggtgctccccatctgggcccccacctttttttcatgccaatactccaagttcacgccccttttttgctcagccgtcagccccgtctccgtctgaagagtgcttctgccctcatttgcctctccctgtgaccccggccccctcagactccgctgcgtcgtctctcggccccgtccagccgttcctgactgctcttcgccggagtccgcttcccaaccccctttcgccagagcccgagagctccgtcggctctgcgtcctggcggtggggactccccgccgagcgcttgcgcgtgccaggtcacccgggactacgtttcccagcgggccgagcggccggcgccgcggctgcggtcaggtgacccggtcgcctggccgcagtgagtcaggctgggagggcggggccgcgccggctgctgcggctggcacttggccctttaatccccttcgtgggcccctcaacctggagcggataaattcttggcgcttctccgggggttgtgctcttccgtactcggatcgcttcttaggagtatcctaactgccggattgtcagtggcttcgccccgaggagagctgactgccctgggctgctgcctccggcagagctgagccaaaatgtccccggaatctaaaaagcttttcaacatcattattttaggagttgcctttatgtttatgttcactgcctttcaaacttgtggaaatgtggcgcaaactgtcatcaggagcttaaataggacagattttcacggcagtggatataccagcatggctattatctatggagtgttctctgcttcaaatttgattacaccgtcagtggttgccattgtaggacctcaactctctatgtttgccagtggtttattttacagcatgtacattgccgttttcatccagcctttcccgtggtccttctacacagcctctgttttcattggaattgctgctgctgtgctttggacagcacaaggaaactgcctgacaatcaattcggatgagcacagcattgggagaaacagtgggattttctgggcacttctgcagtctagcttgttctttggaaatctctacatatattttgcctggcaagggaaaactcagatatcagagagtgaccgaagaacagtgtttattgccctaacggtgattagccttgtggggacagttctattctttctcattcggaaaccagattctgaaaatgtcctaggagaagatgagtcttctgatgaccaggacatggaagtcaacgagtctgcccagaacaatctgacaaaggcagtagatgcttttaaaaagtcttttaagttatgtgtcaccaaggagatgctccttcttagtattacaactgcttatacaggtctggaattaactttcttctctggtgtatatggaacctgtattggtgctacaaataaatttggagcagaagagaaaagccttattggactttctggcagtttcatcggcattggagaaattttaggtggaagcctcttcggcctgctgagcaagaacaatcgttttggtagaaatccagttgtgctgttgggcatcctggtgcacttcatagctttttatctaatatttctcaacatgcctggagatgccccgattgctcctgttaaaggaactgacagcagtgcttacatcaaatccagcaaagaagttgccattctctgcagttttctgttgggccttggagacagctgctttaatacccagctgcttagtatcttgggctttctgtattctgaagacagcgccccagcatttgccatcttcaagtttgttcagtctatttgcgcagccgtggcatttttctacagcaactaccttctccttcactggcaactcctggtcatggtgatatttgggttttttggaacaatttctttcttcactgtggaatgggaagctgccgcctttgtagcccgcggctctgactaccgaagtatctgatctggtgtccgtgaggggacacgtatgacctcagaaacacagctggacacagagcttggtggaagaagtcgcctttgatcttcactatatattgggtgatgttcagtatggaaaatcaagggattaagactgttaaatcagccagagttggtgttcaagtttacagatatgagttatttaaagcaagtagaataagggaaagctgttctgtcaactgtaattgttcaaagatgttgtttttcatttcatctatctcaattcttataatcatgttatagaatgtaaatgttttcttctctctcctgctcttgttggaagatcctgccttgatttagaatactaggccatatgtcatataaatattttttctgg

SEQ ID NO: 292985 - DNA, 3686 bp, Homo sapiens
  misc_feature (1296)..(1296): n is a, c, g, or t
ggagaccgcagctttaaagggggaaaatgcagacgttggataaaaacagcaagaaatagtcattttcattaataggtctcaaacagtttacgaaacagccattattatctaagcttcatacacatcctttctgcagacccctctcttcagtattactcccaaaggagacttggggggactcttcgatcgcgacctggatttggattccctcttggacactgggggaggactcctggaccgagaccgggacctggaccgcgaacgagatctggagaccgacgaggacttggacttggaccttcgtgcggatctggacttggaggtcgaccgagatcgagaacgagtgcgggaccgagacttcgagcggctgtagcgagatcggctgcgagacctggaacggctccgactccgggatcggctgcggcgacgccgcctagggctgcgggcgggacgagcaagcacagcggggttaattccaggcagcggggccggccccgcccgcgcgctcccgcccaggccgccattatctcgccgccagacgccatttccccagtcgcgaggcggggtcctccgccccgcgccgcccacaccccggccactcccgggtcgcagacggcggaagctcgcggggtggccggagggtcgcgagacgcggcgtgcacccccgccccgtccgggcccgcaccacgtgcttcgccgcggacctttgtgaggtcgcccgggcctcccgcgcgccccgccccgcctcccgcggtcccctcagccccgtttacctgcggctccggcgtccgtagccaccgcccccgtacctgcggggtggcggtccccggcggctgtggtgtgagtccggggggcggccgtagcgcgccatttgcacccgcagctcgcggccgtccagcacggccccgtccatggcatccatagcgtcctcagcgtcgcgcttgtcgtgaaagcgaacgaaggcgaagccgcgggactccttggtgtagcgatcccgcgggatgtacacgtcgccgacgcgcccgtacttctcgaagacgcgcctcagcgtgtcgggcgaggtgcggtaggtcaggttgtccaccttgagggaggtcataccctccacatcgggaggggggcggccgtagctcatagctctgagtggcggcccggagccccgcgaactggcgccggcttcctcagctctgggcggtgcgacgccgcgcctctcaggcagttgccttccgcgtggggacactgggaaaggccttgccgcagaacagcacggacgggctccgcaggctagcgcacctnagtaacaactgggcgggcagccggcctctgcgcccgtttatatcgctcctcacaaaatggcgcccgcgccacccggaaatgaaaccttctgattggcccaccgcgccccgcttcgtaacgaccctgccgcgcgccccgcccctacccgaagcgcctgcgcacagcccggcgggcgggccaaaaagcgcggagtcacggctggagggagggggagcggaattagcgggcagttggaaagcccgcgaaacgctttttccgcctgggaggccggacgatcgcgattgggcaggaggaagaggaggtgctccccatctgggcccccacctttttttcatgccaatactccaagttcacgccccttttttgctcagccgtcagccccgtctccgtctgaagagtgcttctgccctcatttgcctctccctgtgaccccggccccctcagactccgctgcgtcgtctctcggccccgtccagccgttcctgactgctcttcgccggagtccgcttcccaaccccctttcgccagagcccgagagctccgtcggctctgcgtcctggcggtggggactccccgccgagcgcttgcgcgtgccaggattgtcagtggcttcgccccgaggagagctgactgccctgggctgctgcctccggcagagctgagccaaaatgtccccggaatctaaaaagcttttcaacatcattattttaggagttgcctttatgtttatgttcactgcctttcaaacttgtggaaatgtggcgcaaactgtcatcaggagcttaaataggacagattttcacggcagtggatataccagcatggctattatctatggagtgttctctgcttcaaatttgattacaccgtcagtggttgccattgtaggacctcaactctctatgtttgccagtggtttattttacagcatgtacattgccgttttcatccagcctttcccgtggtccttctacacagcctctgttttcattggaattgctgctgctgtgctttggacagcacaaggaaactgcctgacaatcaattcggatgagcacagcattgggagaaacagtgggattttctgggcacttctgcagtctagcttgttctttggaaatctctacatatattttgcctggcaagggaaaactcagatatcagagagtgaccgaagaacagtgtttattgccctaacggtgattagccttgtggggacagttctattctttctcattcggaaaccagattctgaaaatgtcctaggagaagatgagtcttctgatgaccaggacatggaagtcaacgagtctgcccagaacaatctgacaaaggcagtagatgcttttaaaaagtcttttaagttatgtgtcaccaaggagatgctccttcttagtattacaactgcttatacaggtctggaattaactttcttctctggtgtatatggaacctgtattggtgctacaaataaatttggagcagaagagaaaagccttattggactttctggcagtttcatcggcattggagaaattttaggtggaagcctcttcggcctgctgagcaagaacaatcgttttggtagaaatccagttgtgctgttgggcatcctggtgcacttcatagctttttatctaatatttctcaacatgcctggagatgccccgattgctcctgttaaaggaactgacagcagtgcttacatcaaatccagcaaagaagttgccattctctgcagttttctgttgggccttggagacagctgctttaatacccagctgcttagtatcttgggctttctgtattctgaagacagcgccccagcatttgccatcttcaagtttgttcagtctatttgcgcagccgtggcatttttctacagcaactaccttctccttcactggcaactcctggtcatggtgatatttgggttttttggaacaatttctttcttcactgtggaatgggaagctgccgcctttgtagcccgcggctctgactaccgaagtatctgatctggtgtccgtgaggggacacgtatgacctcagaaacacagctggacacagagcttggtggaagaagtcgcctttgatcttcactatatattgggtgatgttcagtatggaaaatcaagggattaagactgttaaatcagccagagttggtgttcaagtttacagatatgagttatttaaagcaagtagaataagggaaagctgttctgtcaactgtaattgttcaaagatgttgtttttcatttcatctatctcaattcttataatcatgttatagaatgtaaatgttttcttctctctcctgctcttgttggaagatcctgccttgatttagaatactaggccatatgtcatataaatattttttctgg

SEQ ID NO: 292986 - DNA, 3744 bp, Homo sapiens
  misc_feature (1296)..(1296): n is a, c, g, or t
ggagaccgcagctttaaagggggaaaatgcagacgttggataaaaacagcaagaaatagtcattttcattaataggtctcaaacagtttacgaaacagccattattatctaagcttcatacacatcctttctgcagacccctctcttcagtattactcccaaaggagacttggggggactcttcgatcgcgacctggatttggattccctcttggacactgggggaggactcctggaccgagaccgggacctggaccgcgaacgagatctggagaccgacgaggacttggacttggaccttcgtgcggatctggacttggaggtcgaccgagatcgagaacgagtgcgggaccgagacttcgagcggctgtagcgagatcggctgcgagacctggaacggctccgactccgggatcggctgcggcgacgccgcctagggctgcgggcgggacgagcaagcacagcggggttaattccaggcagcggggccggccccgcccgcgcgctcccgcccaggccgccattatctcgccgccagacgccatttccccagtcgcgaggcggggtcctccgccccgcgccgcccacaccccggccactcccgggtcgcagacggcggaagctcgcggggtggccggagggtcgcgagacgcggcgtgcacccccgccccgtccgggcccgcaccacgtgcttcgccgcggacctttgtgaggtcgcccgggcctcccgcgcgccccgccccgcctcccgcggtcccctcagccccgtttacctgcggctccggcgtccgtagccaccgcccccgtacctgcggggtggcggtccccggcggctgtggtgtgagtccggggggcggccgtagcgcgccatttgcacccgcagctcgcggccgtccagcacggccccgtccatggcatccatagcgtcctcagcgtcgcgcttgtcgtgaaagcgaacgaaggcgaagccgcgggactccttggtgtagcgatcccgcgggatgtacacgtcgccgacgcgcccgtacttctcgaagacgcgcctcagcgtgtcgggcgaggtgcggtaggtcaggttgtccaccttgagggaggtcataccctccacatcgggaggggggcggccgtagctcatagctctgagtggcggcccggagccccgcgaactggcgccggcttcctcagctctgggcggtgcgacgccgcgcctctcaggcagttgccttccgcgtggggacactgggaaaggccttgccgcagaacagcacggacgggctccgcaggctagcgcacctnagtaacaactgggcgggcagccggcctctgcgcccgtttatatcgctcctcacaaaatggcgcccgcgccacccggaaatgaaaccttctgattggcccaccgcgccccgcttcgtaacgaccctgccgcgcgccccgcccctacccgaagcgcctgcgcacagcccggcgggcgggccaaaaagcgcggagtcacggctggagggagggggagcggaattagcgggcagttggaaagcccgcgaaacgctttttccgcctgggaggccggacgatcgcgattgggcaggaggaagaggaggtgctccccatctgggcccccacctttttttcatgccaatactccaagttcacgccccttttttgctcagccgtcagccccgtctccgtctgaagagtgcttctgccctcatttgcctctccctgtgaccccggccccctcagactccgctgcgtcgtctctcggccccgtccagccgttcctgactgctcttcgccggagtccgcttcccaaccccctttcgccagagcccgagagctccgtcggctctgcgtcctggcggtggggactccccgccgagcgcttgcgcgtgccaggtcacccgggactacgtttcccagcgggccgagcggccggcgccgcggctgcggtcaggattgtcagtggcttcgccccgaggagagctgactgccctgggctgctgcctccggcagagctgagccaaaatgtccccggaatctaaaaagcttttcaacatcattattttaggagttgcctttatgtttatgttcactgcctttcaaacttgtggaaatgtggcgcaaactgtcatcaggagcttaaataggacagattttcacggcagtggatataccagcatggctattatctatggagtgttctctgcttcaaatttgattacaccgtcagtggttgccattgtaggacctcaactctctatgtttgccagtggtttattttacagcatgtacattgccgttttcatccagcctttcccgtggtccttctacacagcctctgttttcattggaattgctgctgctgtgctttggacagcacaaggaaactgcctgacaatcaattcggatgagcacagcattgggagaaacagtgggattttctgggcacttctgcagtctagcttgttctttggaaatctctacatatattttgcctggcaagggaaaactcagatatcagagagtgaccgaagaacagtgtttattgccctaacggtgattagccttgtggggacagttctattctttctcattcggaaaccagattctgaaaatgtcctaggagaagatgagtcttctgatgaccaggacatggaagtcaacgagtctgcccagaacaatctgacaaaggcagtagatgcttttaaaaagtcttttaagttatgtgtcaccaaggagatgctccttcttagtattacaactgcttatacaggtctggaattaactttcttctctggtgtatatggaacctgtattggtgctacaaataaatttggagcagaagagaaaagccttattggactttctggcagtttcatcggcattggagaaattttaggtggaagcctcttcggcctgctgagcaagaacaatcgttttggtagaaatccagttgtgctgttgggcatcctggtgcacttcatagctttttatctaatatttctcaacatgcctggagatgccccgattgctcctgttaaaggaactgacagcagtgcttacatcaaatccagcaaagaagttgccattctctgcagttttctgttgggccttggagacagctgctttaatacccagctgcttagtatcttgggctttctgtattctgaagacagcgccccagcatttgccatcttcaagtttgttcagtctatttgcgcagccgtggcatttttctacagcaactaccttctccttcactggcaactcctggtcatggtgatatttgggttttttggaacaatttctttcttcactgtggaatgggaagctgccgcctttgtagcccgcggctctgactaccgaagtatctgatctggtgtccgtgaggggacacgtatgacctcagaaacacagctggacacagagcttggtggaagaagtcgcctttgatcttcactatatattgggtgatgttcagtatggaaaatcaagggattaagactgttaaatcagccagagttggtgttcaagtttacagatatgagttatttaaagcaagtagaataagggaaagctgttctgtcaactgtaattgttcaaagatgttgtttttcatttcatctatctcaattcttataatcatgttatagaatgtaaatgttttcttctctctcctgctcttgttggaagatcctgccttgatttagaatactaggccatatgtcatataaatattttttctgg

SEQ ID NO: 292987 - DNA, 4533 bp, Homo sapiens
  misc_feature (1296)..(1296): n is a, c, g, or t
ggagaccgcagctttaaagggggaaaatgcagacgttggataaaaacagcaagaaatagtcattttcattaataggtctcaaacagtttacgaaacagccattattatctaagcttcatacacatcctttctgcagacccctctcttcagtattactcccaaaggagacttggggggactcttcgatcgcgacctggatttggattccctcttggacactgggggaggactcctggaccgagaccgggacctggaccgcgaacgagatctggagaccgacgaggacttggacttggaccttcgtgcggatctggacttggaggtcgaccgagatcgagaacgagtgcgggaccgagacttcgagcggctgtagcgagatcggctgcgagacctggaacggctccgactccgggatcggctgcggcgacgccgcctagggctgcgggcgggacgagcaagcacagcggggttaattccaggcagcggggccggccccgcccgcgcgctcccgcccaggccgccattatctcgccgccagacgccatttccccagtcgcgaggcggggtcctccgccccgcgccgcccacaccccggccactcccgggtcgcagacggcggaagctcgcggggtggccggagggtcgcgagacgcggcgtgcacccccgccccgtccgggcccgcaccacgtgcttcgccgcggacctttgtgaggtcgcccgggcctcccgcgcgccccgccccgcctcccgcggtcccctcagccccgtttacctgcggctccggcgtccgtagccaccgcccccgtacctgcggggtggcggtccccggcggctgtggtgtgagtccggggggcggccgtagcgcgccatttgcacccgcagctcgcggccgtccagcacggccccgtccatggcatccatagcgtcctcagcgtcgcgcttgtcgtgaaagcgaacgaaggcgaagccgcgggactccttggtgtagcgatcccgcgggatgtacacgtcgccgacgcgcccgtacttctcgaagacgcgcctcagcgtgtcgggcgaggtgcggtaggtcaggttgtccaccttgagggaggtcataccctccacatcgggaggggggcggccgtagctcatagctctgagtggcggcccggagccccgcgaactggcgccggcttcctcagctctgggcggtgcgacgccgcgcctctcaggcagttgccttccgcgtggggacactgggaaaggccttgccgcagaacagcacggacgggctccgcaggctagcgcacctnagtaacaactgggcgggcagccggcctctgcgcccgtttatatcgctcctcacaaaatggcgcccgcgccacccggaaatgaaaccttctgattggcccaccgcgccccgcttcgtaacgaccctgccgcgcgccccgcccctacccgaagcgcctgcgcacagcccggcgggcgggccaaaaagcgcggagtcacggctggagggagggggagcggaattagcgggcagttggaaagcccgcgaaacgctttttccgcctgggaggccggacgatcgcgattgggcaggaggaagaggaggtgctccccatctgggcccccacctttttttcatgccaatactccaagttcacgccccttttttgctcagccgtcagccccgtctccgtctgaagagtgcttctgccctcatttgcctctccctgtgaccccggccccctcagactccgctgcgtcgtctctcggccccgtccagccgttcctgactgctcttcgccggagtccgcttcccaaccccctttcgccagagcccgagagctccgtcggctctgcgtcctggcggtggggactccccgccgagcgcttgcgcgtgccaggtcacccgggactacgtttcccagcgggccgagcggccggcgccgcggctgcggtcaggtgacccggtcgcctggccgcagtgagtcaggctgggagggcggggccgcgccggctgctgcggctggcacttggccctttaatccccttcgtgggcccctcaacctggagcggataaattcttggcgcttctccgggggttgtgctcttccgtactcggatcgcttcttaggagtatcctaactgccggtggggagaacttcgccctaaacctggggttccgatccaggaactggaagttgacagcttggctgcctggctcctacatctgccttctccactcaccatctcatttctttctccaggattgtcagtggcttcgccccgaggagagctgactgccctgggctgctgcctccggcagagctgagccaaaatgtccccggaatctaaaaagcttttcaacatcattattttaggagttgcctttatgtttatgttcactgcctttcaaacttgtggaaatgtggcgcaaactgtcatcaggagcttaaataggacagattttcacggcagtggatataccagcatggctattatctatggagtgttctctgcttcaaatttgattacaccgtcagtggttgccattgtaggacctcaactctctatgtttgccagtggtttattttacagcatgtacattgccgttttcatccagcctttcccgtggtccttctacacagcctctgttttcattggaattgctgctgctgtgctttggacagcacaaggaaactgcctgacaatcaattcggatgagcacagcattgggagaaacagtgggattttctgggcacttctgcagtctagcttgttctttggaaatctctacatatattttgcctggcaagggaaaactcagatatcagagagtgaccgaagaacagtgtttattgccctaacggtgattagccttgtggggacagttctattctttctcattcggaaaccagattctgaaaatgtcctaggagaagatgagtcttctgatgaccaggacatggaagtcaacgagtctgcccagaacaatctgacaaaggcagtagatgcttttaaaaagtcttttaagttatgtgtcaccaaggagatgctccttcttagtattacaactgcttatacaggtctggaattaactttcttctctggtgtatatggaacctgtattggtgctacaaataaatttggagcagaagagaaaagcgtggaagcctcttcggcctgctgagcaagaacaatcgttttggtagaaatccagttgtgctgttgggcatcctggtgcacttcatagctttttatctaatatttctcaacatgcctggagatgccccgattgctcctgttaaaggaactgacagcagtgcttacatcaaatccagcaaagaagttgccattctctgcagttttctgttgggccttggagacagctgctttaatacccagctgcttagtatcttgggctttctgtattctgaagacagcgccccagcatttgccatcttcaagtttgttcagtctatttgcgcagccgtggcatttttctacagcaactaccttctccttcactggcaactcctggtcatggtgatatttgggttttttggaacaatttctttcttcactgtggaatgggaagctgccgcctttgtagcccgcggctctgactaccgaagtatctgatctggtgtccgtgaggggacacgtatgacctcagaaacacagctggacacagagcttggtggaagaagtcgcctttgatcttcactatatattgggtgatgttcagtatggaaaatcaagggattaagactgttaaatcagccagagttggtgttcaagtttacagatatgagttatttaaagcaagtagaataagggaaagctgttctgtcaactgtaattgttcaaagatgttgtttttcatttcatctatctcaattcttataatcatgttatagaatgtaaatgttttcttctctctcctgctcttgttggaagatcctgccttgatttagaatactaggccatatgtcatataaatattttttctggatatggagtatgttttgctatgtaataatgggaagcatatgtcattccccatatgtgttggagaatgacatttaaataaatagcaaagctgggtgtggtgttgcaccgctatactcccagctgttggggaggctgagacggaaggatcgcttcagcccgggagattgaggctgcggtgagctatgatcgcgccactgcactccaggctgggcaacggagtgagaccctgtcttgaaaataataataggctggtcacggtggctcatgcctgtggtcccagcactttgggaggctgaggtgggtggatcgcctgaggtcgggggtttgagaccggcctggccagcgtggtgaagcctcatctctgctgagaatgcagagatgtgttgggtttggtggtgcatgcctgtgatcctagctgctggggaggctgaggtaggagaattcgcttgagcctgggaggcggaggttgcagtgagccgagatcgtgccattgcactccagcctggatgacaagagtgaaactccatctc

SEQ ID NO: 292988 - DNA, 4520 bp, Homo sapiens
  misc_feature (1296)..(1296): n is a, c, g, or t
ggagaccgcagctttaaagggggaaaatgcagacgttggataaaaacagcaagaaatagtcattttcattaataggtctcaaacagtttacgaaacagccattattatctaagcttcatacacatcctttctgcagacccctctcttcagtattactcccaaaggagacttggggggactcttcgatcgcgacctggatttggattccctcttggacactgggggaggactcctggaccgagaccgggacctggaccgcgaacgagatctggagaccgacgaggacttggacttggaccttcgtgcggatctggacttggaggtcgaccgagatcgagaacgagtgcgggaccgagacttcgagcggctgtagcgagatcggctgcgagacctggaacggctccgactccgggatcggctgcggcgacgccgcctagggctgcgggcgggacgagcaagcacagcggggttaattccaggcagcggggccggccccgcccgcgcgctcccgcccaggccgccattatctcgccgccagacgccatttccccagtcgcgaggcggggtcctccgccccgcgccgcccacaccccggccactcccgggtcgcagacggcggaagctcgcggggtggccggagggtcgcgagacgcggcgtgcacccccgccccgtccgggcccgcaccacgtgcttcgccgcggacctttgtgaggtcgcccgggcctcccgcgcgccccgccccgcctcccgcggtcccctcagccccgtttacctgcggctccggcgtccgtagccaccgcccccgtacctgcggggtggcggtccccggcggctgtggtgtgagtccggggggcggccgtagcgcgccatttgcacccgcagctcgcggccgtccagcacggccccgtccatggcatccatagcgtcctcagcgtcgcgcttgtcgtgaaagcgaacgaaggcgaagccgcgggactccttggtgtagcgatcccgcgggatgtacacgtcgccgacgcgcccgtacttctcgaagacgcgcctcagcgtgtcgggcgaggtgcggtaggtcaggttgtccaccttgagggaggtcataccctccacatcgggaggggggcggccgtagctcatagctctgagtggcggcccggagccccgcgaactggcgccggcttcctcagctctgggcggtgcgacgccgcgcctctcaggcagttgccttccgcgtggggacactgggaaaggccttgccgcagaacagcacggacgggctccgcaggctagcgcacctnagtaacaactgggcgggcagccggcctctgcgcccgtttatatcgctcctcacaaaatggcgcccgcgccacccggaaatgaaaccttctgattggcccaccgcgccccgcttcgtaacgaccctgccgcgcgccccgcccctacccgaagcgcctgcgcacagcccggcgggcgggccaaaaagcgcggagtcacggctggagggagggggagcggaattagcgggcagttggaaagcccgcgaaacgctttttccgcctgggaggccggacgatcgcgattgggcaggaggaagaggaggtgctccccatctgggcccccacctttttttcatgccaatactccaagttcacgccccttttttgctcagccgtcagccccgtctccgtctgaagagtgcttctgccctcatttgcctctccctgtgaccccggccccctcagactccgctgcgtcgtctctcggccccgtccagccgttcctgactgctcttcgccggagtccgcttcccaaccccctttcgccagagcccgagagctccgtcggctctgcgtcctggcggtggggactccccgccgagcgcttgcgcgtgccaggtcacccgggactacgtttcccagcgggccgagcggccggcgccgcggctgcggtcaggtgacccggtcgcctggccgcagtgagtcaggctgggagggcggggccgcgccggctgctgcggctggcacttggccctttaatccccttcgtgggcccctcaacctggagcggataaattcttggcgcttctccgggggttgtgctcttccgtactcggatcgcttcttaggagtatcctaactgccggtggggagaacttcgccctaaacctggggttccgatccaggaactggaagttgacagcttggctgcctggctcctacatctgccttctccactcaccatctcatttctttctccaggattgtcagtggcttcgccccgaggagagctgactgccctgggctgctgcctccggcagagctgagccaaaatgtccccggaatctaaaaagcttttcaacatcattattttaggagttgcctttatgtttatgttcactgcctttcaaacttgtggaaatgtggcgcaaactgtcatcaggagcttaaataggacagattttcacggcagtggatataccagcatggctattatctatggagtgttctctgcttcaaatttgattacaccgtcagtggttgccattgtaggacctcaactctctatgtttgccagtggtttattttacagcatgtacattgccgttttcatccagcctttcccgtggtccttctacacagcctctgttttcattggaattgctgctgctgtgctttggacagcacaaggaaactgcctgacaatcaattcggatgagcacagcattgggagaaacagtgggattttctgggcacttctgcagtctagagagtgaccgaagaacagtgtttattgccctaacggtgattagccttgtggggacagttctattctttctcattcggaaaccagattctgaaaatgtcctaggagaagatgagtcttctgatgaccaggacatggaagtcaacgagtctgcccagaacaatctgacaaaggcagtagatgcttttaaaaagtcttttaagttatgtgtcaccaaggagatgctccttcttagtattacaactgcttatacaggtctggaattaactttcttctctggtgtatatggaacctgtattggtgctacaaataaatttggagcagaagagaaaagccttattggactttctggcagtttcatcggcattggagaaattttaggtggaagcctcttcggcctgctgagcaagaacaatcgttttggtagaaatccagttgtgctgttgggcatcctggtgcacttcatagctttttatctaatatttctcaacatgcctggagatgccccgattgctcctgttaaaggaactgacagcagtgcttacatcaaatccagcaaagaagttgccattctctgcagttttctgttgggccttggagacagctgctttaatacccagctgcttagtatcttgggctttctgtattctgaagacagcgccccagcatttgccatcttcaagtttgttcagtctatttgcgcagccgtggcatttttctacagcaactaccttctccttcactggcaactcctggtcatggtgatatttgggttttttggaacaatttctttcttcactgtggaatgggaagctgccgcctttgtagcccgcggctctgactaccgaagtatctgatctggtgtccgtgaggggacacgtatgacctcagaaacacagctggacacagagcttggtggaagaagtcgcctttgatcttcactatatattgggtgatgttcagtatggaaaatcaagggattaagactgttaaatcagccagagttggtgttcaagtttacagatatgagttatttaaagcaagtagaataagggaaagctgttctgtcaactgtaattgttcaaagatgttgtttttcatttcatctatctcaattcttataatcatgttatagaatgtaaatgttttcttctctctcctgctcttgttggaagatcctgccttgatttagaatactaggccatatgtcatataaatattttttctggatatggagtatgttttgctatgtaataatgggaagcatatgtcattccccatatgtgttggagaatgacatttaaataaatagcaaagctgggtgtggtgttgcaccgctatactcccagctgttggggaggctgagacggaaggatcgcttcagcccgggagattgaggctgcggtgagctatgatcgcgccactgcactccaggctgggcaacggagtgagaccctgtcttgaaaataataataggctggtcacggtggctcatgcctgtggtcccagcactttgggaggctgaggtgggtggatcgcctgaggtcgggggtttgagaccggcctggccagcgtggtgaagcctcatctctgctgagaatgcagagatgtgttgggtttggtggtgcatgcctgtgatcctagctgctggggaggctgaggtaggagaattcgcttgagcctgggaggcggaggttgcagtgagccgagatcgtgccattgcactccagcctggatgacaagagtgaaactccatctc

SEQ ID NO: 292989 - DNA, 4580 bp, Homo sapiens
  misc_feature (1296)..(1296): n is a, c, g, or t
ggagaccgcagctttaaagggggaaaatgcagacgttggataaaaacagcaagaaatagtcattttcattaataggtctcaaacagtttacgaaacagccattattatctaagcttcatacacatcctttctgcagacccctctcttcagtattactcccaaaggagacttggggggactcttcgatcgcgacctggatttggattccctcttggacactgggggaggactcctggaccgagaccgggacctggaccgcgaacgagatctggagaccgacgaggacttggacttggaccttcgtgcggatctggacttggaggtcgaccgagatcgagaacgagtgcgggaccgagacttcgagcggctgtagcgagatcggctgcgagacctggaacggctccgactccgggatcggctgcggcgacgccgcctagggctgcgggcgggacgagcaagcacagcggggttaattccaggcagcggggccggccccgcccgcgcgctcccgcccaggccgccattatctcgccgccagacgccatttccccagtcgcgaggcggggtcctccgccccgcgccgcccacaccccggccactcccgggtcgcagacggcggaagctcgcggggtggccggagggtcgcgagacgcggcgtgcacccccgccccgtccgggcccgcaccacgtgcttcgccgcggacctttgtgaggtcgcccgggcctcccgcgcgccccgccccgcctcccgcggtcccctcagccccgtttacctgcggctccggcgtccgtagccaccgcccccgtacctgcggggtggcggtccccggcggctgtggtgtgagtccggggggcggccgtagcgcgccatttgcacccgcagctcgcggccgtccagcacggccccgtccatggcatccatagcgtcctcagcgtcgcgcttgtcgtgaaagcgaacgaaggcgaagccgcgggactccttggtgtagcgatcccgcgggatgtacacgtcgccgacgcgcccgtacttctcgaagacgcgcctcagcgtgtcgggcgaggtgcggtaggtcaggttgtccaccttgagggaggtcataccctccacatcgggaggggggcggccgtagctcatagctctgagtggcggcccggagccccgcgaactggcgccggcttcctcagctctgggcggtgcgacgccgcgcctctcaggcagttgccttccgcgtggggacactgggaaaggccttgccgcagaacagcacggacgggctccgcaggctagcgcacctnagtaacaactgggcgggcagccggcctctgcgcccgtttatatcgctcctcacaaaatggcgcccgcgccacccggaaatgaaaccttctgattggcccaccgcgccccgcttcgtaacgaccctgccgcgcgccccgcccctacccgaagcgcctgcgcacagcccggcgggcgggccaaaaagcgcggagtcacggctggagggagggggagcggaattagcgggcagttggaaagcccgcgaaacgctttttccgcctgggaggccggacgatcgcgattgggcaggaggaagaggaggtgctccccatctgggcccccacctttttttcatgccaatactccaagttcacgccccttttttgctcagccgtcagccccgtctccgtctgaagagtgcttctgccctcatttgcctctccctgtgaccccggccccctcagactccgctgcgtcgtctctcggccccgtccagccgttcctgactgctcttcgccggagtccgcttcccaaccccctttcgccagagcccgagagctccgtcggctctgcgtcctggcggtggggactccccgccgagcgcttgcgcgtgccaggtcacccgggactacgtttcccagcgggccgagcggccggcgccgcggctgcggtcaggtgacccggtcgcctggccgcagtgagtcaggctgggagggcggggccgcgccggctgctgcggctggcacttggccctttaatccccttcgtgggcccctcaacctggagcggataaattcttggcgcttctccgggggttgtgctcttccgtactcggatcgcttcttaggagtatcctaactgccggtggggagaacttcgccctaaacctggggttccgatccaggaactggaagttgacagcttggctgcctggctcctacatctgccttctccactcaccatctcatttctttctccaggattgtcagtggcttcgccccgaggagagctgactgccctgggctgctgcctccggcagagctgagccaaaatgtccccggaatctaaaaagcttttcaacatcattattttaggagttgcctttatgtttatgttcactgcctttcaaacttgtggaaatgtggcgcaaactgtcatcaggagcttaaataggacagattttcacggcagtggatataccagcatggctattatctatggagtgttctctgcttcaaatttgattacaccgtcagtggttgccattgtaggacctcaactctctatgtttgccagtggtttattttacagcatgtacattgccgttttcatccagcctttcccgtggtccttctacacagcctctgttttcattggaattgctgctgctgtgctttggacagcacaaggaaactgcctgacaatcaattcggatgagcacagcattgggagaaacagtgggattttctgggcacttctgcagtctagcttgttctttggaaatctctacatatattttgcctggcaagggaaaactcagatatcagagagtgaccgaagaacagtgtttattgccctaacggtgattagccttgtggggacagttctattctttctcattcggaaaccagattctgaaaatgtcctaggagaagatgagtcttctgatgaccaggacatggaagtcaacgaacactgggttttttacaaattgaaggcttgtggcaaccctgcatcgagtctgcccagaacaatctgacaaaggcagtagatgcttttaaaaagtcttttaagttatgtgtcaccaaggagatgctccttcttagtattacaactgcttatacaggtctggaattaactttcttctctggtgtatatggaacctgtattggtgctacaaataaatttggagcagaagagaaaagcgtggaagcctcttcggcctgctgagcaagaacaatcgttttggtagaaatccagttgtgctgttgggcatcctggtgcacttcatagctttttatctaatatttctcaacatgcctggagatgccccgattgctcctgttaaaggaactgacagcagtgcttacatcaaatccagcaaagaagttgccattctctgcagttttctgttgggccttggagacagctgctttaatacccagctgcttagtatcttgggctttctgtattctgaagacagcgccccagcatttgccatcttcaagtttgttcagtctatttgcgcagccgtggcatttttctacagcaactaccttctccttcactggcaactcctggtcatggtgatatttgggttttttggaacaatttctttcttcactgtggaatgggaagctgccgcctttgtagcccgcggctctgactaccgaagtatctgatctggtgtccgtgaggggacacgtatgacctcagaaacacagctggacacagagcttggtggaagaagtcgcctttgatcttcactatatattgggtgatgttcagtatggaaaatcaagggattaagactgttaaatcagccagagttggtgttcaagtttacagatatgagttatttaaagcaagtagaataagggaaagctgttctgtcaactgtaattgttcaaagatgttgtttttcatttcatctatctcaattcttataatcatgttatagaatgtaaatgttttcttctctctcctgctcttgttggaagatcctgccttgatttagaatactaggccatatgtcatataaatattttttctggatatggagtatgttttgctatgtaataatgggaagcatatgtcattccccatatgtgttggagaatgacatttaaataaatagcaaagctgggtgtggtgttgcaccgctatactcccagctgttggggaggctgagacggaaggatcgcttcagcccgggagattgaggctgcggtgagctatgatcgcgccactgcactccaggctgggcaacggagtgagaccctgtcttgaaaataataataggctggtcacggtggctcatgcctgtggtcccagcactttgggaggctgaggtgggtggatcgcctgaggtcgggggtttgagaccggcctggccagcgtggtgaagcctcatctctgctgagaatgcagagatgtgttgggtttggtggtgcatgcctgtgatcctagctgctggggaggctgaggtaggagaattcgcttgagcctgggaggcggaggttgcagtgagccgagatcgtgccattgcactccagcctggatgacaagagtgaaactccatctc

SEQ ID NO: 292990 - DNA, 3588 bp, Homo sapiens
  misc_feature (1296)..(1296): n is a, c, g, or t
ggagaccgcagctttaaagggggaaaatgcagacgttggataaaaacagcaagaaatagtcattttcattaataggtctcaaacagtttacgaaacagccattattatctaagcttcatacacatcctttctgcagacccctctcttcagtattactcccaaaggagacttggggggactcttcgatcgcgacctggatttggattccctcttggacactgggggaggactcctggaccgagaccgggacctggaccgcgaacgagatctggagaccgacgaggacttggacttggaccttcgtgcggatctggacttggaggtcgaccgagatcgagaacgagtgcgggaccgagacttcgagcggctgtagcgagatcggctgcgagacctggaacggctccgactccgggatcggctgcggcgacgccgcctagggctgcgggcgggacgagcaagcacagcggggttaattccaggcagcggggccggccccgcccgcgcgctcccgcccaggccgccattatctcgccgccagacgccatttccccagtcgcgaggcggggtcctccgccccgcgccgcccacaccccggccactcccgggtcgcagacggcggaagctcgcggggtggccggagggtcgcgagacgcggcgtgcacccccgccccgtccgggcccgcaccacgtgcttcgccgcggacctttgtgaggtcgcccgggcctcccgcgcgccccgccccgcctcccgcggtcccctcagccccgtttacctgcggctccggcgtccgtagccaccgcccccgtacctgcggggtggcggtccccggcggctgtggtgtgagtccggggggcggccgtagcgcgccatttgcacccgcagctcgcggccgtccagcacggccccgtccatggcatccatagcgtcctcagcgtcgcgcttgtcgtgaaagcgaacgaaggcgaagccgcgggactccttggtgtagcgatcccgcgggatgtacacgtcgccgacgcgcccgtacttctcgaagacgcgcctcagcgtgtcgggcgaggtgcggtaggtcaggttgtccaccttgagggaggtcataccctccacatcgggaggggggcggccgtagctcatagctctgagtggcggcccggagccccgcgaactggcgccggcttcctcagctctgggcggtgcgacgccgcgcctctcaggcagttgccttccgcgtggggacactgggaaaggccttgccgcagaacagcacggacgggctccgcaggctagcgcacctnagtaacaactgggcgggcagccggcctctgcgcccgtttatatcgctcctcacaaaatggcgcccgcgccacccggaaatgaaaccttctgattggcccaccgcgccccgcttcgtaacgaccctgccgcgcgccccgcccctacccgaagcgcctgcgcacagcccggcgggcgggccaaaaagcgcggagtcacggctggagggagggggagcggaattagcgggcagttggaaagcccgcgaaacgctttttccgcctgggaggccggacgatcgcgattgggcaggaggaagaggaggtgctccccatctgggcccccacctttttttcatgccaatactccaagttcacgccccttttttgctcagccgtcagccccgtctccgtctgaagagtgcttctgccctcatttgcctctccctgtgaccccggccccctcagactccgctgcgtcgtctctcggccccgtccagccgttcctgactgctcttcgccggagtccgcttcccaaccccctttcgccagagcccgagagctccgtcggctctgcgtcctggcggtggggactccccgccgagcgcttgcgcgtgccaggtcacccgggactacgtttcccagcgggccgagcggccggcgccgcggctgcggtcaggattgtcagtggcttcgccccgaggagagctgactgccctgggctgctgcctccggcagagctgagccaaaatgtccccggaatctaaaaagcttttcaacatcattattttaggagttgcctttatgtttatgttcactgcctttcaaacttgtggaaatgtggcgcaaactgtcatcaggagcttaaataggacagattttcacggcagtggatataccagcatggctattatctatggagtgttctctgcttcaaatttgattacaccgtcagtggttgccattgtaggacctcaactctctatgtttgccagtggtttattttacagcatgtacattgccgttttcatccagcctttcccgtggtccttctacacagcctctgttttcattggaattgctgctgctgagagtgaccgaagaacagtgtttattgccctaacggtgattagccttgtggggacagttctattctttctcattcggaaaccagattctgaaaatgtcctaggagaagatgagtcttctgatgaccaggacatggaagtcaacgagtctgcccagaacaatctgacaaaggcagtagatgcttttaaaaagtcttttaagttatgtgtcaccaaggagatgctccttcttagtattacaactgcttatacaggtctggaattaactttcttctctggtgtatatggaacctgtattggtgctacaaataaatttggagcagaagagaaaagccttattggactttctggcagtttcatcggcattggagaaattttaggtggaagcctcttcggcctgctgagcaagaacaatcgttttggtagaaatccagttgtgctgttgggcatcctggtgcacttcatagctttttatctaatatttctcaacatgcctggagatgccccgattgctcctgttaaaggaactgacagcagtgcttacatcaaatccagcaaagaagttgccattctctgcagttttctgttgggccttggagacagctgctttaatacccagctgcttagtatcttgggctttctgtattctgaagacagcgccccagcatttgccatcttcaagtttgttcagtctatttgcgcagccgtggcatttttctacagcaactaccttctccttcactggcaactcctggtcatggtgatatttgggttttttggaacaatttctttcttcactgtggaatgggaagctgccgcctttgtagcccgcggctctgactaccgaagtatctgatctggtgtccgtgaggggacacgtatgacctcagaaacacagctggacacagagcttggtggaagaagtcgcctttgatcttcactatatattgggtgatgttcagtatggaaaatcaagggattaagactgttaaatcagccagagttggtgttcaagtttacagatatgagttatttaaagcaagtagaataagggaaagctgttctgtcaactgtaattgttcaaagatgttgtttttcatttcatctatctcaattcttataatcatgttatagaatgtaaatgttttcttctctctcctgctcttgttggaagatcctgccttgatttagaatactaggccatatgtcatataaatattttttctgg

SEQ ID NO: 292991 - DNA, 3172 bp, Homo sapiens
  misc_feature (1296)..(1296): n is a, c, g, or t
ggagaccgcagctttaaagggggaaaatgcagacgttggataaaaacagcaagaaatagtcattttcattaataggtctcaaacagtttacgaaacagccattattatctaagcttcatacacatcctttctgcagacccctctcttcagtattactcccaaaggagacttggggggactcttcgatcgcgacctggatttggattccctcttggacactgggggaggactcctggaccgagaccgggacctggaccgcgaacgagatctggagaccgacgaggacttggacttggaccttcgtgcggatctggacttggaggtcgaccgagatcgagaacgagtgcgggaccgagacttcgagcggctgtagcgagatcggctgcgagacctggaacggctccgactccgggatcggctgcggcgacgccgcctagggctgcgggcgggacgagcaagcacagcggggttaattccaggcagcggggccggccccgcccgcgcgctcccgcccaggccgccattatctcgccgccagacgccatttccccagtcgcgaggcggggtcctccgccccgcgccgcccacaccccggccactcccgggtcgcagacggcggaagctcgcggggtggccggagggtcgcgagacgcggcgtgcacccccgccccgtccgggcccgcaccacgtgcttcgccgcggacctttgtgaggtcgcccgggcctcccgcgcgccccgccccgcctcccgcggtcccctcagccccgtttacctgcggctccggcgtccgtagccaccgcccccgtacctgcggggtggcggtccccggcggctgtggtgtgagtccggggggcggccgtagcgcgccatttgcacccgcagctcgcggccgtccagcacggccccgtccatggcatccatagcgtcctcagcgtcgcgcttgtcgtgaaagcgaacgaaggcgaagccgcgggactccttggtgtagcgatcccgcgggatgtacacgtcgccgacgcgcccgtacttctcgaagacgcgcctcagcgtgtcgggcgaggtgcggtaggtcaggttgtccaccttgagggaggtcataccctccacatcgggaggggggcggccgtagctcatagctctgagtggcggcccggagccccgcgaactggcgccggcttcctcagctctgggcggtgcgacgccgcgcctctcaggcagttgccttccgcgtggggacactgggaaaggccttgccgcagaacagcacggacgggctccgcaggctagcgcacctnagtaacaactgggcgggcagccggcctctgcgcccgtttatatcgctcctcacaaaatggcgcccgcgccacccggaaatgaaaccttctgattggcccaccgcgccccgcttcgtaacgaccctgccgcgcgccccgcccctacccgaagcgcctgcgcacagcccggcgggcgggccaaaaagcgcggagtcacggctggagggagggggagcggaattagcgggcagttggaaagcccgcgaaacgctttttccgcctgggaggccggacgatcgcgattgggcaggaggaagaggaggtgctccccatctgggcccccacctttttttcatgccaatactccaagttcacgccccttttttgctcagccgtcagccccgtctccgtctgaagagtgcttctgccctcatttgcctctccctgtgaccccggccccctcagactccgctgcgtcgtctctcggccccgtccagccgttcctgactgctcttcgccggagtccgcttcccaaccccctttcgccagagcccgagagctccgtcggctctgcgtcctggcggtggggactccccgccgagcgcttgcgcgtgccaggtcacccgggactacgtttcccagcgggccgagcggccggcgccgcggctgcggtcaggtgacccggtcgcctggccgcagtgagtcaggctgggagggcggggccgcgccggctgctgcggctggcacttggccctttaatccccttcgtgggcccctcaacctggagcggataaattcttggcgcttctccgggggttgtgctcttccgtactcggatcgcttcttaggagtatcctaactgccggtggggagaacttcgccctaaacctggggttccgatccaggaactggaagttgacagcttggctgcctggctcctacatctgccttctccactcaccatctcatttctttctccaggattgtcagtggcttcgccccgaggagagctgactgccctgggctgctgcctccggcagagctgagccaaaatgtccccggaatctaaaaagcttttcaacatcattattttaggagttgcctttatgtttatgttcactgcctttcaaacttgtggaaatgtggcgcaaactgtcatcaggagcttaaataggacagattttcacggcagtggatataccagcatggctattatctatggagtgttctctgcttcaaatttgattacaccgtcagtggttgccattgtaggacctcaactctctatgtttgccagtggtttattttacagcatgtacattgccgttttcatccagcctttcccgtggtccttctacacagcctctgttttcattggaattgctgctgctgtgctttggacagcacaaggaaactgcctgacaatcaattcggatgagcacagcattgggagaaacagtgggattttctgggcacttctgcagtctagcttgttctttggaaatctctacatatattttgcctggcaagggaaaactcagatatcagagagtgaccgaagaacagtgtttattgccctaacggtgattagccttgtggggacagttctattctttctcattcggaaaccagattctgaaaatgtcctaggagaagatgagtcttctgatgaccaggacatggaagtcaacgagtctgcccagaacaatctgacaaaggcagtagatgcttttaaaaagtcttttaagttatgtgtcaccaaggagatgctccttcttagtattacaactgcttatacagtctcagagctgctctccatctccacgaccccctccataagatcaccttgtgatctggcaggatagccagacaccttagttaatggactgatggctcc

SEQ ID NO: 292992 - DNA, 1864 bp, Homo sapiens
  misc_feature (21)..(21): n is a, c, g, or t
gtcagctgtgtgagatacgtnatcgcaagggggcacttctgcagtctagcttgttctttggaaatctctacatatattttgcctggcaagggaaaactcagatatcagagagtgaccgaagaacagtgtttattgccctaacggtgattagccttgtggggacagttctattctttctcattcggaaaccagattctgaaaatgtcctaggagaagatgagtcttctgatgaccaggacatggaagtcaacgagtctgcccagaacaatctgacaaaggcagtagatgcttttaaaaagtcttttaagttatgtgtcaccaaggagatgctccttcttagtattacaactgcttatacaggtctggaattaactttcttctctggtgtatatggaacctgtattggtgctacaaataaatttggagcagaagagaaaagccttattggactttctggcagtttcatcggcattggagaaattttaggtggaagcctcttcggcctgctgagcaagaacaatcgttttggtagaaatccagttgtgctgttgggcatcctggtgcacttcatagctttttatctaatatttctcaacatgcctggagatgccccgattgctcctgttaaaggaactgacagcagtgcttacatcaaatccagcaaagaagttgccattctctgcagttttctgttgggccttggagacagctgctttaatacccagctgcttagtatcttgggctttctgtattctgaagacagcgccccagcatttgccatcttcaagtttgttcagtctatttgcgcagccgtggcatttttctacagcaactaccttctccttcactggcaactcctggtcatggtgatatttgggttttttggaacaatttctttcttcactgtggaatgggaagctgccgcctttgtagcccgcggctctgactaccgaagtatctgatctggtgtccgtgaggggacacgtatgacctcagaaacacagctggacacagagcttggtggaagaagtcgcctttgatcttcactatatattgggtgatgttcagtatggaaaatcaagggattaagactgttaaatcagccagagttggtgttcaagtttacagatatgagttatttaaagcaagtagaataagggaaagctgttctgtcaactgtaattgttcaaagatgttgtttttcatttcatctatctcaattcttataatcatgttatagaatgtaaatgttttcttctctctcctgctcttgttggaagatcctgccttgatttagaatactaggccatatgtcatataaatattttttctggatatggagtatgttttgctatgtaataatgggaagcatatgtcattccccatatgtgttggagaatgacatttaaataaatagcaaagctgggtgtggtgttgcaccgctatactcccagctgttggggaggctgagacggaaggatcgcttcagcccgggagattgaggctgcggtgagctatgatcgcgccactgcactccaggctgggcaacggagtgagaccctgtcttgaaaataataataggctggtcacggtggctcatgcctgtggtcccagcactttgggaggctgaggtgggtggatcgcctgaggtcgggggtttgagaccggcctggccagcgtggtgaagcctcatctctgctgagaatgcagagatgtgttgggtttggtggtgcatgcctgtgatcctagctgctggggaggctgaggtaggagaattcgcttgagcctgggaggcggaggttgcagtgagccgagatcgtgccattgcactccagcctggatgacaagagtgaaactccatctc

SEQ ID NO: 292993 - DNA, 2512 bp, Homo sapiens
  misc_feature (1296)..(1296): n is a, c, g, or t
ggagaccgcagctttaaagggggaaaatgcagacgttggataaaaacagcaagaaatagtcattttcattaataggtctcaaacagtttacgaaacagccattattatctaagcttcatacacatcctttctgcagacccctctcttcagtattactcccaaaggagacttggggggactcttcgatcgcgacctggatttggattccctcttggacactgggggaggactcctggaccgagaccgggacctggaccgcgaacgagatctggagaccgacgaggacttggacttggaccttcgtgcggatctggacttggaggtcgaccgagatcgagaacgagtgcgggaccgagacttcgagcggctgtagcgagatcggctgcgagacctggaacggctccgactccgggatcggctgcggcgacgccgcctagggctgcgggcgggacgagcaagcacagcggggttaattccaggcagcggggccggccccgcccgcgcgctcccgcccaggccgccattatctcgccgccagacgccatttccccagtcgcgaggcggggtcctccgccccgcgccgcccacaccccggccactcccgggtcgcagacggcggaagctcgcggggtggccggagggtcgcgagacgcggcgtgcacccccgccccgtccgggcccgcaccacgtgcttcgccgcggacctttgtgaggtcgcccgggcctcccgcgcgccccgccccgcctcccgcggtcccctcagccccgtttacctgcggctccggcgtccgtagccaccgcccccgtacctgcggggtggcggtccccggcggctgtggtgtgagtccggggggcggccgtagcgcgccatttgcacccgcagctcgcggccgtccagcacggccccgtccatggcatccatagcgtcctcagcgtcgcgcttgtcgtgaaagcgaacgaaggcgaagccgcgggactccttggtgtagcgatcccgcgggatgtacacgtcgccgacgcgcccgtacttctcgaagacgcgcctcagcgtgtcgggcgaggtgcggtaggtcaggttgtccaccttgagggaggtcataccctccacatcgggaggggggcggccgtagctcatagctctgagtggcggcccggagccccgcgaactggcgccggcttcctcagctctgggcggtgcgacgccgcgcctctcaggcagttgccttccgcgtggggacactgggaaaggccttgccgcagaacagcacggacgggctccgcaggctagcgcacctnagtaacaactgggcgggcagccggcctctgcgcccgtttatatcgctcctcacaaaatggcgcccgcgccacccggaaatgaaaccttctgattggcccaccgcgccccgcttcgtaacgaccctgccgcgcgccccgcccctacccgaagcgcctgcgcacagcccggcgggcgggccaaaaagcgcggagtcacggctggagggagggggagcggaattagcgggcagttggaaagcccgcgaaacgctttttccgcctgggaggccggacgatcgcgattgggcaggaggaagaggaggtgctccccatctgggcccccacctttttttcatgccaatactccaagttcacgccccttttttgctcagccgtcagccccgtctccgtctgaagagtgcttctgccctcatttgcctctccctgtgaccccggccccctcagactccgctgcgtcgtctctcggccccgtccagccgttcctgactgctcttcgccggagtccgcttcccaaccccctttcgccagagcccgagagctccgtcggctctgcgtcctggcggtggggactccccgccgagcgcttgcgcgtgccaggtcacccgggactacgtttcccagcgggccgagcggccggcgccgcggctgcggtcaggtgacccggtcgcctggccgcagtgagtcaggctgggagggcggggccgcgccggctgctgcggctggcacttggccctttaatccccttcgtgggcccctcaacctggagcggataaattcttggcgcttctccgggggttgtgctcttccgtactcggatcgcttcttaggagtatcctaactgccggtggggagaacttcgccctaaacctggggttccgatccaggaactggaagttgacagcttggctgcctggctcctacatctgccttctccactcaccatctcatttctttctccaggattgtcagtggcttcgccccgaggagagctgactgccctgggctgctgcctccggcagagctgagccaaaatgtccccggaatctaaaaagcttttcaacatcattattttaggagttgcctttatgtttatgttcactgcctttcaaacttgtggaaatgtggcggtgagttggaatctgtcctccctcctttgaagtgcccatcataatgcagtccagaaatgaaaataaatgttcattatatctaaaagcgc

SEQ ID NO: 292994 - DNA, 1739 bp, Homo sapiens
atagggcaaatgtagttcatgccttaagcattttaatctgaaagttatatcccaaagtgttcgtttactggcattattgacaaggggtgttttggttgaaggaagttttagaatgtttgttttattaactaaaatctaattaagtactcttaaatttttgtgtttacagaaaagtcttttaagttatgtgtcaccaaggagatgctccttcttagtattacaactgcttatacaggtctggaattaactttcttctctggtgtatatggaacctgtattggtgctacaaataaatttggagcagaagagaaaagccttattggactttctggcagtttcatcggcattggagaaattttaggtggaagcctcttcggcctgctgagcaagaacaatcgttttggtagaaatccagttgtgctgttgggcatcctggtgcacttcatagctttttatctaatatttctcaacatgcctggagatgccccgattgctcctgttaaaggaactgacagcagtgcttacatcaaatccagcaaagaagttgccattctctgcagttttctgttgggccttggagacagctgctttaatacccagctgcttagtatcttgggctttctgtattctgaagacagcgccccagcatttgccatcttcaagtttgttcagtctatttgcgcagccgtggcatttttctacagcaactaccttctccttcactggcaactcctggtcatggtgatatttgggttttttggaacaatttctttcttcactgtggaatgggaagctgccgcctttgtagcccgcggctctgactaccgaagtatctgatctggtgtccgtgaggggacacgtatgacctcagaaacacagctggacacagagcttggtggaagaagtcgcctttgatcttcactatatattgggtgatgttcagtatggaaaatcaagggattaagactgttaaatcagccagagttggtgttcaagtttacagatatgagttatttaaagcaagtagaataagggaaagctgttctgtcaactgtaattgttcaaagatgttgtttttcatttcatctatctcaattcttataatcatgttatagaatgtaaatgttttcttctctctcctgctcttgttggaagatcctgccttgatttagaatactaggccatatgtcatataaatattttttctggatatggagtatgttttgctatgtaataatgggaagcatatgtcattccccatatgtgttggagaatgacatttaaataaatagcaaagctgggtgtggtgttgcaccgctatactcccagctgttggggaggctgagacggaaggatcgcttcagcccgggagattgaggctgcggtgagctatgatcgcgccactgcactccaggctgggcaacggagtgagaccctgtcttgaaaataataataggctggtcacggtggctcatgcctgtggtcccagcactttgggaggctgaggtgggtggatcgcctgaggtcgggggtttgagaccggcctggccagcgtggtgaagcctcatctctgctgagaatgcagagatgtgttgggtttggtggtgcatgcctgtgatcctagctgctggggaggctgaggtaggagaattcgcttgagcctgggaggcggaggttgcagtgagccgagatcgtgccattgcactccagcctggatgacaagagtgaaactccatctc

SEQ ID NO: 292995 - DNA, 1322 bp, Homo sapiens
ggagaccgcagctttaaagggggaaaatgcagacgttggataaaaacagcaagaaatagtcattttcattaataggtctcaaacagtttacgaaacagccattattatctaagcttcatacacatcctttctgcagacccctctcttcagtattactcccaaaggagacttggggggactcttcgatcgcgacctggatttggattccctcttggacactgggggaggactcctggaccgagaccgggacctggaccgcgaacgagatctggagaccgacgaggacttggacttggaccttcgtgcggatctggacttggaggtcgaccgagatcgagaacgagtgcgggaccgagacttcgagcggctgtagcgagatcggctgcgagacctggaacggctccgactccgggatcggctgcggcgacgccgcctagggctgcgggcgggacgagcaagcacagcggggttaattccaggcagcggggccggccccgcccgcgcgctcccgcccaggccgccattatctcgccgccagacgccatttccccagtcgcgaggcggggtcctccgccccgcgccgcccacaccccggccactcccgggtcgcagacggcggaagctcgcggggtggccggagggtcgcgagacgcggcgtgcacccccgccccgtccgggcccgcaccacgtgcttcgccgcggacctttgtgaggtcgcccgggcctcccgcgcgccccgccccgcctcccgcggtcccctcagccccgtttacctgcggctccggcgtccgtagccaccgcccccgtacctgcggggtggcggtccccggcggctgtggtgtgagtccggggggcggccgtagcgcgccatttgcacccgcagctcgcggccgtccagcacggccccgtccatggcatccatagcgtcctcagcgtcgcgcttgtcgtgaaagcgaacgaaggcgaagccgcgggactccttggtgtagcgatcccgcgggatgtacacgtcgccgacgcgcccgtacttctcgaagacgcgcctcagcgtgtcgggcgaggtgcggattgtcagtggcttcgccccgaggagagctgactgccctgggctgctgcctccggcagagctgagccaaaatgtccccggaatctaaaaagcttttcaacatcattattttaggagttgcctttatgtttatgttcactgcctttcaaacttgtggaaatgtggcggtgagttggaatctgtcctccctcctttgaagtgcccatcataatgcagtccagaaatgaaaataaatgttcattatatctaaaagcgc

SEQ ID NO: 292996 - DNA, 2278 bp, Homo sapiens
  misc_feature (1296)..(1296): n is a, c, g, or t
ggagaccgcagctttaaagggggaaaatgcagacgttggataaaaacagcaagaaatagtcattttcattaataggtctcaaacagtttacgaaacagccattattatctaagcttcatacacatcctttctgcagacccctctcttcagtattactcccaaaggagacttggggggactcttcgatcgcgacctggatttggattccctcttggacactgggggaggactcctggaccgagaccgggacctggaccgcgaacgagatctggagaccgacgaggacttggacttggaccttcgtgcggatctggacttggaggtcgaccgagatcgagaacgagtgcgggaccgagacttcgagcggctgtagcgagatcggctgcgagacctggaacggctccgactccgggatcggctgcggcgacgccgcctagggctgcgggcgggacgagcaagcacagcggggttaattccaggcagcggggccggccccgcccgcgcgctcccgcccaggccgccattatctcgccgccagacgccatttccccagtcgcgaggcggggtcctccgccccgcgccgcccacaccccggccactcccgggtcgcagacggcggaagctcgcggggtggccggagggtcgcgagacgcggcgtgcacccccgccccgtccgggcccgcaccacgtgcttcgccgcggacctttgtgaggtcgcccgggcctcccgcgcgccccgccccgcctcccgcggtcccctcagccccgtttacctgcggctccggcgtccgtagccaccgcccccgtacctgcggggtggcggtccccggcggctgtggtgtgagtccggggggcggccgtagcgcgccatttgcacccgcagctcgcggccgtccagcacggccccgtccatggcatccatagcgtcctcagcgtcgcgcttgtcgtgaaagcgaacgaaggcgaagccgcgggactccttggtgtagcgatcccgcgggatgtacacgtcgccgacgcgcccgtacttctcgaagacgcgcctcagcgtgtcgggcgaggtgcggtaggtcaggttgtccaccttgagggaggtcataccctccacatcgggaggggggcggccgtagctcatagctctgagtggcggcccggagccccgcgaactggcgccggcttcctcagctctgggcggtgcgacgccgcgcctctcaggcagttgccttccgcgtggggacactgggaaaggccttgccgcagaacagcacggacgggctccgcaggctagcgcacctnagtaacaactgggcgggcagccggcctctgcgcccgtttatatcgctcctcacaaaatggcgcccgcgccacccggaaatgaaaccttctgattggcccaccgcgccccgcttcgtaacgaccctgccgcgcgccccgcccctacccgaagcgcctgcgcacagcccggcgggcgggccaaaaagcgcggagtcacggctggagggagggggagcggaattagcgggcagttggaaagcccgcgaaacgctttttccgcctgggaggccggacgatcgcgattgggcaggaggaagaggaggtgctccccatctgggcccccacctttttttcatgccaatactccaagttcacgccccttttttgctcagccgtcagccccgtctccgtctgaagagtgcttctgccctcatttgcctctccctgtgaccccggccccctcagactccgctgcgtcgtctctcggccccgtccagccgttcctgactgctcttcgccggagtccgcttcccaaccccctttcgccagagcccgagagctccgtcggctctgcgtcctggcggattgtcagtggcttcgccccgaggagagctgactgccctgggctgctgcctccggcagagctgagccaaaatgtccccggaatctaaaaagcttttcaacatcattattttaggagttgcctttatgtttatgttcactgcctttcaaacttgtggaaatgtggcgcaaactgtcatcaggagcttaaataggacagattttcacggcagtggatataccagcatggctattatctatggagtgttcctctgacttccaaattctggatttaaccaacaccgtccccaaggatttggcgtttggcccagttacttggggctttaacagcgtacccccattcaaactttcatctattcgttttgcccaagtgagtttaattttacagcatgtacattgccgttttcatccagcctttccc

SEQ ID NO: 292997 - DNA, 393 bp, Homo sapiens
cgtgatactaattctggaattgtttggtcgatactatcttgtttcttcttttttctccgtagagagtgaccgaagaacagtgtttattgccctaacggtgattagccttgtggggacagttctattctttctcattcggaaaccagattctgaaaatgtcctaggagaagatgagtcttctgatgaccaggacatggaagtcaacgagtaagatgttggaaacattctattttattttaaaatagattttgagtagatctagtctagagattaccaacccgtttagccctaactgatgtccagtactctctgtaggttaccacaggcaagaaaaggaagaaaataaaggaggagctgcgagggaggaagaaaaaaaaggtcaccagaggaagg

SEQ ID NO: 292998 - DNA, 300 bp, Homo sapiens
caccgctccttcctcttcaggagacttggggggactcttcgatcgcgacctggatttggattccctcttggacactgggggaggactcctggaccgagaccgggacctggaccgcgaacgagatctggagaccgacgaggacttggacttggaccttcgtgcggatctggacttggaggtcgaccgagatcgagaacgagtgcgggaccgagacttcgagcggctgtagcgagatcggctgcgagacctggaacggctccgactccgggatcggctgcggcgacgccgcctagggctgcg

SEQ ID NO: 292999 - DNA, 3517 bp, Homo sapiens
  misc_feature (2696)..(2696): n is a, c, g, or t
acactactgtcccgaacttcagctggaacgctagtccaagtcactgtcctaactgcagctagcactgccgaccttgtccgaggagtttccttccgctccctcaactcccactttcccagggaggggagggggccgggggcaccggcgacagttgcggggaaggaagtggaatctcgcctttgggaaagcccgggcggagagctgagggctcgccgtctcaccttggctgacgtccgcgaggactccctctcggagcaaggttcaggtccaagtaccaaggctctgcgggaccaaggggcgggtcctgcccagaaagggcccctcaccccgcgggcggtcagggccgttcttgagggctgccctccggccgcctgactggaaaaccaggcactccaccccctcctctccgggcccccgtcctcccccggagaatacgacctttcggccatgttagccaggagcgaggggcagggctaaggggccggcggccactcggcatctgggttttagtcaggcagtgctccaggcgcctggctgccaggctacgggagaaaagtcctccgctcggccgcacccgttagaggcgctctccactgctgtcctcttcagctcaagatggtggcctgccgggcgattggcatcctcagccgcttttctgccttcaggatcctccgctcccgaggttatatatgccgcaattttacagggtcttctgctttgctgaccagaacccatattaactatggagtcaaaggggatgtggcagttgttcgaattaactctcccaattcaaaggtaaatacactgagtaaagagctacattcagagttctcagaagttatgaatgaaatctgggctagtgatcaaatcagaagtgccgtccttatctcatcaaagccaggctgctttattgcaggtgctgatatcaacatgttagccgcttgcaagacccttcaagaagtaacacagctatcacaagaagcacagagaatagttgagaaacttgaaaagtccacaaagcctattgtggctgccatcaatggatcctgcctgggaggaggacttgaggttgccatttcatgccaatacagaatagcaacaaaagacagaaaaacagtattaggtacccctgaagttttgctgggggccttaccaggagcaggaggcacacaaaggctgcccaaaatggtgggtgtgcctgctgctttggacatgatgctgactggtagaagcattcgtgcagacagggcaaagaaaatgggactggttgaccaactggtggaacccctgggaccaggactaaaacctccagaggaacggacaatagaatacctagaagaagttgcaattacttttgccaaaggactagctgataagaagatctctccaaagagagacaagggattggtggaaaaattgacagcgtatgccatgactattccatttgtcaggcaacaggtttacaaaaaagtggaagaaaaagtgcgaaagcagactaaaggcctttatcctgcacctctgaaaataattgatgtggtaaagactggaattgagcaagggagtgatgccggttatctctgtgaatctcagaaatttggagagcttgtaatgaccaaagaatcaaaggccttgatgggactctaccatggtcaggtcctgtgcaagaagaataaatttggagctccacagaaggatgttaagcatctggctattcttggtgcagggctgatgggagcaggcatcgcccaagtctccgtggataaggggctaaagactatacttaaagatgccaccctcactgcgctagaccgaggacagcaacaagtgttcaaaggattgaatgacaaagtgaagaagaaagctctaacatcatttgaaagggattccatcttcagcaacttgactgggcagcttgattaccaaggttttgaaaaggccgacatggtgattgaagctgtgtttgaggaccttagtcttaagcacagagtgctaaaggaagtagaagcggtgattccagatcactgtatctttgccagtaacacatctgctctcccaatcagtgaaatcgctgctgtcagcaaaagacctgagaaggtgattggcatgcactacttctctcccgtggacaagatgcagctgctggagattatcacgaccgagaaaacttccaaagacaccagtgcttcagctgtagcagttggtctcaagcaggggaaggtcatcattgtggttaaggatggacctggcttctatactaccaggtgtcttgcgcccatgatgtctgaagtcatccgaatcctccaggaaggagttgacccgaagaagctggattccctgaccacaagctttggctttcctgtgggtgccgccacactggtggatgaagttggtgtggatgtagcgaaacatgtggcggaagatctgggcaaagtctttggggagcggtttggaggtggaaacccagaactgctgacacagatggtgtccaagggcttcctaggtcgtaaatctgggaagggcttttacatctatcaggagggtgtgaagaggaaggatttgaattctgacatggatagtattttagcgagtctgaagctgcctcctaagtctgaagtctcatcagacgaagacatccagttccgcctggtgacaagatttgtgaatgaggcagtcatgtgcctgcaagaggggatctnggccacacctgcagagggagacatcggagccgtctttgggcttggcttcccgccttgtctgggagggcctttccgctttgtggatctgtatggcgcccagaagatagtggaccggctcaagaaatatgaagctgcctatggaaaacagttcaccccatgccagctgctagctgaccatgctaacagccctaacaagaagttctaccagtgagcaggcctcatgcctcgctcagtcagtgcactaaccccagctgccggcagtgctggttctccaacagagtggtgtctagatttatcagagtaacgagaagacaaactccggcactgggtttgctccctgattaaagtgccttcagccaagaccatctctccctcctggtgaagtgtgacttcgaattagtttgcacttcctattggaaggtagagcccactgctcattgtataagccccgaggcctagagtggcagccaagagccatctgaagccacctctctgcctgttcctcccaagaggccagggtggccaggggtggtgagggcagttctgcacccagccaaacacataacaataaaaaccaaactctgtgtcagcatctttgcccttctggtttaaacgcctccttcaaaaagcaatctggaagaaagccctgtgctttgggggagtaagaatgtgtgtgcagaattctaggcagcaccttagggagggactgggatgagagaaagtgggacctggtgggctcaaccacacacacctgtctgtgcagatgctttgcccaggcttctcaccacggtgtaccgggatattaaacctctttccccagc

SEQ ID NO: 293000 - DNA, 2958 bp, Homo sapiens
  misc_feature (2137)..(2137): n is a, c, g, or t
aaatcaggcttagtggaggccgcgattaaatcggccgaggcactcttcagctcaagatggtggcctgccgggcgattggcatcctcagccgcttttctgccttcaggatcctccgctcccgaggttatatatgccgcaattttacagggtcttctgctttgctgaccagaacccatattaactatggagtcaaaggggatgtggcagttgttcgaattaactctcccaattcaaaggtaaatacactgagtaaagagctacattcagagttctcagaagttatgaatgaaatctgggctagtgatcaaatcagaagtgccgtccttatctcatcaaagccaggctgctttattgcaggtgctgatatcaacatgttagccgcttgcaagacccttcaagaagtaacacagctatcacaagaagcacagagaatagttgagaaacttgaaaagtccacaaagcctattgtggctgccatcaatggatcctgcctgggaggaggacttgaggttgccatttcatgccaatacagaatagcaacaaaagacagaaaaacagtattaggtacccctgaagttttgctgggggccttaccaggagcaggaggcacacaaaggctgcccaaaatggtgggtgtgcctgctgctttggacatgatgctgactggtagaagcattcgtgcagacagggcaaagaaaatgggactggttgaccaactggtggaacccctgggaccaggactaaaacctccagaggaacggacaatagaatacctagaagaagttgcaattacttttgccaaaggactagctgataagaagatctctccaaagagagacaagggattggtggaaaaattgacagcgtatgccatgactattccatttgtcaggcaacaggtttacaaaaaagtggaagaaaaagtgcgaaagcagactaaaggcctttatcctgcacctctgaaaataattgatgtggtaaagactggaattgagcaagggagtgatgccggttatctctgtgaatctcagaaatttggagagcttgtaatgaccaaagaatcaaaggccttgatgggactctaccatggtcaggtcctgtgcaagaagaataaatttggagctccacagaaggatgttaagcatctggctattcttggtgcagggctgatgggagcaggcatcgcccaagtctccgtggataaggggctaaagactatacttaaagatgccaccctcactgcgctagaccgaggacagcaacaagtgttcaaaggattgaatgacaaagtgaagaagaaagctctaacatcatttgaaagggattccatcttcagcaacttgactgggcagcttgattaccaaggttttgaaaaggccgacatggtgattgaagctgtgtttgaggaccttagtcttaagcacagagtgctaaaggaagtagaagcggtgattccagatcactgtatctttgccagtaacacatctgctctcccaatcagtgaaatcgctgctgtcagcaaaagacctgagaaggtgattggcatgcactacttctctcccgtggacaagatgcagctgctggagattatcacgaccgagaaaacttccaaagacaccagtgcttcagctgtagcagttggtctcaagcaggggaaggtcatcattgtggttaaggatggacctggcttctatactaccaggtgtcttgcgcccatgatgtctgaagtcatccgaatcctccaggaaggagttgacccgaagaagctggattccctgaccacaagctttggctttcctgtgggtgccgccacactggtggatgaagttggtgtggatgtagcgaaacatgtggcggaagatctgggcaaagtctttggggagcggtttggaggtggaaacccagaactgctgacacagatggtgtccaagggcttcctaggtcgtaaatctgggaagggcttttacatctatcaggagggtgtgaagaggaaggatttgaattctgacatggatagtattttagcgagtctgaagctgcctcctaagtctgaagtctcatcagacgaagacatccagttccgcctggtgacaagatttgtgaatgaggcagtcatgtgcctgcaagaggggatctnggccacacctgcagagggagacatcggagccgtctttgggcttggcttcccgccttgtctgggagggcctttccgctttgtggatctgtatggcgcccagaagatagtggaccggctcaagaaatatgaagctgcctatggaaaacagttcaccccatgccagctgctagctgaccatgctaacagccctaacaagaagttctaccagtgagcaggcctcatgcctcgctcagtcagtgcactaaccccagctgccggcagtgctggttctccaacagagtggtgtctagatttatcagagtaacgagaagacaaactccggcactgggtttgctccctgattaaagtgccttcagccaagaccatctctccctcctggtgaagtgtgacttcgaattagtttgcacttcctattggaaggtagagcccactgctcattgtataagccccgaggcctagagtggcagccaagagccatctgaagccacctctctgcctgttcctcccaagaggccagggtggccaggggtggtgagggcagttctgcacccagccaaacacataacaataaaaaccaaactctgtgtcagcatctttgcccttctggtttaaacgcctccttcaaaaagcaatctggaagaaagccctgtgctttgggggagtaagaatgtgtgtgcagaattctaggcagcaccttagggagggactgggatgagagaaagtgggacctggtgggctcaaccacacacacctgtctgtgcagatgctttgcccaggcttctcaccacggtgtaccgggatattaaacctctttccccagc

SEQ ID NO: 293001 - DNA, 2948 bp, Homo sapiens
  misc_feature (2127)..(2127): n is a, c, g, or t
tgcaaagaaaatggcgttggtatttggccgaggtcttcagctcaagatggtggcctgccgggcgattggcatcctcagccgcttttctgccttcaggatcctccgctcccgaggttatatatgccgcaattttacagggtcttctgctttgctgaccagaacccatattaactatggagtcaaaggggatgtggcagttgttcgaattaactctcccaattcaaaggtaaatacactgagtaaagagctacattcagagttctcagaagttatgaatgaaatctgggctagtgatcaaatcagaagtgccgtccttatctcatcaaagccaggctgctttattgcaggtgctgatatcaacatgttagccgcttgcaagacccttcaagaagtaacacagctatcacaagaagcacagagaatagttgagaaacttgaaaagtccacaaagcctattgtggctgccatcaatggatcctgcctgggaggaggacttgaggttgccatttcatgccaatacagaatagcaacaaaagacagaaaaacagtattaggtacccctgaagttttgctgggggccttaccaggagcaggaggcacacaaaggctgcccaaaatggtgggtgtgcctgctgctttggacatgatgctgactggtagaagcattcgtgcagacagggcaaagaaaatgggactggttgaccaactggtggaacccctgggaccaggactaaaacctccagaggaacggacaatagaatacctagaagaagttgcaattacttttgccaaaggactagctgataagaagatctctccaaagagagacaagggattggtggaaaaattgacagcgtatgccatgactattccatttgtcaggcaacaggtttacaaaaaagtggaagaaaaagtgcgaaagcagactaaaggcctttatcctgcacctctgaaaataattgatgtggtaaagactggaattgagcaagggagtgatgccggttatctctgtgaatctcagaaatttggagagcttgtaatgaccaaagaatcaaaggccttgatgggactctaccatggtcaggtcctgtgcaagaagaataaatttggagctccacagaaggatgttaagcatctggctattcttggtgcagggctgatgggagcaggcatcgcccaagtctccgtggataaggggctaaagactatacttaaagatgccaccctcactgcgctagaccgaggacagcaacaagtgttcaaaggattgaatgacaaagtgaagaagaaagctctaacatcatttgaaagggattccatcttcagcaacttgactgggcagcttgattaccaaggttttgaaaaggccgacatggtgattgaagctgtgtttgaggaccttagtcttaagcacagagtgctaaaggaagtagaagcggtgattccagatcactgtatctttgccagtaacacatctgctctcccaatcagtgaaatcgctgctgtcagcaaaagacctgagaaggtgattggcatgcactacttctctcccgtggacaagatgcagctgctggagattatcacgaccgagaaaacttccaaagacaccagtgcttcagctgtagcagttggtctcaagcaggggaaggtcatcattgtggttaaggatggacctggcttctatactaccaggtgtcttgcgcccatgatgtctgaagtcatccgaatcctccaggaaggagttgacccgaagaagctggattccctgaccacaagctttggctttcctgtgggtgccgccacactggtggatgaagttggtgtggatgtagcgaaacatgtggcggaagatctgggcaaagtctttggggagcggtttggaggtggaaacccagaactgctgacacagatggtgtccaagggcttcctaggtcgtaaatctgggaagggcttttacatctatcaggagggtgtgaagaggaaggatttgaattctgacatggatagtattttagcgagtctgaagctgcctcctaagtctgaagtctcatcagacgaagacatccagttccgcctggtgacaagatttgtgaatgaggcagtcatgtgcctgcaagaggggatctnggccacacctgcagagggagacatcggagccgtctttgggcttggcttcccgccttgtctgggagggcctttccgctttgtggatctgtatggcgcccagaagatagtggaccggctcaagaaatatgaagctgcctatggaaaacagttcaccccatgccagctgctagctgaccatgctaacagccctaacaagaagttctaccagtgagcaggcctcatgcctcgctcagtcagtgcactaaccccagctgccggcagtgctggttctccaacagagtggtgtctagatttatcagagtaacgagaagacaaactccggcactgggtttgctccctgattaaagtgccttcagccaagaccatctctccctcctggtgaagtgtgacttcgaattagtttgcacttcctattggaaggtagagcccactgctcattgtataagccccgaggcctagagtggcagccaagagccatctgaagccacctctctgcctgttcctcccaagaggccagggtggccaggggtggtgagggcagttctgcacccagccaaacacataacaataaaaaccaaactctgtgtcagcatctttgcccttctggtttaaacgcctccttcaaaaagcaatctggaagaaagccctgtgctttgggggagtaagaatgtgtgtgcagaattctaggcagcaccttagggagggactgggatgagagaaagtgggacctggtgggctcaaccacacacacctgtctgtgcagatgctttgcccaggcttctcaccacggtgtaccgggatattaaacctctttccccagc

SEQ ID NO: 293002 - DNA, 2965 bp, Homo sapiens
  misc_feature (2144)..(2144): n is a, c, g, or t
aaatgagtcattaggtcgagcggggtggtagtcggccgaggctcgttcagtcttcagctcaagatggtggcctgccgggcgattggcatcctcagccgcttttctgccttcaggatcctccgctcccgaggttatatatgccgcaattttacagggtcttctgctttgctgaccagaacccatattaactatggagtcaaaggggatgtggcagttgttcgaattaactctcccaattcaaaggtaaatacactgagtaaagagctacattcagagttctcagaagttatgaatgaaatctgggctagtgatcaaatcagaagtgccgtccttatctcatcaaagccaggctgctttattgcaggtgctgatatcaacatgttagccgcttgcaagacccttcaagaagtaacacagctatcacaagaagcacagagaatagttgagaaacttgaaaagtccacaaagcctattgtggctgccatcaatggatcctgcctgggaggaggacttgaggttgccatttcatgccaatacagaatagcaacaaaagacagaaaaacagtattaggtacccctgaagttttgctgggggccttaccaggagcaggaggcacacaaaggctgcccaaaatggtgggtgtgcctgctgctttggacatgatgctgactggtagaagcattcgtgcagacagggcaaagaaaatgggactggttgaccaactggtggaacccctgggaccaggactaaaacctccagaggaacggacaatagaatacctagaagaagttgcaattacttttgccaaaggactagctgataagaagatctctccaaagagagacaagggattggtggaaaaattgacagcgtatgccatgactattccatttgtcaggcaacaggtttacaaaaaagtggaagaaaaagtgcgaaagcagactaaaggcctttatcctgcacctctgaaaataattgatgtggtaaagactggaattgagcaagggagtgatgccggttatctctgtgaatctcagaaatttggagagcttgtaatgaccaaagaatcaaaggccttgatgggactctaccatggtcaggtcctgtgcaagaagaataaatttggagctccacagaaggatgttaagcatctggctattcttggtgcagggctgatgggagcaggcatcgcccaagtctccgtggataaggggctaaagactatacttaaagatgccaccctcactgcgctagaccgaggacagcaacaagtgttcaaaggattgaatgacaaagtgaagaagaaagctctaacatcatttgaaagggattccatcttcagcaacttgactgggcagcttgattaccaaggttttgaaaaggccgacatggtgattgaagctgtgtttgaggaccttagtcttaagcacagagtgctaaaggaagtagaagcggtgattccagatcactgtatctttgccagtaacacatctgctctcccaatcagtgaaatcgctgctgtcagcaaaagacctgagaaggtgattggcatgcactacttctctcccgtggacaagatgcagctgctggagattatcacgaccgagaaaacttccaaagacaccagtgcttcagctgtagcagttggtctcaagcaggggaaggtcatcattgtggttaaggatggacctggcttctatactaccaggtgtcttgcgcccatgatgtctgaagtcatccgaatcctccaggaaggagttgacccgaagaagctggattccctgaccacaagctttggctttcctgtgggtgccgccacactggtggatgaagttggtgtggatgtagcgaaacatgtggcggaagatctgggcaaagtctttggggagcggtttggaggtggaaacccagaactgctgacacagatggtgtccaagggcttcctaggtcgtaaatctgggaagggcttttacatctatcaggagggtgtgaagaggaaggatttgaattctgacatggatagtattttagcgagtctgaagctgcctcctaagtctgaagtctcatcagacgaagacatccagttccgcctggtgacaagatttgtgaatgaggcagtcatgtgcctgcaagaggggatctnggccacacctgcagagggagacatcggagccgtctttgggcttggcttcccgccttgtctgggagggcctttccgctttgtggatctgtatggcgcccagaagatagtggaccggctcaagaaatatgaagctgcctatggaaaacagttcaccccatgccagctgctagctgaccatgctaacagccctaacaagaagttctaccagtgagcaggcctcatgcctcgctcagtcagtgcactaaccccagctgccggcagtgctggttctccaacagagtggtgtctagatttatcagagtaacgagaagacaaactccggcactgggtttgctccctgattaaagtgccttcagccaagaccatctctccctcctggtgaagtgtgacttcgaattagtttgcacttcctattggaaggtagagcccactgctcattgtataagccccgaggcctagagtggcagccaagagccatctgaagccacctctctgcctgttcctcccaagaggccagggtggccaggggtggtgagggcagttctgcacccagccaaacacataacaataaaaaccaaactctgtgtcagcatctttgcccttctggtttaaacgcctccttcaaaaagcaatctggaagaaagccctgtgctttgggggagtaagaatgtgtgtgcagaattctaggcagcaccttagggagggactgggatgagagaaagtgggacctggtgggctcaaccacacacacctgtctgtgcagatgctttgcccaggcttctcaccacggtgtaccgggatattaaacctctttccccagc

SEQ ID NO: 293003 - DNA, 2931 bp, Homo sapiens
  misc_feature (2110)..(2110): n is a, c, g, or t
cgggccttcagctcgtaattacctggaccgttggccttacaatttcgattggcatcctcagccgcttttctgccttcaggatcctccgctcccgaggttatatatgccgcaattttacagggtcttctgctttgctgaccagaacccatattaactatggagtcaaaggggatgtggcagttgttcgaattaactctcccaattcaaaggtaaatacactgagtaaagagctacattcagagttctcagaagttatgaatgaaatctgggctagtgatcaaatcagaagtgccgtccttatctcatcaaagccaggctgctttattgcaggtgctgatatcaacatgttagccgcttgcaagacccttcaagaagtaacacagctatcacaagaagcacagagaatagttgagaaacttgaaaagtccacaaagcctattgtggctgccatcaatggatcctgcctgggaggaggacttgaggttgccatttcatgccaatacagaatagcaacaaaagacagaaaaacagtattaggtacccctgaagttttgctgggggccttaccaggagcaggaggcacacaaaggctgcccaaaatggtgggtgtgcctgctgctttggacatgatgctgactggtagaagcattcgtgcagacagggcaaagaaaatgggactggttgaccaactggtggaacccctgggaccaggactaaaacctccagaggaacggacaatagaatacctagaagaagttgcaattacttttgccaaaggactagctgataagaagatctctccaaagagagacaagggattggtggaaaaattgacagcgtatgccatgactattccatttgtcaggcaacaggtttacaaaaaagtggaagaaaaagtgcgaaagcagactaaaggcctttatcctgcacctctgaaaataattgatgtggtaaagactggaattgagcaagggagtgatgccggttatctctgtgaatctcagaaatttggagagcttgtaatgaccaaagaatcaaaggccttgatgggactctaccatggtcaggtcctgtgcaagaagaataaatttggagctccacagaaggatgttaagcatctggctattcttggtgcagggctgatgggagcaggcatcgcccaagtctccgtggataaggggctaaagactatacttaaagatgccaccctcactgcgctagaccgaggacagcaacaagtgttcaaaggattgaatgacaaagtgaagaagaaagctctaacatcatttgaaagggattccatcttcagcaacttgactgggcagcttgattaccaaggttttgaaaaggccgacatggtgattgaagctgtgtttgaggaccttagtcttaagcacagagtgctaaaggaagtagaagcggtgattccagatcactgtatctttgccagtaacacatctgctctcccaatcagtgaaatcgctgctgtcagcaaaagacctgagaaggtgattggcatgcactacttctctcccgtggacaagatgcagctgctggagattatcacgaccgagaaaacttccaaagacaccagtgcttcagctgtagcagttggtctcaagcaggggaaggtcatcattgtggttaaggatggacctggcttctatactaccaggtgtcttgcgcccatgatgtctgaagtcatccgaatcctccaggaaggagttgacccgaagaagctggattccctgaccacaagctttggctttcctgtgggtgccgccacactggtggatgaagttggtgtggatgtagcgaaacatgtggcggaagatctgggcaaagtctttggggagcggtttggaggtggaaacccagaactgctgacacagatggtgtccaagggcttcctaggtcgtaaatctgggaagggcttttacatctatcaggagggtgtgaagaggaaggatttgaattctgacatggatagtattttagcgagtctgaagctgcctcctaagtctgaagtctcatcagacgaagacatccagttccgcctggtgacaagatttgtgaatgaggcagtcatgtgcctgcaagaggggatctnggccacacctgcagagggagacatcggagccgtctttgggcttggcttcccgccttgtctgggagggcctttccgctttgtggatctgtatggcgcccagaagatagtggaccggctcaagaaatatgaagctgcctatggaaaacagttcaccccatgccagctgctagctgaccatgctaacagccctaacaagaagttctaccagtgagcaggcctcatgcctcgctcagtcagtgcactaaccccagctgccggcagtgctggttctccaacagagtggtgtctagatttatcagagtaacgagaagacaaactccggcactgggtttgctccctgattaaagtgccttcagccaagaccatctctccctcctggtgaagtgtgacttcgaattagtttgcacttcctattggaaggtagagcccactgctcattgtataagccccgaggcctagagtggcagccaagagccatctgaagccacctctctgcctgttcctcccaagaggccagggtggccaggggtggtgagggcagttctgcacccagccaaacacataacaataaaaaccaaactctgtgtcagcatctttgcccttctggtttaaacgcctccttcaaaaagcaatctggaagaaagccctgtgctttgggggagtaagaatgtgtgtgcagaattctaggcagcaccttagggagggactgggatgagagaaagtgggacctggtgggctcaaccacacacacctgtctgtgcagatgctttgcccaggcttctcaccacggtgtaccgggatattaaacctctttccccagc

SEQ ID NO: 293004 - DNA, 2936 bp, Homo sapiens
  misc_feature (68)..(68): n is a, c, g, or t
  misc_feature (2115)..(2115): n is a, c, g, or t
gcagctgaggcagaagcagagaagtgcagctgctgccagtgagaagtgcgcctgggtgcgcacccagncgcattctgccttcaggatcctccgctcccgaggttatatatgccgcaattttacagggtcttctgctttgctgaccagaacccatattaactatggagtcaaaggggatgtggcagttgttcgaattaactctcccaattcaaaggtaaatacactgagtaaagagctacattcagagttctcagaagttatgaatgaaatctgggctagtgatcaaatcagaagtgccgtccttatctcatcaaagccaggctgctttattgcaggtgctgatatcaacatgttagccgcttgcaagacccttcaagaagtaacacagctatcacaagaagcacagagaatagttgagaaacttgaaaagtccacaaagcctattgtggctgccatcaatggatcctgcctgggaggaggacttgaggttgccatttcatgccaatacagaatagcaacaaaagacagaaaaacagtattaggtacccctgaagttttgctgggggccttaccaggagcaggaggcacacaaaggctgcccaaaatggtgggtgtgcctgctgctttggacatgatgctgactggtagaagcattcgtgcagacagggcaaagaaaatgggactggttgaccaactggtggaacccctgggaccaggactaaaacctccagaggaacggacaatagaatacctagaagaagttgcaattacttttgccaaaggactagctgataagaagatctctccaaagagagacaagggattggtggaaaaattgacagcgtatgccatgactattccatttgtcaggcaacaggtttacaaaaaagtggaagaaaaagtgcgaaagcagactaaaggcctttatcctgcacctctgaaaataattgatgtggtaaagactggaattgagcaagggagtgatgccggttatctctgtgaatctcagaaatttggagagcttgtaatgaccaaagaatcaaaggccttgatgggactctaccatggtcaggtcctgtgcaagaagaataaatttggagctccacagaaggatgttaagcatctggctattcttggtgcagggctgatgggagcaggcatcgcccaagtctccgtggataaggggctaaagactatacttaaagatgccaccctcactgcgctagaccgaggacagcaacaagtgttcaaaggattgaatgacaaagtgaagaagaaagctctaacatcatttgaaagggattccatcttcagcaacttgactgggcagcttgattaccaaggttttgaaaaggccgacatggtgattgaagctgtgtttgaggaccttagtcttaagcacagagtgctaaaggaagtagaagcggtgattccagatcactgtatctttgccagtaacacatctgctctcccaatcagtgaaatcgctgctgtcagcaaaagacctgagaaggtgattggcatgcactacttctctcccgtggacaagatgcagctgctggagattatcacgaccgagaaaacttccaaagacaccagtgcttcagctgtagcagttggtctcaagcaggggaaggtcatcattgtggttaaggatggacctggcttctatactaccaggtgtcttgcgcccatgatgtctgaagtcatccgaatcctccaggaaggagttgacccgaagaagctggattccctgaccacaagctttggctttcctgtgggtgccgccacactggtggatgaagttggtgtggatgtagcgaaacatgtggcggaagatctgggcaaagtctttggggagcggtttggaggtggaaacccagaactgctgacacagatggtgtccaagggcttcctaggtcgtaaatctgggaagggcttttacatctatcaggagggtgtgaagaggaaggatttgaattctgacatggatagtattttagcgagtctgaagctgcctcctaagtctgaagtctcatcagacgaagacatccagttccgcctggtgacaagatttgtgaatgaggcagtcatgtgcctgcaagaggggatctnggccacacctgcagagggagacatcggagccgtctttgggcttggcttcccgccttgtctgggagggcctttccgctttgtggatctgtatggcgcccagaagatagtggaccggctcaagaaatatgaagctgcctatggaaaacagttcaccccatgccagctgctagctgaccatgctaacagccctaacaagaagttctaccagtgagcaggcctcatgcctcgctcagtcagtgcactaaccccagctgccggcagtgctggttctccaacagagtggtgtctagatttatcagagtaacgagaagacaaactccggcactgggtttgctccctgattaaagtgccttcagccaagaccatctctccctcctggtgaagtgtgacttcgaattagtttgcacttcctattggaaggtagagcccactgctcattgtataagccccgaggcctagagtggcagccaagagccatctgaagccacctctctgcctgttcctcccaagaggccagggtggccaggggtggtgagggcagttctgcacccagccaaacacataacaataaaaaccaaactctgtgtcagcatctttgcccttctggtttaaacgcctccttcaaaaagcaatctggaagaaagccctgtgctttgggggagtaagaatgtgtgtgcagaattctaggcagcaccttagggagggactgggatgagagaaagtgggacctggtgggctcaaccacacacacctgtctgtgcagatgctttgcccaggcttctcaccacggtgtaccgggatattaaacctctttccccagc

SEQ ID NO: 293005 - DNA, 2961 bp, Homo sapiens
  misc_feature (97)..(97): n is a, c, g, or t
  misc_feature (2140)..(2140): n is a, c, g, or t
cacgaaagattacaggcggcactgcgtttaattcaataggtgacctgcgttcatcttaattacatggcagtggctgacaatcaaatggatcctcagncgcattctgccttcaggatcctccgctcccgaggtatatatgccgcaataacagggtctctgctttgctgaccagaacccatattaactatggagtcaaaggggatgtggcagttgttcgaattaactctcccaattcaaaggtaaatacactgagtaaagagctacattcagagttctcagaagttatgaatgaaatctgggctagtgatcaaatcagaagtgccgtccttatctcatcaaagccaggctgctttattgcaggtgctgatatcaacatgttagccgcttgcaagacccttcaagaagtaacacagctatcacaagaagcacagagaatagttgagaaacttgaaaagtccacaaagcctattgtggctgccatcaatggatcctgcctgggaggaggacttgaggttgccatttcatgccaatacagaatagcaacaaaagacagaaaaacagtattaggtacccctgaagttttgctgggggccttaccaggagcaggaggcacacaaaggctgcccaaaatggtgggtgtgcctgctgctttggacatgatgctgactggtagaagcattcgtgcagacagggcaaagaaaatgggactggttgaccaactggtggaacccctgggaccaggactaaaacctccagaggaacggacaatagaatacctagaagaagttgcaattacttttgccaaaggactagctgataagaagatctctccaaagagagacaagggattggtggaaaaattgacagcgtatgccatgactattccatttgtcaggcaacaggtttacaaaaaagtggaagaaaaagtgcgaaagcagactaaaggcctttatcctgcacctctgaaaataattgatgtggtaaagactggaattgagcaagggagtgatgccggttatctctgtgaatctcagaaatttggagagcttgtaatgaccaaagaatcaaaggccttgatgggactctaccatggtcaggtcctgtgcaagaagaataaatttggagctccacagaaggatgttaagcatctggctattcttggtgcagggctgatgggagcaggcatcgcccaagtctccgtggataaggggctaaagactatacttaaagatgccaccctcactgcgctagaccgaggacagcaacaagtgttcaaaggattgaatgacaaagtgaagaagaaagctctaacatcatttgaaagggattccatcttcagcaacttgactgggcagcttgattaccaaggttttgaaaaggccgacatggtgattgaagctgtgtttgaggaccttagtcttaagcacagagtgctaaaggaagtagaagcggtgattccagatcactgtatctttgccagtaacacatctgctctcccaatcagtgaaatcgctgctgtcagcaaaagacctgagaaggtgattggcatgcactacttctctcccgtggacaagatgcagctgctggagattatcacgaccgagaaaacttccaaagacaccagtgcttcagctgtagcagttggtctcaagcaggggaaggtcatcattgtggttaaggatggacctggcttctatactaccaggtgtcttgcgcccatgatgtctgaagtcatccgaatcctccaggaaggagttgacccgaagaagctggattccctgaccacaagctttggctttcctgtgggtgccgccacactggtggatgaagttggtgtggatgtagcgaaacatgtggcggaagatctgggcaaagtctttggggagcggtttggaggtggaaacccagaactgctgacacagatggtgtccaagggcttcctaggtcgtaaatctgggaagggcttttacatctatcaggagggtgtgaagaggaaggatttgaattctgacatggatagtattttagcgagtctgaagctgcctcctaagtctgaagtctcatcagacgaagacatccagttccgcctggtgacaagatttgtgaatgaggcagtcatgtgcctgcaagaggggatctnggccacacctgcagagggagacatcggagccgtctttgggcttggcttcccgccttgtctgggagggcctttccgctttgtggatctgtatggcgcccagaagatagtggaccggctcaagaaatatgaagctgcctatggaaaacagttcaccccatgccagctgctagctgaccatgctaacagccctaacaagaagttctaccagtgagcaggcctcatgcctcgctcagtcagtgcactaaccccagctgccggcagtgctggttctccaacagagtggtgtctagatttatcagagtaacgagaagacaaactccggcactgggtttgctccctgattaaagtgccttcagccaagaccatctctccctcctggtgaagtgtgacttcgaattagtttgcacttcctattggaaggtagagcccactgctcattgtataagccccgaggcctagagtggcagccaagagccatctgaagccacctctctgcctgttcctcccaagaggccagggtggccaggggtggtgagggcagttctgcacccagccaaacacataacaataaaaaccaaactctgtgtcagcatctttgcccttctggtttaaacgcctccttcaaaaagcaatctggaagaaagccctgtgctttgggggagtaagaatgtgtgtgcagaattctaggcagcaccttagggagggactgggatgagagaaagtgggacctggtgggctcaaccacacacacctgtctgtgcagatgctttgcccaggcttctcaccacggtgtaccgggatattaaacctctttccccagc

SEQ ID NO: 293006 - DNA, 1539 bp, Homo sapiens
  misc_feature (1297)..(1297): n is a, c, g, or t
  misc_feature (1373)..(1373): n is a, c, g, or t
  misc_feature (1383)..(1383): n is a, c, g, or t
  misc_feature (1409)..(1409): n is a, c, g, or t
  misc_feature (1421)..(1421): n is a, c, g, or t
  misc_feature (1432)..(1432): n is a, c, g, or t
  misc_feature (1450)..(1450): n is a, c, g, or t
  misc_feature (1474)..(1474): n is a, c, g, or t
  misc_feature (1496)..(1496): n is a, c, g, or t
  misc_feature (1512)..(1512): n is a, c, g, or t
  misc_feature (1535)..(1535): n is a, c, g, or t
acactactgtcccgaacttcagctggaacgctagtccaagtcactgtcctaactgcagctagcactgccgaccttgtccgaggagtttccttccgctccctcaactcccactttcccagggaggggagggggccgggggcaccggcgacagttgcggggaaggaagtggaatctcgcctttgggaaagcccgggcggagagctgagggctcgccgtctcaccttggctgacgtccgcgaggactccctctcggagcaaggttcaggtccaagtaccaaggctctgcgggaccaaggggcgggtcctgcccagaaagggcccctcaccccgcgggcggtcagggccgttcttgagggctgccctccggccgcctgactggaaaaccaggcactccaccccctcctctccgggcccccgtcctcccccggagaatacgacctttcggccatgttagccaggagcgaggggcagggctaaggggccggcggccactcggcatctgggttttagtcaggcagtgctccaggcgcctggctgccaggctacgggagaaaagtcctccgctcggccgcacccgttagaggcgctctccactgctgtcctcttcagctcaagatggtggcctgccgggcgattggcatcctcagccgcttttctgccttcaggatcctccgctcccgaggttatatatgccgcaattttacagggtcttctgctttgctgaccagaacccatattaactatggagtcaaaggggatgtggcagttgttcgaattaactctcccaattcaaaggtaaatacactgagtaaagagctacattcagagttctcagaagttatgaatgaaatctgggctagtgatcaaatcagaagtgccgtccttatctcatcaaagccaggctgctttattgcaggtgctgatatcaacatgttagccgcttgcaagacccttcaagaagtaacacagctatcacaagaagcacagagaatagttgagaaacttgaaaagtccacaaagcctattgtggctgccatcaatggatcctgcctgggaggaggacttgaggttgccatttcatgccaatacagaatagcaacaaaagacagaaaaacagtattaggtacccctgaagttttgctgggggccttaccaggagcaggaggcacacaaaggctgcccaaaatggtgggtgtgcctgctgctttggacatgatgctgactggtagaagcattcgtgcagacagggcaaagaaaatgggactggttgaccaactggtggaacccctgggttttncagcaagaatgcaggttgcagtagacataatgcattccttttgtgtgtgttacatactacattctactcagaagtnggaagccaantgaaacagttaaagaccgcgtttttntacctaggagcntatttgttttntcctctatttcttgtggntttcccctcttttgacttcttggnttatggactttgccacctaccngttttccgttttgaantgggacgtgtgctaggggctttngttt

SEQ ID NO: 293007 - DNA, 2802 bp, Homo sapiens
  misc_feature (1981)..(1981): n is a, c, g, or t
cggagtctccctctgctgtccaggctggagtacagtggtgcgatctcggcccactgcaacctccacctcccaggttccagtgattctctcgcctcagcctcccgagtagccaggactacaggaatgcagcaccacgcccagctaatttttgtatttttagtagagacgcggtttcaccatgttgaccagcctggtctcgaactcctgacctcagcatgttagccgcttgcaagacccttcaagaagtaacacagctatcacaagaagcacagagaatagttgagaaacttgaaaagtccacaaagcctattgtggctgccatcaatggatcctgcctgggaggaggacttgaggttgccatttcatgccaatacagaatagcaacaaaagacagaaaaacagtattaggtacccctgaagttttgctgggggccttaccaggagcaggaggcacacaaaggctgcccaaaatggtgggtgtgcctgctgctttggacatgatgctgactggtagaagcattcgtgcagacagggcaaagaaaatgggactggttgaccaactggtggaacccctgggaccaggactaaaacctccagaggaacggacaatagaatacctagaagaagttgcaattacttttgccaaaggactagctgataagaagatctctccaaagagagacaagggattggtggaaaaattgacagcgtatgccatgactattccatttgtcaggcaacaggtttacaaaaaagtggaagaaaaagtgcgaaagcagactaaaggcctttatcctgcacctctgaaaataattgatgtggtaaagactggaattgagcaagggagtgatgccggttatctctgtgaatctcagaaatttggagagcttgtaatgaccaaagaatcaaaggccttgatgggactctaccatggtcaggtcctgtgcaagaagaataaatttggagctccacagaaggatgttaagcatctggctattcttggtgcagggctgatgggagcaggcatcgcccaagtctccgtggataaggggctaaagactatacttaaagatgccaccctcactgcgctagaccgaggacagcaacaagtgttcaaaggattgaatgacaaagtgaagaagaaagctctaacatcatttgaaagggattccatcttcagcaacttgactgggcagcttgattaccaaggttttgaaaaggccgacatggtgattgaagctgtgtttgaggaccttagtcttaagcacagagtgctaaaggaagtagaagcggtgattccagatcactgtatctttgccagtaacacatctgctctcccaatcagtgaaatcgctgctgtcagcaaaagacctgagaaggtgattggcatgcactacttctctcccgtggacaagatgcagctgctggagattatcacgaccgagaaaacttccaaagacaccagtgcttcagctgtagcagttggtctcaagcaggggaaggtcatcattgtggttaaggatggacctggcttctatactaccaggtgtcttgcgcccatgatgtctgaagtcatccgaatcctccaggaaggagttgacccgaagaagctggattccctgaccacaagctttggctttcctgtgggtgccgccacactggtggatgaagttggtgtggatgtagcgaaacatgtggcggaagatctgggcaaagtctttggggagcggtttggaggtggaaacccagaactgctgacacagatggtgtccaagggcttcctaggtcgtaaatctgggaagggcttttacatctatcaggagggtgtgaagaggaaggatttgaattctgacatggatagtattttagcgagtctgaagctgcctcctaagtctgaagtctcatcagacgaagacatccagttccgcctggtgacaagatttgtgaatgaggcagtcatgtgcctgcaagaggggatctnggccacacctgcagagggagacatcggagccgtctttgggcttggcttcccgccttgtctgggagggcctttccgctttgtggatctgtatggcgcccagaagatagtggaccggctcaagaaatatgaagctgcctatggaaaacagttcaccccatgccagctgctagctgaccatgctaacagccctaacaagaagttctaccagtgagcaggcctcatgcctcgctcagtcagtgcactaaccccagctgccggcagtgctggttctccaacagagtggtgtctagatttatcagagtaacgagaagacaaactccggcactgggtttgctccctgattaaagtgccttcagccaagaccatctctccctcctggtgaagtgtgacttcgaattagtttgcacttcctattggaaggtagagcccactgctcattgtataagccccgaggcctagagtggcagccaagagccatctgaagccacctctctgcctgttcctcccaagaggccagggtggccaggggtggtgagggcagttctgcacccagccaaacacataacaataaaaaccaaactctgtgtcagcatctttgcccttctggtttaaacgcctccttcaaaaagcaatctggaagaaagccctgtgctttgggggagtaagaatgtgtgtgcagaattctaggcagcaccttagggagggactgggatgagagaaagtgggacctggtgggctcaaccacacacacctgtctgtgcagatgctttgcccaggcttctcaccacggtgtaccgggatattaaacctctttccccagc

SEQ ID NO: 293008 - DNA, 3458 bp, Homo sapiens
  misc_feature (1190)..(1190): n is a, c, g, or t
  misc_feature (1194)..(1194): n is a, c, g, or t
  misc_feature (1199)..(1199): n is a, c, g, or t
  misc_feature (1223)..(1223): n is a, c, g, or t
  misc_feature (2637)..(2637): n is a, c, g, or t
acactactgtcccgaacttcagctggaacgctagtccaagtcactgtcctaactgcagctagcactgccgaccttgtccgaggagtttccttccgctccctcaactcccactttcccagggaggggagggggccgggggcaccggcgacagttgcggggaaggaagtggaatctcgcctttgggaaagcccgggcggagagctgagggctcgccgtctcaccttggctgacgtccgcgaggactccctctcggagcaaggttcaggtccaagtaccaaggctctgcgggaccaaggggcgggtcctgcccagaaagggcccctcaccccgcgggcggtcagggccgttcttgagggctgccctccggccgcctgactggaaaaccaggcactccaccccctcctctccgggcccccgtcctcccccggagaatacgacctttcggccatgttagccaggagcgaggggcagggctaaggggccggcggccactcggcatctgggttttagtcaggcagtgctccaggcgcctggctgccaggctacgggagaaaagtcctccgctcggccgcacccgttagaggcgctctccactgctgtcctcttcagctcaagatggtggcctgccgggcgattggcatcctcagccgcttttctgccttcaggatcctccgctcccgaggttatatatgccgcaattttacagggtcttctgctttgctgaccagaacccatattaactatggagtcaaaggggatgtggcagttgttcgaattaactctcccaattcaaaggtaaatacactgagtaaagagctacattcagagttctcagaagttatgaatgaaatctgggctagtgatcaaatcagaagtgccgtccttatctcatcaaagccaggctgctttattgcaggtgctgatatcaacatgttagccgcttgcaagacccttcaagaagtaacacagctatcacaagaagcacagagaatagttgagaaacttgaaaagtccacaaagcctattgtggctgccatcaatggatcctgcctgggaggaggacttgaggttgccatttcatgccaatacagaatagcaacaaaagacagaaaaacagtattaggtacccctgaagttttgctgggggccttaccaggagcaggaggcacacaaaggctgcccaaaatggngggngtgcntgtgctttggactgatgctgactngtacaacattcgagctacagggcaaagcacaggaacggacaatagaatacctagaagaagttgcaattacttttgccaaaggactagctgataagaagatctctccaaagagagacaagggattggtggaaaaattgacagcgtatgccatgactattccatttgtcaggcaacaggtttacaaaaaagtggaagaaaaagtgcgaaagcagactaaaggcctttatcctgcacctctgaaaataattgatgtggtaaagactggaattgagcaagggagtgatgccggttatctctgtgaatctcagaaatttggagagcttgtaatgaccaaagaatcaaaggccttgatgggactctaccatggtcaggtcctgtgcaagaagaataaatttggagctccacagaaggatgttaagcatctggctattcttggtgcagggctgatgggagcaggcatcgcccaagtctccgtggataaggggctaaagactatacttaaagatgccaccctcactgcgctagaccgaggacagcaacaagtgttcaaaggattgaatgacaaagtgaagaagaaagctctaacatcatttgaaagggattccatcttcagcaacttgactgggcagcttgattaccaaggttttgaaaaggccgacatggtgattgaagctgtgtttgaggaccttagtcttaagcacagagtgctaaaggaagtagaagcggtgattccagatcactgtatctttgccagtaacacatctgctctcccaatcagtgaaatcgctgctgtcagcaaaagacctgagaaggtgattggcatgcactacttctctcccgtggacaagatgcagctgctggagattatcacgaccgagaaaacttccaaagacaccagtgcttcagctgtagcagttggtctcaagcaggggaaggtcatcattgtggttaaggatggacctggcttctatactaccaggtgtcttgcgcccatgatgtctgaagtcatccgaatcctccaggaaggagttgacccgaagaagctggattccctgaccacaagctttggctttcctgtgggtgccgccacactggtggatgaagttggtgtggatgtagcgaaacatgtggcggaagatctgggcaaagtctttggggagcggtttggaggtggaaacccagaactgctgacacagatggtgtccaagggcttcctaggtcgtaaatctgggaagggcttttacatctatcaggagggtgtgaagaggaaggatttgaattctgacatggatagtattttagcgagtctgaagctgcctcctaagtctgaagtctcatcagacgaagacatccagttccgcctggtgacaagatttgtgaatgaggcagtcatgtgcctgcaagaggggatctnggccacacctgcagagggagacatcggagccgtctttgggcttggcttcccgccttgtctgggagggcctttccgctttgtggatctgtatggcgcccagaagatagtggaccggctcaagaaatatgaagctgcctatggaaaacagttcaccccatgccagctgctagctgaccatgctaacagccctaacaagaagttctaccagtgagcaggcctcatgcctcgctcagtcagtgcactaaccccagctgccggcagtgctggttctccaacagagtggtgtctagatttatcagagtaacgagaagacaaactccggcactgggtttgctccctgattaaagtgccttcagccaagaccatctctccctcctggtgaagtgtgacttcgaattagtttgcacttcctattggaaggtagagcccactgctcattgtataagccccgaggcctagagtggcagccaagagccatctgaagccacctctctgcctgttcctcccaagaggccagggtggccaggggtggtgagggcagttctgcacccagccaaacacataacaataaaaaccaaactctgtgtcagcatctttgcccttctggtttaaacgcctccttcaaaaagcaatctggaagaaagccctgtgctttgggggagtaagaatgtgtgtgcagaattctaggcagcaccttagggagggactgggatgagagaaagtgggacctggtgggctcaaccacacacacctgtctgtgcagatgctttgcccaggcttctcaccacggtgtaccgggatattaaacctctttccccagc

SEQ ID NO: 293009 - DNA, 2524 bp, Homo sapiens
  misc_feature (1703)..(1703): n is a, c, g, or t
ggacgcgtgggtcgacccacgcgtcggcctattgtggctgccatcaatggatcctgcctgggaggaggacttgaggttgccatttcatgccaatacagaatagcaacaaaagacagaaaaacagtattaggtacccctgaagttttgctgggggccttaccaggagcaggaggcacacaaaggctgcccaaaatggtgggtgtgcctgctgctttggacatgatgctgactggtagaagcattcgtgcagacagggcaaagaaaatgggactggttgaccaactggtggaacccctgggaccaggactaaaacctccagaggaacggacaatagaatacctagaagaagttgcaattacttttgccaaaggactagctgataagaagatctctccaaagagagacaagggattggtggaaaaattgacagcgtatgccatgactattccatttgtcaggcaacaggtttacaaaaaagtggaagaaaaagtgcgaaagcagactaaaggcctttatcctgcacctctgaaaataattgatgtggtaaagactggaattgagcaagggagtgatgccggttatctctgtgaatctcagaaatttggagagcttgtaatgaccaaagaatcaaaggccttgatgggactctaccatggtcaggtcctgtgcaagaagaataaatttggagctccacagaaggatgttaagcatctggctattcttggtgcagggctgatgggagcaggcatcgcccaagtctccgtggataaggggctaaagactatacttaaagatgccaccctcactgcgctagaccgaggacagcaacaagtgttcaaaggattgaatgacaaagtgaagaagaaagctctaacatcatttgaaagggattccatcttcagcaacttgactgggcagcttgattaccaaggttttgaaaaggccgacatggtgattgaagctgtgtttgaggaccttagtcttaagcacagagtgctaaaggaagtagaagcggtgattccagatcactgtatctttgccagtaacacatctgctctcccaatcagtgaaatcgctgctgtcagcaaaagacctgagaaggtgattggcatgcactacttctctcccgtggacaagatgcagctgctggagattatcacgaccgagaaaacttccaaagacaccagtgcttcagctgtagcagttggtctcaagcaggggaaggtcatcattgtggttaaggatggacctggcttctatactaccaggtgtcttgcgcccatgatgtctgaagtcatccgaatcctccaggaaggagttgacccgaagaagctggattccctgaccacaagctttggctttcctgtgggtgccgccacactggtggatgaagttggtgtggatgtagcgaaacatgtggcggaagatctgggcaaagtctttggggagcggtttggaggtggaaacccagaactgctgacacagatggtgtccaagggcttcctaggtcgtaaatctgggaagggcttttacatctatcaggagggtgtgaagaggaaggatttgaattctgacatggatagtattttagcgagtctgaagctgcctcctaagtctgaagtctcatcagacgaagacatccagttccgcctggtgacaagatttgtgaatgaggcagtcatgtgcctgcaagaggggatctnggccacacctgcagagggagacatcggagccgtctttgggcttggcttcccgccttgtctgggagggcctttccgctttgtggatctgtatggcgcccagaagatagtggaccggctcaagaaatatgaagctgcctatggaaaacagttcaccccatgccagctgctagctgaccatgctaacagccctaacaagaagttctaccagtgagcaggcctcatgcctcgctcagtcagtgcactaaccccagctgccggcagtgctggttctccaacagagtggtgtctagatttatcagagtaacgagaagacaaactccggcactgggtttgctccctgattaaagtgccttcagccaagaccatctctccctcctggtgaagtgtgacttcgaattagtttgcacttcctattggaaggtagagcccactgctcattgtataagccccgaggcctagagtggcagccaagagccatctgaagccacctctctgcctgttcctcccaagaggccagggtggccaggggtggtgagggcagttctgcacccagccaaacacataacaataaaaaccaaactctgtgtcagcatctttgcccttctggtttaaacgcctccttcaaaaagcaatctggaagaaagccctgtgctttgggggagtaagaatgtgtgtgcagaattctaggcagcaccttagggagggactgggatgagagaaagtgggacctggtgggctcaaccacacacacctgtctgtgcagatgctttgcccaggcttctcaccacggtgtaccgggatattaaacctctttccccagc

SEQ ID NO: 293010 - DNA, 2937 bp, Homo sapiens
  misc_feature (2116)..(2116): n is a, c, g, or t
acactactgtcccgaacttcagctggaacgctagtccaagtcactgtcctaactgcagctagcactgccgaccttgtccgaggagtttccttccgctccctcaactcccactttcccagggaggggagggggccgggggcaccggcgacagttgcggggaaggaagtggaatctcgcctttgggaaagcccgggcggagagctgagggctcgccgtctcaccttggctgacgtccgcgaggactccctctcggagcaaggttcaggtccaagtaccaaggctctgcgggaccaaggggcgggtcctgcccagaaagggcccctcaccccgcgggcggtcagggccgttcttgagggctgccctccggccgcctgactggaaaaccaggcactccaccccctcctctccgggcccccgtcctcccccggagaatacgacctttcggccatgttagccaggagcgaggggcagggctaaggggccggcggccactcggcatctgggttttagtcaggcagtgctccaggcgcctggctgccaggctacgggagaaaagtcctccgctcggccgcacccgttagaggcgctctccactgctgtcctcttcagctcaagatggtggcctgccgggcgattggcatcctcagccgcttttctgccttcaggatcctccgctcccgaggttatatatgccgcaattttacagggtcttctgctttgctgaccagaacccatattaactatggagtcaaaggggatgtggcagttgttcgaattaactctcccaattcaaaggtaaatacactgagtaaagagctacattcagagttctcagaagttatgaatgaaatctgggctagtgatcaaatcagaagtgccgtccttatctcatcaaagccaggctgctttattgcaggtgctgatatcaacatgttagccgcttgcaagacccttcaagaagtaacacagctatcacaagaagcacagagaatagttgagaaacttgaaaagtccacaaagcctattgtggctgccatcaatggatcctgcctgggaggaggacttgaggttgccatttcatgccaatacagaatagcaacaaaagacagaaggatgttaagcatctggctattcttggtgcagggctgatgggagcaggcatcgcccaagtctccgtggataaggggctaaagactatacttaaagatgccaccctcactgcgctagaccgaggacagcaacaagtgttcaaaggattgaatgacaaagtgaagaagaaagctctaacatcatttgaaagggattccatcttcagcaacttgactgggcagcttgattaccaaggttttgaaaaggccgacatggtgattgaagctgtgtttgaggaccttagtcttaagcacagagtgctaaaggaagtagaagcggtgattccagatcactgtatctttgccagtaacacatctgctctcccaatcagtgaaatcgctgctgtcagcaaaagacctgagaaggtgattggcatgcactacttctctcccgtggacaagatgcagctgctggagattatcacgaccgagaaaacttccaaagacaccagtgcttcagctgtagcagttggtctcaagcaggggaaggtcatcattgtggttaaggatggacctggcttctatactaccaggtgtcttgcgcccatgatgtctgaagtcatccgaatcctccaggaaggagttgacccgaagaagctggattccctgaccacaagctttggctttcctgtgggtgccgccacactggtggatgaagttggtgtggatgtagcgaaacatgtggcggaagatctgggcaaagtctttggggagcggtttggaggtggaaacccagaactgctgacacagatggtgtccaagggcttcctaggtcgtaaatctgggaagggcttttacatctatcaggagggtgtgaagaggaaggatttgaattctgacatggatagtattttagcgagtctgaagctgcctcctaagtctgaagtctcatcagacgaagacatccagttccgcctggtgacaagatttgtgaatgaggcagtcatgtgcctgcaagaggggatctnggccacacctgcagagggagacatcggagccgtctttgggcttggcttcccgccttgtctgggagggcctttccgctttgtggatctgtatggcgcccagaagatagtggaccggctcaagaaatatgaagctgcctatggaaaacagttcaccccatgccagctgctagctgaccatgctaacagccctaacaagaagttctaccagtgagcaggcctcatgcctcgctcagtcagtgcactaaccccagctgccggcagtgctggttctccaacagagtggtgtctagatttatcagagtaacgagaagacaaactccggcactgggtttgctccctgattaaagtgccttcagccaagaccatctctccctcctggtgaagtgtgacttcgaattagtttgcacttcctattggaaggtagagcccactgctcattgtataagccccgaggcctagagtggcagccaagagccatctgaagccacctctctgcctgttcctcccaagaggccagggtggccaggggtggtgagggcagttctgcacccagccaaacacataacaataaaaaccaaactctgtgtcagcatctttgcccttctggtttaaacgcctccttcaaaaagcaatctggaagaaagccctgtgctttgggggagtaagaatgtgtgtgcagaattctaggcagcaccttagggagggactgggatgagagaaagtgggacctggtgggctcaaccacacacacctgtctgtgcagatgctttgcccaggcttctcaccacggtgtaccgggatattaaacctctttccccagc

SEQ ID NO: 293011 - DNA, 343 bp, Homo sapiens
ccagaacccatattaactatggagtcaaaggggatgtggcagttgttcgaattaactctcccaattcaaaggtatctcatttaatttgcagtttttttctgctaaccgcattatgaatctagtcctgaatgggaaagatgtatcccatatttccccaaatctaccaatctggcagtaatcttacatgaatttacagttttgacagttatgttaaactttgacagattgccaagggagccagttttctaaagcagaggttcttgcgtaagaattcctcttgttgaccttaggtgccaccagcctcctggttatagtgtagaatgaggaggtgacttattagaga

SEQ ID NO: 293012 - DNA, 805 bp, Homo sapiens
cgggacgcgggctcaaggcattgaatcccatggcccggccgggccccggacccttaaaggaccgggcggttcctcctcccgcggcgcgcgcggagcagtttcccctcgccgcttccgggactgcacacgtgcctccgagcaaccacgacaacagctagcctcccgcccgccctcctctcgcagccgcagcccgccttcaaagcggaccaaggcccgcggacggcgcagccaataggctttctggggtttgctctctagctaatgggaagactatctttttacgcccttggccagtaagagagcagatggtggcctcagcgacctatggcaaagtcctttcccacccctaacggaggctctgggagagagaggatgcaggaccaagacccgagaagaagcctgcgtctgggcctgggtgggacggattcaggcgcgcagcaacaacagggtgcctggcacaaggagatactcagtaaaactctcatctgctgtgtcattaaggggaacacttaatggctcacgcctgtaatcccagcactttgggaggccgaggcggaaggatcacctgagcccaggagttggagaccagcctgggcaacagattgagaccctgtctcaacaaagaagaagaagaagaaaaaggccaggcgccgtggctaatgtctgtaatcccagcactttgggaggccaagaagggagaactgcttgaggccaggagttcgagaccagcctggtcaacatagcgagacaccccccccatctcaaaaataaataaatcaaaataaaaaataaagaggaggccggg

SEQ ID NO: 293013 - DNA, 2462 bp, Homo sapiens
  misc_feature (2)..(2): n is a, c, g, or t
  misc_feature (6)..(7): n is a, c, g, or t
  misc_feature (867)..(867): n is a, c, g, or t
  misc_feature (920)..(921): n is a, c, g, or t
  misc_feature (2183)..(2183): n is a, c, g, or t
  misc_feature (2186)..(2188): n is a, c, g, or t
  misc_feature (2198)..(2198): n is a, c, g, or t
  misc_feature (2200)..(2200): n is a, c, g, or t
  misc_feature (2233)..(2233): n is a, c, g, or t
  misc_feature (2235)..(2238): n is a, c, g, or t
  misc_feature (2243)..(2243): n is a, c, g, or t
  misc_feature (2252)..(2252): n is a, c, g, or t
  misc_feature (2260)..(2260): n is a, c, g, or t
  misc_feature (2267)..(2267): n is a, c, g, or t
  misc_feature (2272)..(2272): n is a, c, g, or t
  misc_feature (2277)..(2277): n is a, c, g, or t
  misc_feature (2290)..(2291): n is a, c, g, or t
  misc_feature (2293)..(2293): n is a, c, g, or t
  misc_feature (2304)..(2305): n is a, c, g, or t
  misc_feature (2318)..(2318): n is a, c, g, or t
  misc_feature (2323)..(2323): n is a, c, g, or t
  misc_feature (2325)..(2325): n is a, c, g, or t
  misc_feature (2330)..(2332): n is a, c, g, or t
  misc_feature (2335)..(2335): n is a, c, g, or t
  misc_feature (2337)..(2337): n is a, c, g, or t
  misc_feature (2352)..(2352): n is a, c, g, or t
  misc_feature (2355)..(2355): n is a, c, g, or t
  misc_feature (2363)..(2363): n is a, c, g, or t
  misc_feature (2393)..(2394): n is a, c, g, or t
  misc_feature (2399)..(2399): n is a, c, g, or t
  misc_feature (2402)..(2403): n is a, c, g, or t
  misc_feature (2416)..(2418): n is a, c, g, or t
  misc_feature (2442)..(2442): n is a, c, g, or t
gncacnnggctgaagcgctgccgctgccgctactgccgctgcagggaaaatgctgagccctcccgggccgggtgggcggcggcggcgagggcggcgacggggacccgcttcccgagcgcggcggcggcggccatggcccggctggctgactacttcatcgtggtaggctatgaccacgagaagccaggatcaggagaaggtctggggaaaataatccagagatttccacagaaggactgggatgatacaccttttccacagggaattgagttgttttgtcagcctggcgggtggcagctgtccagagagaggaagcagccaacgttctttgtggttgtcctgacagacattgactcagatcgacattactgctcatgcctaaccttctatgaggcagagatcaatcttcagggaacaaagaaggaagagattgaaggtgaagcaaaagtgtctggtttaattcagcctgcagaagtgtttgctcccaaaagcctggtgttggtatccagattatattatccagaaatttttagggcttgcctgggtttgatctataccgtgtatgtggacagcctgaatgtctccttggaaagtctaattgcaaacctttgtgcctgccttgtcccagcggctggagggtctcagaagctgttttctttgggtgcaggagatagacagttgatccagactcctttacatgatagtcttcctatcacgggcactagtgtggctctcctgttccagcaattgggcacggtggctcacgcctgtaatctcagcactttgggaggccgaggcgggcagctcacgaggtcaggagatcgagaccatcctggctaacacggtgaaatcccatctctactaaanatacaaaaaattagccgggcatggtggcccgtgtctgcagtcccagctactcnngaggctgaggcaggagaatggcgtgaacccaagaggcggagcttgcagtgagctgagatcgcaccactacactccagactgggcgacagagcgagactccatctcaaaaacaataataataataataataatgtaaaacttaagaaagcatgtgacatttaagaataaagaatttaagtagtatttcaaaaaaaaaaaaaaaaaacacctgcgcgccccatctcttcaggtccagcgccgcctacccccatttcgccatttttaccggcgcgcccgccccgaggcgcagaagtagggcgaacggtggccgcagctcctttctcccggctcagccgccggccagcagccgcgccggaacctcggcccacgtgacgcgggcgcgcgcctatggaactgacggtggagttccgcgaagaaggtgccgcagagaattcgcaaacaccaaccgtaaccagagcagctgggggcgcggcggcgagagaagctgcgaagcgcatgcgcgcaggacgctgtgggaggggaaaggaggggaggagcgtggagcgatcgcctagttcccgcgttgcggggcgcatacgagacttggcgactcgctgcctcagggttgcgtgcctccggccctagcctgcgcaggcggcctgagcttggggctctgctacgccacccacgcccaccttggcggagggcggggccccacggctctcaaacttgcgcgccaaagacggagccacctggcgtactggtggaaagcgcagacttcagagccacacccgtagttaagtattcggactctgagattccagggtggggcccaggccatccgcgttttcacccagcatcgtgtgattcggcagcaggtggtctgtggcccgcactttgagaaaccctggtgcagaaggttcatggttagtggttctctctggaaggaacagtctaaggtttgtaggacttgcgttccacctaccaaagctaatcgagttagaaggctccaaactgaggtgtcatttctcattacggtggtgagaggacgggaccacacactgtgaagtcttcgttcccacatcccacacttcattcttgccgcctaagttgtcgccgtgggactattgaaagggtatcagcgatattcatctttcctataaatgggatctgctttctacagtttcctgccagatgtgtaaagattgcaagaattgaaggtatttcttcaactgaagacctttacagatactcagatgactgaaatcctcttatcactggcnggnnntggtggctcncncctgtaatcccagcactttgggaggctgaggcngnnnnatcanctgaggtcnggagttcnagaccancctgnccaanatggtgaaacccnntntctactaaaannacaaaaattagcngggcntngtggnnngcncntgtaatcccagctantcnggaggctnaggcaggagaatcacttgaacccaggaggnngaggntgnngtgagccgagatnnngccattgcactccagcctgggcancaagagtgaaactccatctc

SEQ ID NO: 293014 - DNA, 1842 bp, Homo sapiens
agaaaataaatatatcttacccttcaactaatatgtttctgaatcttagaaaattactatgatattagtattcaatttcttatattctctgtctccctcttctctcatttcctttccccttttcttcccctctgttccttcccccaatcattctcttctctattctatgtctctgaagctatcctggccttttagtcgtacctcaagctgtacaggacagtagtttaccaagagtagctcgctgctatcgacacaatcgcctgcctgttgtatgttggaagaactcaagaagtggtactctgctcctccgatctggaggaaccataagtggcagctcttcccgttcaagacccgagtattttagaattactgcctccaacaggatgtattcactctgccggaggtaagtgtgtcagtgggctccaaaaagaggtcttccttcctttcttcttatttgaatctttaataggccatttgcatccatagccctgagatagataaaaatgcctgaaaataagaacaaggtctccaggatacgagcaagcatctcattggcattctcggaacaattaccttactgaaagtacctctagtaggtgagaaggtgaaaggtaaagtactcaccccctatgaatttctcttgtctttctcttcccagtttgcttcttttctagcatgactaaagataacttgaagaacaggattttcccagcccaatagaggacatgaaagtcttttgtaggctggggagccacaaactctttctataaagggtcagttggtaaatattttcagtttatgagccatagagtctcttgttgcagctattcaactgtgccgcaaaagcagccacagacagtaaggaaatgagtaggcatggccagttttggcccacaggctataatttgctgacccaggtgtaggcaaggctttcttatgcggtctaattggaatgttttcaagggaatattacttaaaggatgtaaataaagaggcattttcttttttcagttcttgtcatctctcactgtttttcaaatatgttgagtcttattccatgctttactatatgtaaatatatattttctaaaattacattttcaccatccacaagtttagtcattttcatctccaggtaagatttttctttgcatttataaattcctgcttaaacagctctgaaatcactttgtaaattgtaagctttgtacatattttagaaagttatcttaatgttactttcaaccctgttgctcttgaagatagatatgtcattttaaatggcaatttaagtttacaaatattaatatgaaacttcagaaacaagttgggaatatagttttgagattgtggccaaataaacattttgcatgaagttctgaaaaattggcactctgagtatgcagtaatttttctggaattctccgtcattctaactaaattttctctgaagatgagtcatgttgtcggggtgtgatgtcctgctgtttggaaagtttgctatcaaaattatgccagccattgagaaaacagactcatttatcattccaatctgtcagaagtaaaataaaattttaatagatgacttattagaacactggttataaagcatttatgatggtaaaaagtaatatatatccattaagttattagcaggaaggaaatggaataataaaaaataatccaaaagaaggcaagaaaggaaaaaaaaggggacatagaacaaatggaataaataacaagtagtaagatggtagatttaaattcaaatatatccataattgcattaattattaattgactaaatgttccaattcaaagaaagagatcagggtttgcttt

SEQ ID NO: 293015 - DNA, 5026 bp, Homo sapiens
  misc_feature (2)..(2): n is a, c, g, or t
  misc_feature (6)..(7): n is a, c, g, or t
gncacnnggctgaagcgctgccgctgccgctactgccgctgcagggaaaatgctgagccctcccgggccgggtgggcggcggcggcgagggcggcgacggggacccgcttcccgagcgcggcggcggcggccatggcccggctggctgactacttcatcgtggtaggctatgaccacgagaagccaggatcaggagaaggtctggggaaaataatccagagatttccacagaaggactgggatgatacaccttttccacagggaattgagttgttttgtcagcctggcgggtggcagctgtccagagagaggaagcagccaacgttctttgtggttgtcctgacagacattgactcagatcgacattactgctcatgcctaaccttctatgaggcagagatcaatcttcagggaacaaagaaggaagagattgaaggtgaagcaaaagtgtctggtttaattcagcctgcagaagtgtttgctcccaaaagcctggtgttggtatccagattatattatccagaaatttttagggcttgcctgggtttgatctataccgtgtatgtggacagcctgaatgtctccttggaaagtctaattgcaaacctttgtgcctgccttgtcccagcggctggagggtctcagaagctgttttctttgggtgcaggagatagacagttgatccagactcctttacatgatagtcttcctatcacgggcactagtgtggctctcctgttccagcaattgggaattcaaaatgtcctcagcctcttttgtgcagtcctcacagaaaataaggttctcttccattctgcaagtttccagagacttagtgatgcttgtagagccctggaatctttaatgtttcctcttaaatatagttatccttatatccctattctcccggctcagctactggaagttctaagttccccaacgcctttcattattggagtacattctgtctttaaaactgatgtccatgaacttttagatgtaatcatagcagatttggatggaggcactattaaaattcccgaatgtattcacctctcttccctcccagaaccacttctacatcagactcaatcagctctttctttgattttacacccagatttggaagtagcagatcatgcttttcctcctccacgaacagctttatcccactcaaaaatgctggataaagaggtgcgagccgttttccttagattatttgcacaactcttccaaggatatagatcctgcctgcaacttataagaattcatgcagagccagtaatacatttccacaagacagcattcttggggcagcgtggtttggtcgagaatgatttcctcactaaagtactcagtggaatggcatttgcaggttttgtttcagaaagaggtcctccttatagatcttgtgatctctttgatgagttggtagcctttgaagtagagagaattaaagttgaagaaaataacccagtgaagatgataaagcatgtcagggaacttgctgagcaactattcaaaaatgagaatccaaatcctcatatggcattccagaaagttccacggccaacagaaggatcccatttgcgagttcatattcttcctttcccagagattaatgaagcccgggttcaggaattaatacaggaaaatgttgctaagaaccagaatgcacctcctgccacacgaatagaaaagaaatgtgttgtgccagcaggtccacctgttgtttcgataatggacaaggtgacgacagttttcaacagtgcacaaagactagaagttgtcagaaactgtatctcattcatatttgaaaataaaattttggaaactgaaaagacccttcctgctgcactcagagcccttaaaggaaaggcagcaagacagtgtctcactgatgaattgggtttgcatgtccagcaaaaccgggcaatattagaccatcaacagtttgactacataataaggatgatgaattgtactctacaggattgttcaagtttagaagaatacaacattgccgcagcattactccctttgaccagtgctttctataggaaacttgcccctggagtcagccagtttgcttacacgtgtgtacaagaccaccccatttggacaaatcagcaattttgggagacaaccttttacaatgcagtgcaggaacaggttcgctccctttatctctcagccaaggaagacaatcatgccccgcatctgaagcaaaaggataagcttcctgatgaccattatcaggagaagacagcaatggacctggcagctgagcaactacgcctttggcctaccctgagcaagtcaactcagcaagagctagtgcaacatgaggaaagcactgtctttagtcaggccattcactttgcaaacctcatggtgaacctgctagttccactcgacacaagtaaaaacaagctcctaagaacatcagcgccaggtgactgggagagcggaagcaacagcattgtcacaaacagtattgcaggaagtgtagctgagagctatgatacagagagtgggtttgaagattcagagaatactgacattgccaattctgttgtgcggttcattacccgatttattgacaaagtttgtacagagagtggagttactcaggatcacatcaagagccttcattgcatgataccaggaattgtagctatgcacattgagaccctagaagcagtacatcgagaaagcagaagacttccgcctattcagaagcccaagattcttagacctgctctgctgccaggagaagaaattgtctgtgagggtcttcgagtcttgctggatcctgatggaagagaagaagctactggaggtcttcttggaggccctcagctcctgccagcagaaggagccttgttcctcaccacatacagaattctcttcagaggaacaccccatgatcagttagtgggtgagcagacagttgtgcggagctttcccattgcctccatcaccaaggagaagaagattacaatgcagaaccagctacagcagaacatgcaagaaggactgcagatcacatcagcatcttttcagttgattaaggtagcatttgatgaagaagtcagtccagaagtagtagagatctttaagaaacagctgatgaagttccgttatcctcagtccattttcagtacctttgcttttgctgctggacaaactaccccacaaataattttaccaaaacagaaggaaaagaacacttcttttcgtaccttctcaaaaacaattgtgaaaggtgccaaaagggcagggaaaatgacaattgggcggcaatatttactgaagaagaagacagggacaattgtggaagaaagagtaaatcgtcctggatggaatgaagatgatgatgtatctgtttcagatgagagtgagctccccacaagtaccaccctgaaggcctccgagaagtctacaatggaacagttggtggaaaaagcttgtttcagagactatcagcgtttaggtttaggaaccataagtggcagctcttcccgttcaagacccgagtattttagaattactgcctccaacaggatgtattcactctgccggaggtaagtgtgtcagtgggctccaaaaagaggtcttccttcctttcttcttatttgaatctttaataggccatttgcatccatagccctgagatagataaaaatgcctgaaaataagaacaaggtctccaggatacgagcaagcatctcattggcattctcggaacaattaccttactgaaagtacctctagtaggtgagaaggtgaaaggtaaagtactcaccccctatgaatttctcttgtctttctcttcccagtttgcttcttttctagcatgactaaagataacttgaagaacaggattttcccagcccaatagaggacatgaaagtcttttgtaggctggggagccacaaactctttctataaagggtcagttggtaaatattttcagtttatgagccatagagtctcttgttgcagctattcaactgtgccgcaaaagcagccacagacagtaaggaaatgagtaggcatggccagttttggcccacaggctataatttgctgacccaggtgtaggcaaggctttcttatgcggtctaattggaatgttttcaagggaatattacttaaaggatgtaaataaagaggcattttcttttttcagttcttgtcatctctcactgtttttcaaatatgttgagtcttattccatgctttactatatgtaaatatatattttctaaaattacattttcaccatccacaagtttagtcattttcatctccaggtaagatttttctttgcatttataaattcctgcttaaacagctctgaaatcactttgtaaattgtaagctttgtacatattttagaaagttatcttaatgttactttcaaccctgttgctcttgaagatagatatgtcattttaaatggcaatttaagtttacaaatattaatatgaaacttcagaaacaagttgggaatatagttttgagattgtggccaaataaacattttgcatgaagttctgaaaaattggcactctgagtatgcagtaatttttctggaattctccgtcattctaactaaattttctctgaagatgagtcatgttgtcggggtgtgatgtcctgctgtttggaaagtttgctatcaaaattatgccagccattgagaaaacagactcatttatcattccaatctgtcagaagtaaaataaaattttaatagatgacttattagaacactggttataaagcatttatgatggtaaaaagtaatatatatccattaagttattagcaggaaggaaatggaataataaaaaataatccaaaagaaggcaagaaaggaaaaaaaaggggacatagaacaaatggaataaataacaagtagtaagatggtagatttaaattcaaatatatccataattgcattaattattaattgactaaatgttccaattcaaagaaagagatcagggtttgcttt

SEQ ID NO: 293016 - DNA, 847 bp, Homo sapiens
  misc_feature (2)..(2): n is a, c, g, or t
  misc_feature (6)..(7): n is a, c, g, or t
gncacnnggctgaagcgctgccgctgccgctactgccgctgcagggaaaatgctgagccctcccgggccgggtgggcggcggcggcgagggcggcgacggggacccgcttcccgagcgcggcggcggcggccatggcccggctggctgactacttcatcgtggtaggctatgaccacgagaagccaggatcaggagaaggtctggggaaaataatccagagatttccacagaaggactgggatgatacaccttttccacagggaattgagttgttttgtcagcctggcgggtggcagctgtccagagagaggaagcagccaacgttctttgtggttgtcctgacagacattgactcagatcgacattactgctcatgcctaaccttctatgaggcagagatcaatcttcagggaacaaagaaggaagagattgaaggtgaagcaaaagtgtctggtttaattcagcctgcagaagtgtttgctcccaaaagcctggtgcttgcctgggtttgatctataccgtgtatgtggacagcctgaatgtctccttggaaagtctaattgcaaacctttgtgcctgccttgtcccagcggctggagggtctcagaagctgttttctttgggtgcaggagatagacagttgatccagactcctttacatgatagtcttcctatcacgggcactagtgtggctctcctgttccagcaattggtgttcctagaggaaggtcatatagcagttaaactctgccattttgcctcttactgcacctgcgtgagctcactcacccaactcctgagctcttatcaggaagctgccgatcaccaatttcaggtatttctatc

SEQ ID NO: 293017 - DNA, 866 bp, Homo sapiens
gattattgagtttcagcataaaacctggcaatacatgtcttccattatagttcagccatgctatttatttattttctgattagtttttaaaatgtttttaaattgttgtaaaatacatatataacataaaataatctaagtgtacaattcagtggcattaattacatctacaatgttgtgcagccatcactgttatctatttctaaaacttttttattaccccaaacactctacccattaagcagtaactcctgtttcccctggtaacttctaatgtattttctgtctctataaagttgcctgttctagatatttcacataagtggacttagataatatttgtacttttgggtttggtttatttcatttagtataatgttttcaaggttcatacgtgttgtggcatgtatcagaatttcattcctttttatggctgagtaactttccatggtatggctgtcccacattttatccattcatctgttgatggacatttgagttacttctccctcccttttagctattataaataataatacatgaatatccacatataagtatctgtttgagtcctttcatttcttttgggtatatatgtagaagtggaattgctgggtcataatggtaattctctttaacttttttgaggaaccagtaaactgtaattaacttttaattctaaaatatccagaatttgtttttatcctgcttgtctgtgttctttcattttgaatactctgactcatcctaggaattgtagctatgcacattgagaccctagaagcagtacatcgagaaagcagaagacttccgcctattcagaaggtaattccagactacatgctttcagggtatagcctctcttc

SEQ ID NO: 293018 - DNA, 164 bp, Homo sapiens
ggatccccggaacacacgccttctccagcctgcaatctacacacgtggggaagcgcgtccaagtggtgccaggaggcaggagggaagcgcaaaggttaatgcacaccaagtccacgtcctgatgcagcagcacctcatcaatgcggctagtgtagaaggggaca

SEQ ID NO: 293019 - DNA, 578 bp, Homo sapiens
gccccggcgccgggcttccccccgccttaggaagctcgcccttccagccagcggccccgactgtactggctccgcggcagccttggctcaggcggccagcgctggacagcggccggggaatcccgtgctgcgcggcgcggccgaggggcgggcctggcccggagagtaccgcggcttcggccctctgccgtgcgcctcgcgcgttttgcatcgctgagcgaagcagagacgcccccccttttcggtctccttaactggttcgtcttcgtagttggaattcctttgcatgaggctatggaatatacactaccttctctggacgttaactattagctacagcttgaggactcccaaatttatgcctttagcaacacgatccgagccctgcaacttttcgacctcattttgagccaacattattttgctcccttattttgttgaagtactttctccagttatttacttaaaatgttcacatgagagacatactatttgattccttgcttgtactaagatgtaatgattgtaacgacttcattttcctagacccagataaaagtctcgcttcattcatgaaa

SEQ ID NO: 293020 - DNA, 1034 bp, Homo sapiens
gttgctaggctccgacagccgggaagtcccgcctgccgtgtagtcgccgccgtcgctgccgctgccgctgccgccgtcgttgttgttgtgctcggtgcgctgagctccgcggctccgcgagccggttccgtccccttcccgccgccgccatgaagtggatgttcaaggaggaccactcgctggaacacagatgcgtggagtccgcgaagattcgagcgaaatatcccgacagggttccggtgattgtggaaaaggtctcaggctctcagattgttgacattgacaaacggaagtacttggttccatctgatatcactgtggctcagttcatgtggatcatcaggaaaaggatccagcttccttctgaaaaggcgatcttcctgtttgtggataagacagtcccacagtccagcctaactatgggacagctttacgagaaggaaaaagatgaagatggattcttatatgtggcctacagcggagagaacacttttggcttctgagggccattgctgggctaggtgcaccgtaactgcttgtgtatcttgtaaatagccagccattttcagttattataccagaacctcttcacatagacctattagtgcatttgtaactggatttatttcttaatatattggaaggttttgtttccttagactagtaaattatcatacagagttttattttgagtttttctttttgtgcattgtcctcatgcctgtattctccaggaaacttgtccttctggaaatcatattgaatgatatttctatatcgaagtgaggtaggtgcggtattaaagtgaaagggaaggtgatgcatttattctgggttatgcttgaagtgttagatggctaagtattaaaattatccaaattaaatccttagcagtcagaacacttgcttcactagaatatgccaactgccaatcatgttggactgagctaatttgttcctctttctgaaactattaaggtaaataattaacaataaaaattctcttataaaggcaaaatgtactgtggccatgt

SEQ ID NO: 293021 - DNA, 1014 bp, Homo sapiens
gttgctaggctccgacagccgggaagtcccgcctgccgtgtagtcgccgccgtcgctgccgctgccgctgccgccgtcgttgttgttgtgctcggtgcgctgagctccgcggctccgcgagccggttccgtccccttcccgccgccgccatgaagtggatgttcaaggaggaccactcgctggaacacagatgcgtggagtccgcgaagattcgagcgaaatatcccgacagggttccggtgattgtggaaaaggtctcaggctctcagattgttgacattgacaaacggaagtacttggttccatctgatatcactgtggctcagttcatgtggatcatcaggaaaaggatccagcttccttctgaaaaggcgatcttcctgtttgtggataagacagtcccacagtccagcctaactatgggacagctttacgagaaggaaaaagatgaagatggattcttatatgtggcctacagcggagagaacacttttggcttctgagggccattgctgggctaggtgcaccgtaactgcttgtgtatcttgtaaatagccagccattttcagttattataccagaacctcttcacatagacctattagtgcatttgtaactggatttatttcttaatatattggaaggttttgtttccttagactagtaaattatcatacagagttttattttgagtttttctttttgtgcattgtcctcatgcctgtattctccaggaaacttgtccttctggaaatcatattgaatgatatttctatatcgaagtgaggtaggtgcggtattaaagtgaaagggaaggtgatgcatttattctgggttatgcttgaagtgttagatggctaagtattaaaattatccaaattaaatccttagcagtcagaacacttgcttcactagaatatgccaactgccaatcatgttggactgagctaatttgttcctctttctgaaactattaaggtaaataattaacaataaaaattctcttataaaggc

SEQ ID NO: 293022 - DNA, 841 bp, Homo sapiens
gttgctaggctccgacagccgggaagtcccgcctgccgtgtagtcgccgccgtcgctgccgctgccgctgccgccgtcgttgttgttgtgctcggtgcgctgagctccgcggctccgcgagccggttccgtccccttcccgccgccgccatgaagtggatgttcaaggaggaccactcgctggaacacagatgcgtggagtccgcgaagattcgagcgaaatatcccgacagggttccgcctaactatgggacagctttacgagaaggaaaaagatgaagatggattcttatatgtggcctacagcggagagaacacttttggcttctgagggccattgctgggctaggtgcaccgtaactgcttgtgtatcttgtaaatagccagccattttcagttattataccagaacctcttcacatagacctattagtgcatttgtaactggatttatttcttaatatattggaaggttttgtttccttagactagtaaattatcatacagagttttattttgagtttttctttttgtgcattgtcctcatgcctgtattctccaggaaacttgtccttctggaaatcatattgaatgatatttctatatcgaagtgaggtaggtgcggtattaaagtgaaagggaaggtgatgcatttattctgggttatgcttgaagtgttagatggctaagtattaaaattatccaaattaaatccttagcagtcagaacacttgcttcactagaatatgccaactgccaatcatgttggactgagctaatttgttcctctttctgaaactattaaggtaaataattaacaataaaaattctcttataaaggc

SEQ ID NO: 293023 - DNA, 673 bp, Homo sapiens
acgagaaggaaaaagatgaagatggattcttatatcttcctgtttgtggataagacagtcccacagtccagcctaactatgggacagctttacgagaaggaaaaagatgaagatggattcttatatgtggcctacagcggagagaacacttttggcttctgagggccattgctgggctaggtgcaccgtaactgcttgtgtatcttgtaaatagccagccattttcagttattataccagaacctcttcacatagacctattagtgcatttgtaactggatttatttcttaatatattggaaggttttgtttccttagactagtaaattatcatacagagttttattttgagtttttctttttgtgcattgtcctcatgcctgtattctccaggaaacttgtccttctggaaatcatattgaatgatatttctatatcgaagtgaggtaggtgcggtattaaagtgaaagggaaggtgatgcatttattctgggttatgcttgaagtgttagatggctaagtattaaaattatccaaattaaatccttagcagtcagaacacttgcttcactagaatatgccaactgccaatcatgttggactgagctaatttgttcctctttctgaaactattaaggtaaataattaacaataaaaattctcttataaaggc

SEQ ID NO: 293024 - DNA, 390 bp, Homo sapiens
gtccgcggcgctactactaccggataaactgcgtctgagataaattatcatacagagttttattttgagtttttctttttgtgcattgtcctcatgcctgtattctccaggaaacttgtccttctggaaatcatattgaatgatatttctatatcgaagtgaggtaggtgcggtattaaagtgaaagggaaggtgatgcatttattctgggttatgcttgaagtgttagatggctaagtattaaaattatccaaattaaatccttagcagtcagaacacttgcttcactagaatatgccaactgccaatcatgttggactgagctaatttgttcctctttctgaaactattaaggtaaataattaacaataaaaattctcttataaaggc

SEQ ID NO: 293025 - DNA, 1121 bp, Homo sapiens
  misc_feature (1050)..(1052): n is a, c, g, or t
  misc_feature (1058)..(1058): n is a, c, g, or t
  misc_feature (1067)..(1068): n is a, c, g, or t
  misc_feature (1072)..(1072): n is a, c, g, or t
  misc_feature (1076)..(1076): n is a, c, g, or t
  misc_feature (1087)..(1088): n is a, c, g, or t
  misc_feature (1093)..(1093): n is a, c, g, or t
  misc_feature (1097)..(1097): n is a, c, g, or t
  misc_feature (1102)..(1102): n is a, c, g, or t
gttgctaggctccgacagccgggaagtcccgcctgccgtgtagtcgccgccgtcgctgccgctgccgctgccgccgtcgttgttgttgtgctcggtgcgctgagctccgcggctccgcgagccggttccgtccccttcccgccgccgccatgaagtggatgttcaaggaggaccactcgctggaacacagatgcgtggagtccgcgaagattcgagcgaaatatcccgacagggttccggtgattgtggaaaaggtctcaggctctcagattgttgacattgacaaacggaagtacttggttccatctgatatcactgtggctcagttcatgtggatcatcaggaaaaggatccagcttccttctgaaaaggcgatcttcctgtttgtggataagacagtcccacagtccagcctaactatgggacagctttacgagaaggaaaaagatgaagatggattcttatatgtggcctacagcggagagaacacttttggcttctgagggccattgctgggctaggtgcaccgtaactgcttgtgtatcttgtaaatagccagccattttcagttattataccagaacctcttcacatagacctattagtgcatttgtaactggatttatttcttaatatattggaaggttttgtttccttagactagtaaattatcatacagagttttattttgagtttttctttttgtgcattgtcctcatgcctgtattctccaggaaacttgtccttctggaaatcatattgaatgatatttctatatcgaagtgaggtaggtgcggtattaaagtgaaagggaaggtgatgcatttattctgggttatgcttgaagtgttagatggctaagtattaaaattatccaaattaaatccttagcagtcagaacacttgcttcactagaatatgccaactgccaatcatgttggactgagctaatttgttcctctttctgaaactattaaggtaaataattaacaataaaaattctcttataaaggccaaaaaaaaaaaaaaaaaaaaaaaacaaaaaaaaannntttggngccgccggnncccngagnaaaaaggtttnnaaacnccanttctnttgggggccgcggggccca

SEQ ID NO: 293026 - DNA, 970 bp, Homo sapiens
ggtgaccagagattcatacgatacattcagcgtcgttgttgttgtgctcggtgcgctgagctccgcggctccgcgagccggttccgtccccttcccgccgccgccatgaagtggatgttcaaggaggaccactcgctggaacacagatgcgtggagtccgcgaagattcgagcgaaatatcccgacagggttccggtgattgtggaaaaggtctcaggctctcagattgttgacattgacaaacggaagtacttggttccatctgatatcactgtggctcagttcatgtggatcatcaggaaaaggatccagcttccttctgaaaaggcgatcttcctgtttgtggataagacagtcccacagtccagcctaactatgggacagctttacgagaaggaaaaagatgaagatggattcttatatgtggcctacagcggagagaacacttttggcttctgagggccattgctgggctaggtgcaccgtaactgcttgtgtatcttgtaaatagccagccattttcagttattataccagaacctcttcacatagacctattagtgcatttgtaactggatttatttcttaatatattggaaggttttgtttccttagactagtaaattatcatacagagttttattttgagtttttctttttgtgcattgtcctcatgcctgtattctccaggaaacttgtccttctggaaatcatattgaatgatatttctatatcgaagtgaggtaggtgcggtattaaagtgaaagggaaggtgatgcatttattctgggttatgcttgaagtgttagatggctaagtattaaaattatccaaattaaatccttagcagtcagaacacttgcttcactagaatatgccaactgccaatcatgttggactgagctaatttgttcctctttctgaaactattaaggtaaataattaacaataaaaattctcttataaaggc

SEQ ID NO: 293027 - DNA, 762 bp, Homo sapiens
taccccaaagatttttgagcatcaccattgacaaacggaagtacttggttccatctgatatcactgtggctcagttcatgtggatcatcaggaaaaggatccagcttccttctgaaaaggcgatcttcctgtttgtggataagacagtcccacagtccagcctaactatgggacagctttacgagaaggaaaaagatgaagatggattcttatatgtggcctacagcggagagaacacttttggcttctgagggccattgctgggctaggtgcaccgtaactgcttgtgtatcttgtaaatagccagccattttcagttattataccagaacctcttcacatagacctattagtgcatttgtaactggatttatttcttaatatattggaaggttttgtttccttagactagtaaattatcatacagagttttattttgagtttttctttttgtgcattgtcctcatgcctgtattctccaggaaacttgtccttctggaaatcatattgaatgatatttctatatcgaagtgaggtaggtgcggtattaaagtgaaagggaaggtgatgcatttattctgggttatgcttgaagtgttagatggctaagtattaaaattatccaaattaaatccttagcagtcagaacacttgcttcactagaatatgccaactgccaatcatgttggactgagctaatttgttcctctttctgaaactattaaggtaaataattaacaataaaaattctcttataaaggc

SEQ ID NO: 293028 - DNA, 2270 bp, Homo sapiens
acgcccagctaattttttgtattttttagtagagacggggtttcaccgttgttagccaggatggtctcaatctcctgaccttgtgatccacccgcctcggcctcccaaactgctgggattacaggtgtgagccaccgcgcccggcttacttttgtatttttagtagagacagggtttcactatgttggtcaggctggtcttgaactcccgacctcaggtgatccacttaatatattttatttgacccagtatatccataattttatcatttcaacatgtaatcaaaattgagctattttgctgcattttcatactaagtctgaagccttgtttatgttttacactgcacatcccaattcacacgagccagactttcaagtgctgaatgtagctagtggctgctgtggcagtgatacaggacatttcaatcagagcagagatttctattgaacagttctgttccagggagtccttattttacaaattccaggctaagaggtcctcacagggagcaccgtttttattgtacaagatgctgatgacaggttctttcatattcaaattcagacctcccccacattgttacttaataattctcatctacccacacagccatccgagctaagcttgcaaatggggcaggaagaacaggaaaaaaactcaaaacctcccccttcataaatgtggtatttgtccatgtttacatggaggttccactcagcccttgaggagcaaagcagcaagtggggcagtcactgtttcctcaggttgaggccttggactccttatcttccccactggctcttggtttatgagttccccttttaaggatctgttgtgacttacctatctgggctagtgacctcagatgtctcagactgagcatcttaccactgtttctggttgatcccttcactcatggtcttaacacatttgcacttcctctcatctcagagagtacagtcacggggcagagcttgcatagggatccaggtgttactagtcttactctggagctggtccaactcagttcatggcacagaactagataggtctccctgcgcatctgtttactgcttagggaagccagcttttctacccacacacgttttagtttgaagagtatctatttttggagggttctttgggagttgggcaggcttctttggatcccagatacatttagagctttttgcattaagtgtgaggaaaataacttctctttgatgatgttgatacaccatgtgggcaccctggggcacaggggtttagctggggagattccatgagaatgaacccaaactactcttctttgctagggtcctttacccacacagaggtgagcctttcaggttcttcattttgcttagtttcttcccttgtccttggcatttaagaggcatccatgtgttagccagccaaagccccctgaaggagctggctgctttaaaggatttacttgggaggatgtcaaatggctttgccttctgcagacttcatttattttaatctttttatggctcctttctcttgctttaaaacaggattataagcacacagcaggtactgacacctgaagtcttactaaattcctgtcctcaggccatcctttttctcctgaaacctggactccaattttcaatgacgtttttgtttttctctttcaagcctaactatgggacagctttacgagaaggaaaaagatgaagatggattcttatatgtggcctacagcggagagaacacttttggcttctgagggccattgctgggctaggtgcaccgtaactgcttgtgtatcttgtaaatagccagccattttcagttattataccagaacctcttcacatagacctattagtgcatttgtaactggatttatttcttaatatattggaaggttttgtttccttagactagtaaattatcatacagagttttattttgagtttttctttttgtgcattgtcctcatgcctgtattctccaggaaacttgtccttctggaaatcatattgaatgatatttctatatcgaagtgaggtaggtgcggtattaaagtgaaagggaaggtgatgcatttattctgggttatgcttgaagtgttagatggctaagtattaaaattatccaaattaaatccttagcagtcagaacacttgcttcactagaatatgccaactgccaatcatgttggactgagctaatttgttcctctttctgaaactattaaggtaaataattaacaataaaaattctcttataaaggc

SEQ ID NO: 293029 - DNA, 1138 bp, Homo sapiens
gttgctaggctccgacagccgggaagtcccgcctgccgtgtagtcgccgccgtcgctgccgctgccgctgccgccgtcgttgttgttgtgctcggtgcgctgagctccgcggctccgcgagccggttccgtccccttcccgccgccgccatgaagtggatgttcaaggaggaccactcgctggaacacagatgcgtggagtccgcgaagattcgagcgaaatatcccgacagggttccggtgattgtggaaaaggtctcaggctctcagattgttgacattgacaaacggaagtacttggttccatctgatatcactgtggctcagttcatgtggatcatcaggaaaaggatccagcttccttctgaaaaggcgatcttcctgtttgtggataagacagtcccacagtccaggattataagcacacagcaggtactgacacctgaagtcttactaaattcctgtcctcaggccatcctttttctcctgaaacctggactccaattttcaatgacgtttttgtttttctctttcaagcctaactatgggacagctttacgagaaggaaaaagatgaagatggattcttatatgtggcctacagcggagagaacacttttggcttctgagggccattgctgggctaggtgcaccgtaactgcttgtgtatcttgtaaatagccagccattttcagttattataccagaacctcttcacatagacctattagtgcatttgtaactggatttatttcttaatatattggaaggttttgtttccttagactagtaaattatcatacagagttttattttgagtttttctttttgtgcattgtcctcatgcctgtattctccaggaaacttgtccttctggaaatcatattgaatgatatttctatatcgaagtgaggtaggtgcggtattaaagtgaaagggaaggtgatgcatttattctgggttatgcttgaagtgttagatggctaagtattaaaattatccaaattaaatccttagcagtcagaacacttgcttcactagaatatgccaactgccaatcatgttggactgagctaatttgttcctctttctgaaactattaaggtaaataattaacaataaaaattctcttataaaggc

SEQ ID NO: 293030 - DNA, 2216 bp, Homo sapiens
acgcccagctaattttttgtattttttagtagagacggggtttcaccgttgttagccaggatggtctcaatctcctgaccttgtgatccacccgcctcggcctcccaaactgctgggattacaggtgtgagccaccgcgcccggcttacttttgtatttttagtagagacagggtttcactatgttggtcaggctggtcttgaactcccgacctcaggtgatccacttaatatattttatttgacccagtatatccataattttatcatttcaacatgtaatcaaaattgagctattttgctgcattttcatactaagtctgaagccttgtttatgttttacactgcacatcccaattcacacgagccagactttcaagtgctgaatgtagctagtggctgctgtggcagtgatacaggacatttcaatcagagcagagatttctattgaacagttctgttccagggagtccttattttacaaattccaggctaagaggtcctcacagggagcaccgtttttattgtacaagatgctgatgacaggttctttcatattcaaattcagacctcccccacattgttacttaataattctcatctacccacacagccatccgagctaagcttgcaaatggggcaggaagaacaggaaaaaaactcaaaacctcccccttcataaatgtggtatttgtccatgtttacatggaggttccactcagcccttgaggagcaaagcagcaagtggggcagtcactgtttcctcaggttgaggccttggactccttatcttccccactggctcttggtttatgagttccccttttaaggatctgttgtgacttacctatctgggctagtgacctcagatgtctcagactgagcatcttaccactgtttctggttgatcccttcactcatggtcttaacacatttgcacttcctctcatctcagagagtacagtcacggggcagagcttgcatagggatccaggtgttactagtcttactctggagctggtccaactcagttcatggcacagaactagataggtctccctgcgcatctgtttactgcttagggaagccagcttttctacccacacacgttttagtttgaagagtatctatttttggagggttctttgggagttgggcaggcttctttggatcccagatacatttagagctttttgcattaagtgtgaggaaaataacttctctttgatgatgttgatacaccatgtgggcaccctggggcacaggggtttagctggggagattccatgagaatgaacccaaactactcttctttgctagggtcctttacccacacagaggtgagcctttcaggttcttcattttgcttagtttcttcccttgtccttggcatttaagaggcatccatgtgttagccagccaaagccccctgaaggagctggctgctttaaaggatttacttgggaggatgtcaaatggctttgccttctgcagacttcatttattttaatctttttatggctcctttctcttgctttaaaacaggattataagcacacagcaggtactgacacctgaagtcttactaaattcctgtcctcaggccatcctttttctcctgaaacctggactccaattttcaatgacgtttttgtttttctctttcaagcctaactatgggacagctttacgagaaggacttctgagggccattgctgggctaggtgcaccgtaactgcttgtgtatcttgtaaatagccagccattttcagttattataccagaacctcttcacatagacctattagtgcatttgtaactggatttatttcttaatatattggaaggttttgtttccttagactagtaaattatcatacagagttttattttgagtttttctttttgtgcattgtcctcatgcctgtattctccaggaaacttgtccttctggaaatcatattgaatgatatttctatatcgaagtgaggtaggtgcggtattaaagtgaaagggaaggtgatgcatttattctgggttatgcttgaagtgttagatggctaagtattaaaattatccaaattaaatccttagcagtcagaacacttgcttcactagaatatgccaactgccaatcatgttggactgagctaatttgttcctctttctgaaactattaaggtaaataattaacaataaaaattctcttataaaggc

SEQ ID NO: 293031 - DNA, 960 bp, Homo sapiens
gttgctaggctccgacagccgggaagtcccgcctgccgtgtagtcgccgccgtcgctgccgctgccgctgccgccgtcgttgttgttgtgctcggtgcgctgagctccgcggctccgcgagccggttccgtccccttcccgccgccgccatgaagtggatgttcaaggaggaccactcgctggaacacagatgcgtggagtccgcgaagattcgagcgaaatatcccgacagggttccggtgattgtggaaaaggtctcaggctctcagattgttgacattgacaaacggaagtacttggttccatctgatatcactgtggctcagttcatgtggatcatcaggaaaaggatccagcttccttctgaaaaggcgatcttcctgtttgtggataagacagtcccacagtccagcctaactatgggacagctttacgagaaggacttctgagggccattgctgggctaggtgcaccgtaactgcttgtgtatcttgtaaatagccagccattttcagttattataccagaacctcttcacatagacctattagtgcatttgtaactggatttatttcttaatatattggaaggttttgtttccttagactagtaaattatcatacagagttttattttgagtttttctttttgtgcattgtcctcatgcctgtattctccaggaaacttgtccttctggaaatcatattgaatgatatttctatatcgaagtgaggtaggtgcggtattaaagtgaaagggaaggtgatgcatttattctgggttatgcttgaagtgttagatggctaagtattaaaattatccaaattaaatccttagcagtcagaacacttgcttcactagaatatgccaactgccaatcatgttggactgagctaatttgttcctctttctgaaactattaaggtaaataattaacaataaaaattctcttataaaggc

SEQ ID NO: 293032 - DNA, 1753 bp, Homo sapiens
  misc_feature (1057)..(1057): n is a, c, g, or t
cagagtatttgaaatatcccattagcttactgttagtagttgtcttaggaacttcttactaacggtgaatagtaaccgctatttgttgagcatttactaagcactgtgtgtgtgtgtgtgtgtgtgtgtgtgtgagagagagagagagagagagagagagagagagagagagaaagagagagagagtctgtgggttattcccatttgacagattggaatattaaggcaaaaagatactaagtattttgtccaatacctcatagccattgacagagatgggaataaaaattggcctatgtaacatcaccaaagcccacgcagtgcctgtgggaaaaatgaatttcagatttagcttaatgtcacacacacacagcccacaaggaaatgcctgacaattacgctccatgttctgaaactgacgtgtcatcatcaccacagaattgccactttatgcctcagtttacccaacttcaaagtagagaaacatttcatcatttaattttacttgctaggataatgtatgaattagttaatgcttataaagaagtgatttgatgaggggaaagctctatctaaatgctaagtattatttattattcatgtaagcatattactgtacccttcaatcaccttttttggatgtttcaaatgggcaattactgtctctttgtgtaaagctttaaaaatttttaatttaaattaaaagttaatctaatttaggaaaactctgccagctggaatggaacacagacttttttttcccccttttccaaacaaaacagcaattcagaatagactctcttttaatatagtaatgtggataggctttcctgggctagcggtattaggaatgagggctaattagtaatggctgttttgtaatgctggtaatctatgtgttaggattagtgctgataatatatctgattaggtggaattaactgatatttagaaggatggagattcttttgtttatgaaatctccattttggggttacgatgtgtagctggagtggctgagtccttgaaatcaagttaacatggctttcccataacncagtgcccatatatgagtagagccaggaagcaatgagggtcatttgagctcaagaagacctttacatcttaaggcctcagtaaggagccctacaaatagtgaaaatcagagttcaaaggtcagaaatgtcaagtatgctttaaaaggagaagacatatttacctgagctcttcagttaacatccagcagtccttgatgggaaaattctttctatgtagcactttctgtcacatgcctgttgactcaaaagtaactggttttcgttttaaaatagaaaatgaaaaatgtatcattgaaagaaatcactgttttaattcctctcccctacaaatttgcatgttcaaccttccttttaaagtaaccatttttaaatgttccctagcacttaaattttaaggaaatatgcttagaaatcacattattcagttgcacagtttcagttgcccagcagtatcattaaatcctctggagtgattccagtcccacaaaaattagggacccctttacattgtttccatattcaaatggaaatctttttgcaagttagtaattaaagtatttaacctctctctccctccatttattagaaaactcttttttctttattttttcaattacgaaaaaactgctaaagccaatcaagcatttattttgataaaccgcttgtaacagtctcagctaaattctgcaaatacc

SEQ ID NO: 293033 - DNA, 3620 bp, Homo sapiens
cagtgcgcaggcgcggcggccgatgcgagtgtgtatgtgcgggcgagaagatggcggcggcgggggaagcagcgtgagcagccggaggatcgcggagtcccaatgaaacgggcagccatggccctccacagcccgcagtatatttttggagattttagccctgatgaattcaatcaattctttgtgactcctcgatcttcagttgagcttcctccatacagtggaacagttctgtgtggcacacaggctgtggataaactacctgatggacaagaatatcagagaattgagtttggtgtcgatgaagtcattgaacccagtgacactttgccgagaacccccagctacagtatttcaagcacactgaaccctcaggcccctgaatttattctcggttgtacagcttccaaaataacccctgatggtatcactaaagaagcaagctatggctccatcgactgccagtacccaggctctgccctcgctttggatggaagttctaatgtggaggcggaagttttggaaaatgatggtgtctcaggtggtcttggacaaagggagcgtaaaaagaagaaaaagcggccacctggatattacagctatttgaaagatggtggcgatgatagtatctccacagaagccctggtcaatggccatgccaattcagcagtcccgaacagtgtcagtgcagaggatgcagaatttatgggtgacatgcccccgtcagttacgcccaggacttgtaacagcccccagaactccacagactctgtcagtgacattgtgcctgacagtcctttccccggagcactcggcagtgacaccaggactgcagggcagccagaggggggccccggggctgattttggtcagtcctgcttccctgcagaggctggcagagacaccctgtcaaggacagctggggctcagccctgcgttggtaccgatactactgaaaaccttggagttgctaatggacaaatacttgaatcctcgggtgagggcacagctaccaacggggtggagttgcacaccacggaaagcatagacttggacccaaccaaacccgagagtgcatcacctcctgctgacggcacgggctctgcatcaggcacccttcctgtcagccagcccaagtcctgggccagcctctttcatgattctaagccctcttcctcctcgccggtggcctatgtggaaactaagtattcccctcccgccatatctcccctggtttctgaaaagcaggttgaagtcaaagaagggcttgttccggtttcagaggatcctgtagccataaagattgcagagttgctggagaatgtaaccctaatccataaaccagtgtcgttgcaaccccgtgggctgatcaataaagggaactggtgctacattaatgctacactgcaggcattggttgcttgcccgccgatgtaccacctgatgaagttcattcctctgtattccaaagtgcaaaggccttgtacgtcaacacccatgatagacagctttgttcggctaatgaatgagttcactaatatgccagtacctccaaaaccccgacaagctcttggagataaaatcgtgagggatattcgccctggagctgcctttgagcccacatatatttacagactcctgacagttaacaagtcaagcctgtctgaaaagggtcgacaagaagatgctgaggaatacttaggcttcattctaaatggacttcatgaggaaatgttgaacctaaagaagcttctctcaccaagtaatgaaaaacttacgatttccaacggccccaaaaaccactcggtcaatgaagaagagcaggaagaacaaggtgaaggaagcgaggatgaatgggaacaagtgggcccccggaacaagacttccgtcacccgccaggcggattttgttcagactccaatcaccggcatttttggtggacacatcaggtctgtggtttaccagcagagttcaaaagaatctgccactttgcagccatttttcacgttgcagttggatatccagtcagacaagatacgcacagtccaggatgcactggagagcttggtggcaagagaatctgtccaaggttataccacaaaaaccaaacaagaggttgagataagtcgaagagtgactctggaaaaactccctcctgtcctcgtgctgcacctgaaacgattcgtttatgagaagactggtgggtgccagaagcttatcaaaaatattgaatatcctgtggacttggaaattagtaaagaactgctttctccaggggttaaaaataagaattttaaatgccaccgaacctatcggctgtttgcagtggtctaccatcacggcaacagtgcgacgggcggccattacactacagacgtcttccagatcggtctgaatggctggctgcgcatcgatgaccagacagtcaaggtgatcaaccagtaccaggtggtgaaaccaactgctgaacgcacagcctacctcctgtattaccgccgagtggacctgctgtaaaccctgtgtgcgctgtgtgtgcgcccagtgcccgcttcgtaggacaccacctcacactcacttcccgcctctctttagtggctctttagagagaaactctttctccctttgcaaaaatgggctagaatgaaaaggagatgccttggggttcgtgcacaacacagcttctgttgactctaacttccaaatcaaaatcatttggttgaaacagactgttgcttgattttagaaaatacacaaaaacccatatttctgaaataatgctgattcctgagataagaaagtggatttgatccccagtctcattgcttagtagaataaatcctgcaccagcaacaacacttgtaaatttgtgaaaatgaattttatctttccttaaaaaagaaattttttaatccatcacacttttcttccctaccctttagtttttgataaatgataaaaatgagccagttatcaaagaagaactagttcttacttcaaaagaaaaataaacataaaaaataagttgctggttcctaacaggaaaaattttaataattgtactgagagaaactgcttacgtacacattgcagatcaaatatttggagttaaaatgttagtctacatagatgggtgattgtaactttattgccattaaaagatttcaaattgcattcatgcttctgtgtacacataatgaaaaatgggcaaataatgaagatctctccttcagtctgctctgtttaattctgctgtctgctcttctctaatgctgcgtccctaattgtacacagtttagtgatatctaggagtataaagttgtcgcccatcaataaaaatcacaaagttggtttaaaaaacacccccacaaaaaacactttgtggcgcgccttggcccccaaaaaaccttttacagacacttccgtgtcggacagccaggggcccagttaggaacagtactccgtggcccacagcgtggtcccccaaggacaccccggcgcaccgaccagtgtgcggcgttctccgcccaattaaaaacgccggggggaacacgacggtccgaacacaatccgagaggagccgaggccgacggactatcacagagatcacagaccaataaacg

SEQ ID NO: 293034 - DNA, 4076 bp, Homo sapiens
cagtgcgcaggcgcggcggccgatgcgagtgtgtatgtgcgggcgagaagatggcggcggcgggggaagcagcgtgagcagccggaggatcgcggagtcccaatgaaacgggcagccatggccctccacagcccgcagtatatttttggagattttagccctgatgaattcaatcaattctttgtgactcctcgatcttcagttgagcttcctccatacagtggaacagttctgtgtggcacacaggctgtggataaactacctgatggacaagaatatcagagaattgagtttggtgtcgatgaagtcattgaacccagtgacactttgccgagaacccccagctacagtatttcaagcacactgaaccctcaggcccctgaatttattctcggttgtacagcttccaaaataacccctgatggtatcactaaagaagcaagctatggctccatcgactgccagtacccaggctctgccctcgctttggatggaagttctaatgtggaggcggaagttttggaaaatgatggtgtctcaggtggtcttggacaaagggagcgtaaaaagaagaaaaagcggccacctggatattacagctatttgaaagatggtggcgatgatagtatctccacagaagccctggtcaatggccatgccaattcagcagtcccgaacagtgtcagtgcagaggatgcagaatttatgggtgacatgcccccgtcagttacgcccaggacttgtaacagcccccagaactccacagactctgtcagtgacattgtgcctgacagtcctttccccggagcactcggcagtgacaccaggactgcagggcagccagaggggggccccggggctgattttggtcagtcctgcttccctgcagaggctggcagagacaccctgtcaaggacagctggggctcagccctgcgttggtaccgatactactgaaaaccttggagttgctaatggacaaatacttgaatcctcgggtgagggcacagctaccaacggggtggagttgcacaccacggaaagcatagacttggacccaaccaaacccgagagtgcatcacctcctgctgacggcacgggctctgcatcaggcacccttcctgtcagccagcccaagtcctgggccagcctctttcatgattctaagccctcttcctcctcgccggtggcctatgtggaaactaagtattcccctcccgccatatctcccctggtttctgaaaagcaggttgaagtcaaagaagggcttgttccggtttcagaggatcctgtagccataaagattgcagagttgctggagaatgtaaccctaatccataaaccagtgtcgttgcaaccccgtgggctgatcaataaagggaactggtgctacattaatgctacactgcaggcattggttgcttgcccgccgatgtaccacctgatgaagttcattcctctgtattccaaagtgcaaaggccttgtacgtcaacacccatgatagacagctttgttcggctaatgaatgagttcactaatatgccagtacctccaaaaccccgacaagctcttggagataaaatcgtgagggatattcgccctggagctgcctttgagcccacatatatttacagactcctgacagttaacaagtcaagcctgtctgaaaagggtcgacaagaagatgctgaggaatacttaggcttcattctaaatggacttcatgaggaaatgttgaacctaaagaagcttctctcaccaagtaatgaaaaacttacgatttccaacggccccaaaaaccactcggtcaatgaagaagagcaggaagaacaaggtgaaggaagcgaggatgaatgggaacaagtgggcccccggaacaagacttccgtcacccgccaggcggattttgttcagactccaatcaccggcatttttggtggacacatcaggtctgtggtttaccagcagagttcaaaagaatctgccactttgcagccatttttcacgttgcagttggatatccagtcagacaagatacgcacagtccaggatgcactggagagcttggtggcaagagaatctgtccaaggttataccacaaaaaccaaacaagaggttgagataagtcgaagagtgactctggaaaaactccctcctgtcctcgtgctgcacctgaaacgattcgtttatgagaagactggtgggtgccagaagcttatcaaaaatattgaatatcctgtggacttggaaattagtaaagaactgctttctccaggggttaaaaataagaattttaaatgccaccgaacctatcggctgtttgcagtggtctaccatcacggcaacagtgcgacgggcggccattacactacagacgtcttccagatcggtctgaatggctggctgcgcatcgatgaccagacagtcaaggtgatcaaccagtaccaggtggtgaaaccaactgctgaacgcacagcctacctcctgtattaccgccgagtggacctgctgtaaaccctgtgtgcgctgtgtgtgcgcccagtgcccgcttcgtaggacaccacctcacactcacttcccgcctctctttagtggctctttagagagaaactctttctccctttgcaaaaatgggctagaatgaaaaggagatgccttggggttcgtgcacaacacagcttctgttgactctaacttccaaatcaaaatcatttggttgaaacagactgttgcttgattttagaaaatacacaaaaacccatatttctgaaataatgctgattcctgagataagaaagtggatttgatccccagtctcattgcttagtagaataaatcctgcaccagcaacaacacttgtaaatttgtgaaaatgaattttatctttccttaaaaaagaaattttttaatccatcacacttttcttccctaccctttagtttttgataaatgataaaaatgagccagttatcaaagaagaactagttcttacttcaaaagaaaaataaacataaaaaataagttgctggttcctaacaggaaaaattttaataattgtactgagagaaactgcttacgtacacattgcagatcaaatatttggagttaaaatgttagtctacatagatgggtgattgtaactttattgccattaaaagatttcaaattgcattcatgcttctgtgtacacataatgaaaaatgggcaaataatgaagatctctccttcagtctgctctgtttaattctgctgtctgctcttctctaatgctgcgtccctaattgtacacagtttagtgatatctaggagtataaagttgtcgcccatcaataaaaatcacaaagttggtttaaaaaaaaaaaaaaaaaaaaaaaaaaaaaaaaaaaaaaaaaaaaaaaaaaaaaaaaaaaaaaaaaaaaaaaaagcaaaaaaacaaaaaaaagaaaaacaaaaaaacaaagaaaaaaaaaaaaaaaaaaacaaaaacaagacagcgaggcgaggcggcggcgccagcgccagaacatcctcgccccgagaggagagaagagagagaaaccgaagacccgccgcgcgccaacgagcgctagtagacagaagagagggagagcgacagagagagagaggagaggaaaagaatataaagaagcacgagaggggaggagggagcagaataaaaaagaaaaggaggcagggggagaaaacagaaggcgacaggagagcaagaagcagacagctcgtgcgaggagagaggaagcacaccaacatacagagggggaggggaagaggagaagaaagcaaaacgaagacagaggaggagaacacaaactccgagaacaaaaaaagaaacagagtcgaaccgcgcgagggcgggagagaaagaaaaaaaacaaagcgagtccggcgtacgaaggacaggaaagcgagggcgaaagaagaaaaacaaagagagcagagagcgcggactcagagagccgaggagcgagaagaaacgaaaaagaataagaggggagatgagagagaaagagagaagaagagaaacacgcagggaaaaacacaaaaacgccacgggggag

SEQ ID NO: 293035 - DNA, 3427 bp, Homo sapiens
cagtgcgcaggcgcggcggccgatgcgagtgtgtatgtgcgggcgagaagatggcggcggcgggggaagcagcgtgagcagccggaggatcgcggagtcccaatgaaacgggcagccatggccctccacagcccgcagtatatttttggagattttagccctgatgaattcaatcaattctttgtgactcctcgatcttcagttgagcttcctccatacagtggaacagttctgtgtggcacacaggctgtggataaactacctgatggacaagaatatcagagaattgagtttggtgtcgatgaagtcattgaacccagtgacactttgccgagaacccccagctacagtatttcaagcacactgaaccctcaggcccctgaatttattctcggttgtacagcttccaaaataacccctgatggtatcactaaagaagcaagctatggctccatcgactgccagtacccaggctctgccctcgctttggatggaagttctaatgtggaggcggaagttttggaaaatgatggtgtctcaggtggtcttggacaaagggagcgtaaaaagaagaaaaagcggccacctggatattacagctatttgaaagatggtggcgatgatagtatctccacagaagccctggtcaatggccatgccaattcagcagtcccgaacagtgtcagtgcagaggatgcagaatttatgggtgacatgcccccgtcagttacgcccaggacttgtaacagcccccagaactccacagactctgtcagtgacattgtgcctgacagtcctttccccggagcactcggcagtgacaccaggactgcagggcagccagaggggggccccggggctgattttggtcagtcctgcttccctgcagaggctggcagagacaccctgtcaaggacagctggggctcagccctgcgttggtaccgatactactgaaaaccttggagttgctaatggacaaatacttgaatcctcgggtgagggcacagctaccaacggggtggagttgcacaccacggaaagcatagacttggacccaaccaaacccgagagtgcatcacctcctgctgacggcacgggctctgcatcaggcacccttcctgtcagccagcccaagtcctgggccagcctctttcatgattctaagccctcttcctcctcgccggtggcctatgtggaaactaagtattcccctcccgccatatctcccctggtttctgaaaagcaggttgaagtcaaagaagggcttgttccggtttcagaggatcctgtagccataaagattgcagagttgctggagaatgtaaccctaatccataaaccagtgtcgttgcaaccccgtgggctgatcaataaagggaactggtgctacattaatgctacactgcaggcattggttgcttgcccgccgatgtaccacctgatgaagttcattcctctgtattccaaagtgcaaaggccttgtacgtcaacacccatgatagacagctttgttcggctaatgaatgagttcactaatatgccagtacctccaaaaccccgacaagctcttggagataaaatcgtgagggatattcgccctggagctgcctttgagcccacatatatttacagactcctgacagttaacaagtcaagcctgtctgaaaagggtcgacaagaagatgctgaggaatacttaggcttcattctaaatggacttcatgaggaaatgttgaacctaaagaagcttctctcaccaagtaatgaaaaacttacgatttccaacggccccaaaaaccactcggtcaatgaagaagagcaggaagaacaaggtgaaggaagcgaggatgaatgggaacaagtgggcccccggaacaagacttccgtcacccgccaggcggattttgttcagactccaatcaccggcatttttggtggacacatcaggtctgtggtttaccagcagagttcaaaagaatctgccactttgcagccatttttcacgttgcagttggatatccagtcagacaagatacgcacagtccaggatgcactggagagcttggtggcaagagaatctgtccaaggttataccacaaaaaccaaacaagaggttgagataagtcgaagagtgactctggaaaaactccctcctgtcctcgtgctgcacctgaaacgattcgtttatgagaagactggtgggtgccagaagcttatcaaaaatattgaatatcctgtggacttggaaattagtaaagaactgctttctccaggggttaaaaataagaattttaaatgccaccgaacctatcggctgtttgcagtggtctaccatcacggcaacagtgcgacgggcggccattacactacagacgtcttccagatcggtctgaatggctggctgcgcatcgatgaccagacagtcaaggtgatcaaccagtaccaggtggtgaaaccaactgctgaacgcacagcctacctcctgtattaccgccgagtggacctgctgtaaaccctgtgtgcgctgtgtgtgcgcccagtgcccgcttcgtaggacaccacctcacactcacttcccgcctctctttagtggctctttagagagaaactctttctccctttgcaaaaatgggctagaatgaaaaggagatgccttggggttcgtgcacaacacagcttctgttgactctaacttccaaatcaaaatcatttggttgaaacagactgttgcttgattttagaaaatacacaaaaacccatatttctgaaataatgctgattcctgagataagaaagtggatttgatccccagtctcattgcttagtagaataaatcctgcaccagcaacaacacttgtaaatttgtgaaaatgaattttatctttccttaaaaaagaaattttttaatccatcacacttttcttccctaccctttagtttttgataaatgataaaaatgagccagttatcaaagaagaactagttcttacttcaaaagaaaaataaacataaaaaataagttgctggttcctaacaggaaaaattttaataattgtactgagagaaactgcttacgtacacattgcagatcaaatatttggagttaaaatgttagtctacatagatgggtgattgtaactttattgccattaaaagatttcaaattgcattcatgcttctgtgtacacataatgaaaaatgggcaaataatgaagatctctccttcagtctgctctgtttaattctgctgtctgctcttctctaatgctgcgtccctaattgtacacagtttagtgatatctaggagtataaagttgtcgcccatcaataaactgtgtacaattagggacgcagtttagtgatatctaggagtataaagttgtcgcccatcaataaaaatcacaaagttggtttaaaaaaaaaaa

SEQ ID NO: 293036 - DNA, 3673 bp, Homo sapiens
cagtgcgcaggcgcggcggccgatgcgagtgtgtatgtgcgggcgagaagatggcggcggcgggggaagcagcgtgagcagccggaggatcgcggagtcccaatgaaacgggcagccatggccctccacagcccgcagtatgtttggcagagaaagcggaaatggaggtagtggcatgagtcagcagaaagtatatttttggagattttagccctgatgaattcaatcaattctttgtgactcctcgatcttcagttgagcttcctccatacagtggaacagttctgtgtggcacacaggctgtggataaactacctgatggacaagaatatcagagaattgagtttggtgtcgatgaagtcattgaacccagtgacactttgccgagaacccccagctacagtatttcaagcacactgaaccctcaggcccctgaatttattctcggttgtacagcttccaaaataacccctgatggtatcactaaagaagcaagctatggctccatcgactgccagtacccaggctctgccctcgctttggatggaagttctaatgtggaggcggaagttttggaaaatgatggtgtctcaggtggtcttggacaaagggagcgtaaaaagaagaaaaagcggccacctggatattacagctatttgaaagatggtggcgatgatagtatctccacagaagccctggtcaatggccatgccaattcagcagtcccgaacagtgtcagtgcagaggatgcagaatttatgggtgacatgcccccgtcagttacgcccaggacttgtaacagcccccagaactccacagactctgtcagtgacattgtgcctgacagtcctttccccggagcactcggcagtgacaccaggactgcagggcagccagaggggggccccggggctgattttggtcagtcctgcttccctgcagaggctggcagagacaccctgtcaaggacagctggggctcagccctgcgttggtaccgatactactgaaaaccttggagttgctaatggacaaatacttgaatcctcgggtgagggcacagctaccaacggggtggagttgcacaccacggaaagcatagacttggacccaaccaaacccgagagtgcatcacctcctgctgacggcacgggctctgcatcaggcacccttcctgtcagccagcccaagtcctgggccagcctctttcatgattctaagccctcttcctcctcgccggtggcctatgtggaaactaagtattcccctcccgccatatctcccctggtttctgaaaagcaggttgaagtcaaagaagggcttgttccggtttcagaggatcctgtagccataaagattgcagagttgctggagaatgtaaccctaatccataaaccagtgtcgttgcaaccccgtgggctgatcaataaagggaactggtgctacattaatgctacactgcaggcattggttgcttgcccgccgatgtaccacctgatgaagttcattcctctgtattccaaagtgcaaaggccttgtacgtcaacacccatgatagacagctttgttcggctaatgaatgagttcactaatatgccagtacctccaaaaccccgacaagctcttggagataaaatcgtgagggatattcgccctggagctgcctttgagcccacatatatttacagactcctgacagttaacaagtcaagcctgtctgaaaagggtcgacaagaagatgctgaggaatacttaggcttcattctaaatggacttcatgaggaaatgttgaacctaaagaagcttctctcaccaagtaatgaaaaacttacgatttccaacggccccaaaaaccactcggtcaatgaagaagagcaggaagaacaaggtgaaggaagcgaggatgaatgggaacaagtgggcccccggaacaagacttccgtcacccgccaggcggattttgttcagactccaatcaccggcatttttggtggacacatcaggtctgtggtttaccagcagagttcaaaagaatctgccactttgcagccatttttcacgttgcagttggatatccagtcagacaagatacgcacagtccaggatgcactggagagcttggtggcaagagaatctgtccaaggttataccacaaaaaccaaacaagaggttgagataagtcgaagagtgactctggaaaaactccctcctgtcctcgtgctgcacctgaaacgattcgtttatgagaagactggtgggtgccagaagcttatcaaaaatattgaatatcctgtggacttggaaattagtaaagaactgctttctccaggggttaaaaataagaattttaaatgccaccgaacctatcggctgtttgcagtggtctaccatcacggcaacagtgcgacgggcggccattacactacagacgtcttccagatcggtctgaatggctggctgcgcatcgatgaccagacagtcaaggtgatcaaccagtaccaggtggtgaaaccaactgctgaacgcacagcctacctcctgtattaccgccgagtggacctgctgtaaaccctgtgtgcgctgtgtgtgcgcccagtgcccgcttcgtaggacaccacctcacactcacttcccgcctctctttagtggctctttagagagaaactctttctccctttgcaaaaatgggctagaatgaaaaggagatgccttggggttcgtgcacaacacagcttctgttgactctaacttccaaatcaaaatcatttggttgaaacagactgttgcttgattttagaaaatacacaaaaacccatatttctgaaataatgctgattcctgagataagaaagtggatttgatccccagtctcattgcttagtagaataaatcctgcaccagcaacaacacttgtaaatttgtgaaaatgaattttatctttccttaaaaaagaaattttttaatccatcacacttttcttccctaccctttagtttttgataaatgataaaaatgagccagttatcaaagaagaactagttcttacttcaaaagaaaaataaacataaaaaataagttgctggttcctaacaggaaaaattttaataattgtactgagagaaactgcttacgtacacattgcagatcaaatatttggagttaaaatgttagtctacatagatgggtgattgtaactttattgccattaaaagatttcaaattgcattcatgcttctgtgtacacataatgaaaaatgggcaaataatgaagatctctccttcagtctgctctgtttaattctgctgtctgctcttctctaatgctgcgtccctaattgtacacagtttagtgatatctaggagtataaagttgtcgcccatcaataaaaatcacaaagttggtttaaaaaacacccccacaaaaaacactttgtggcgcgccttggcccccaaaaaaccttttacagacacttccgtgtcggacagccaggggcccagttaggaacagtactccgtggcccacagcgtggtcccccaaggacaccccggcgcaccgaccagtgtgcggcgttctccgcccaattaaaaacgccggggggaacacgacggtccgaacacaatccgagaggagccgaggccgacggactatcacagagatcacagaccaataaacg

SEQ ID NO: 293037 - DNA, 3646 bp, Homo sapiens
tcgctattcatcggcacctcgctcgctattcatcggcacccttcctgtcagccagcccaagtcctgggccagcctctttcatgattctaagccctcttcctcctcgccggtggcctatgtggaaactaagtattcccctcccgccatatctcccctggtttctgaaaagcaggttgaagtcaaagaagggcttgttccggtttcagaggatcctgtagccataaagatttcagcttcctccatacagtggaacagttctgtgtggcacacaggctgtggataaactacctgatggacaagaatatcagagaattgagtttggtgtcgatgaagtcattgaacccagtgacactttgccgagaacccccagctacagtatttcaagcacactgaaccctcaggcccctgaatttattctcggttgtacagcttccaaaataacccctgatggtatcactaaagaagcaagctatggctccatcgactgccagtacccaggctctgccctcgctttggatggaagttctaatgtggaggcggaagttttggaaaatgatggtgtctcaggtggtcttggacaaagggagcgtaaaaagaagaaaaagcggccacctggatattacagctatttgaaagatggtggcgatgatagtatctccacagaagccctggtcaatggccatgccaattcagcagtcccgaacagtgtcagtgcagaggatgcagaatttatgggtgacatgcccccgtcagttacgcccaggacttgtaacagcccccagaactccacagactctgtcagtgacattgtgcctgacagtcctttccccggagcactcggcagtgacaccaggactgcagggcagccagaggggggccccggggctgattttggtcagtcctgcttccctgcagaggctggcagagacaccctgtcaaggacagctggggctcagccctgcgttggtaccgatactactgaaaaccttggagttgctaatggacaaatacttgaatcctcgggtgagggcacagctaccaacggggtggagttgcacaccacggaaagcatagacttggacccaaccaaacccgagagtgcatcacctcctgctgacggcacgggctctgcatcaggcacccttcctgtcagccagcccaagtcctgggccagcctctttcatgattctaagccctcttcctcctcgccggtggcctatgtggaaactaagtattcccctcccgccatatctcccctggtttctgaaaagcaggttgaagtcaaagaagggcttgttccggtttcagaggatcctgtagccataaagattgcagagttgctggagaatgtaaccctaatccataaaccagtgtcgttgcaaccccgtgggctgatcaataaagggaactggtgctacattaatgctacactgcaggcattggttgcttgcccgccgatgtaccacctgatgaagttcattcctctgtattccaaagtgcaaaggccttgtacgtcaacacccatgatagacagctttgttcggctaatgaatgagttcactaatatgccagtacctccaaaaccccgacaagctcttggagataaaatcgtgagggatattcgccctggagctgcctttgagcccacatatatttacagactcctgacagttaacaagtcaagcctgtctgaaaagggtcgacaagaagatgctgaggaatacttaggcttcattctaaatggacttcatgaggaaatgttgaacctaaagaagcttctctcaccaagtaatgaaaaacttacgatttccaacggccccaaaaaccactcggtcaatgaagaagagcaggaagaacaaggtgaaggaagcgaggatgaatgggaacaagtgggcccccggaacaagacttccgtcacccgccaggcggattttgttcagactccaatcaccggcatttttggtggacacatcaggtctgtggtttaccagcagagttcaaaagaatctgccactttgcagccatttttcacgttgcagttggatatccagtcagacaagatacgcacagtccaggatgcactggagagcttggtggcaagagaatctgtccaaggttataccacaaaaaccaaacaagaggttgagataagtcgaagagtgactctggaaaaactccctcctgtcctcgtgctgcacctgaaacgattcgtttatgagaagactggtgggtgccagaagcttatcaaaaatattgaatatcctgtggacttggaaattagtaaagaactgctttctccaggggttaaaaataagaattttaaatgccaccgaacctatcggctgtttgcagtggtctaccatcacggcaacagtgcgacgggcggccattacactacagacgtcttccagatcggtctgaatggctggctgcgcatcgatgaccagacagtcaaggtgatcaaccagtaccaggtggtgaaaccaactgctgaacgcacagcctacctcctgtattaccgccgagtggacctgctgtaaaccctgtgtgcgctgtgtgtgcgcccagtgcccgcttcgtaggacaccacctcacactcacttcccgcctctctttagtggctctttagagagaaactctttctccctttgcaaaaatgggctagaatgaaaaggagatgccttggggttcgtgcacaacacagcttctgttgactctaacttccaaatcaaaatcatttggttgaaacagactgttgcttgattttagaaaatacacaaaaacccatatttctgaaataatgctgattcctgagataagaaagtggatttgatccccagtctcattgcttagtagaataaatcctgcaccagcaacaacacttgtaaatttgtgaaaatgaattttatctttccttaaaaaagaaattttttaatccatcacacttttcttccctaccctttagtttttgataaatgataaaaatgagccagttatcaaagaagaactagttcttacttcaaaagaaaaataaacataaaaaataagttgctggttcctaacaggaaaaattttaataattgtactgagagaaactgcttacgtacacattgcagatcaaatatttggagttaaaatgttagtctacatagatgggtgattgtaactttattgccattaaaagatttcaaattgcattcatgcttctgtgtacacataatgaaaaatgggcaaataatgaagatctctccttcagtctgctctgtttaattctgctgtctgctcttctctaatgctgcgtccctaattgtacacagtttagtgatatctaggagtataaagttgtcgcccatcaataaaaatcacaaagttggtttaaaaaacacccccacaaaaaacactttgtggcgcgccttggcccccaaaaaaccttttacagacacttccgtgtcggacagccaggggcccagttaggaacagtactccgtggcccacagcgtggtcccccaaggacaccccggcgcaccgaccagtgtgcggcgttctccgcccaattaaaaacgccggggggaacacgacggtccgaacacaatccgagaggagccgaggccgacggactatcacagagatcacagaccaataaacg

SEQ ID NO: 293038 - DNA, 2552 bp, Homo sapiens
cagtgcgcaggcgcggcggccgatgcgagtgtgtatgtgcgggcgagaagatggcggcggcgggggaagcagcgtgagcacctctttcatgattctaagccctcttcctcctcgccggtggcctatgtggaaactaagtattcccctcccgccatatctcccctggtttctgaaaagcaggttgaagtcaaagaagggcttgttccggtttcagaggatcctgtagccataaagattgcagagttgctggagaatgtaaccctaatccataaaccagtgtcgttgcaaccccgtgggctgatcaataaagggaactggtgctacattaatgctacactgcaggcattggttgcttgcccgccgatgtaccacctgatgaagttcattcctctgtattccaaagtgcaaaggccttgtacgtcaacacccatgatagacagctttgttcggctaatgaatgagttcactaatatgccagtacctccaaaaccccgacaagctcttggagataaaatcgtgagggatattcgccctggagctgcctttgagcccacatatatttacagactcctgacagttaacaagtcaagcctgtctgaaaagggtcgacaagaagatgctgaggaatacttaggcttcattctaaatggacttcatgaggaaatgttgaacctaaagaagcttctctcaccaagtaatgaaaaacttacgatttccaacggccccaaaaaccactcggtcaatgaagaagagcaggaagaacaaggtgaaggaagcgaggatgaatgggaacaagtgggcccccggaacaagacttccgtcacccgccaggcggattttgttcagactccaatcaccggcatttttggtggacacatcaggtctgtggtttaccagcagagttcaaaagaatctgccactttgcagccatttttcacgttgcagttggatatccagtcagacaagatacgcacagtccaggatgcactggagagcttggtggcaagagaatctgtccaaggttataccacaaaaaccaaacaagaggttgagataagtcgaagagtgactctggaaaaactccctcctgtcctcgtgctgcacctgaaacgattcgtttatgagaagactggtgggtgccagaagcttatcaaaaatattgaatatcctgtggacttggaaattagtaaagaactgctttctccaggggttaaaaataagaattttaaatgccaccgaacctatcggctgtttgcagtggtctaccatcacggcaacagtgcgacgggcggccattacactacagacgtcttccagatcggtctgaatggctggctgcgcatcgatgaccagacagtcaaggtgatcaaccagtaccaggtggtgaaaccaactgctgaacgcacagcctacctcctgtattaccgccgagtggacctgctgtaaaccctgtgtgcgctgtgtgtgcgcccagtgcccgcttcgtaggacaccacctcacactcacttcccgcctctctttagtggctctttagagagaaactctttctccctttgcaaaaatgggctagaatgaaaaggagatgccttggggttcgtgcacaacacagcttctgttgactctaacttccaaatcaaaatcatttggttgaaacagactgttgcttgattttagaaaatacacaaaaacccatatttctgaaataatgctgattcctgagataagaaagtggatttgatccccagtctcattgcttagtagaataaatcctgcaccagcaacaacacttgtaaatttgtgaaaatgaattttatctttccttaaaaaagaaattttttaatccatcacacttttcttccctaccctttagtttttgataaatgataaaaatgagccagttatcaaagaagaactagttcttacttcaaaagaaaaataaacataaaaaataagttgctggttcctaacaggaaaaattttaataattgtactgagagaaactgcttacgtacacattgcagatcaaatatttggagttaaaatgttagtctacatagatgggtgattgtaactttattgccattaaaagatttcaaattgcattcatgcttctgtgtacacataatgaaaaatgggcaaataatgaagatctctccttcagtctgctctgtttaattctgctgtctgctcttctctaatgctgcgtccctaattgtacacagtttagtgatatctaggagtataaagttgtcgcccatcaataaaaatcacaaagttggtttaaaaaacacccccacaaaaaacactttgtggcgcgccttggcccccaaaaaaccttttacagacacttccgtgtcggacagccaggggcccagttaggaacagtactccgtggcccacagcgtggtcccccaaggacaccccggcgcaccgaccagtgtgcggcgttctccgcccaattaaaaacgccggggggaacacgacggtccgaacacaatccgagaggagccgaggccgacggactatcacagagatcacagaccaataaacg

SEQ ID NO: 293039 - DNA, 2518 bp, Homo sapiens
cagtgcgcaggcgcggcggccgatgcgagtgtgtatgtgcgggcgagaagatggcggcggcgggggaagcagcgtgagcagccggaggatcgcggagtcccaatgaaacgggcagccatggccctccacagcccgcagtatatttttggagattttagccctgatgaattcaatcaattctttgtgactcctcgatcttcagttgagagttgctggagaatgtaaccctaatccataaaccagtgtcgttgcaaccccgtgggctgatcaataaagggaactggtgctacattaatgctacactgcaggcattggttgcttgcccgccgatgtaccacctgatgaagttcattcctctgtattccaaagtgcaaaggccttgtacgtcaacacccatgatagacagctttgttcggctaatgaatgagttcactaatatgccagtacctccaaaaccccgacaagctcttggagataaaatcgtgagggatattcgccctggagctgcctttgagcccacatatatttacagactcctgacagttaacaagtcaagcctgtctgaaaagggtcgacaagaagatgctgaggaatacttaggcttcattctaaatggacttcatgaggaaatgttgaacctaaagaagcttctctcaccaagtaatgaaaaacttacgatttccaacggccccaaaaaccactcggtcaatgaagaagagcaggaagaacaaggtgaaggaagcgaggatgaatgggaacaagtgggcccccggaacaagacttccgtcacccgccaggcggattttgttcagactccaatcaccggcatttttggtggacacatcaggtctgtggtttaccagcagagttcaaaagaatctgccactttgcagccatttttcacgttgcagttggatatccagtcagacaagatacgcacagtccaggatgcactggagagcttggtggcaagagaatctgtccaaggttataccacaaaaaccaaacaagaggttgagataagtcgaagagtgactctggaaaaactccctcctgtcctcgtgctgcacctgaaacgattcgtttatgagaagactggtgggtgccagaagcttatcaaaaatattgaatatcctgtggacttggaaattagtaaagaactgctttctccaggggttaaaaataagaattttaaatgccaccgaacctatcggctgtttgcagtggtctaccatcacggcaacagtgcgacgggcggccattacactacagacgtcttccagatcggtctgaatggctggctgcgcatcgatgaccagacagtcaaggtgatcaaccagtaccaggtggtgaaaccaactgctgaacgcacagcctacctcctgtattaccgccgagtggacctgctgtaaaccctgtgtgcgctgtgtgtgcgcccagtgcccgcttcgtaggacaccacctcacactcacttcccgcctctctttagtggctctttagagagaaactctttctccctttgcaaaaatgggctagaatgaaaaggagatgccttggggttcgtgcacaacacagcttctgttgactctaacttccaaatcaaaatcatttggttgaaacagactgttgcttgattttagaaaatacacaaaaacccatatttctgaaataatgctgattcctgagataagaaagtggatttgatccccagtctcattgcttagtagaataaatcctgcaccagcaacaacacttgtaaatttgtgaaaatgaattttatctttccttaaaaaagaaattttttaatccatcacacttttcttccctaccctttagtttttgataaatgataaaaatgagccagttatcaaagaagaactagttcttacttcaaaagaaaaataaacataaaaaataagttgctggttcctaacaggaaaaattttaataattgtactgagagaaactgcttacgtacacattgcagatcaaatatttggagttaaaatgttagtctacatagatgggtgattgtaactttattgccattaaaagatttcaaattgcattcatgcttctgtgtacacataatgaaaaatgggcaaataatgaagatctctccttcagtctgctctgtttaattctgctgtctgctcttctctaatgctgcgtccctaattgtacacagtttagtgatatctaggagtataaagttgtcgcccatcaataaaaatcacaaagttggtttaaaaaacacccccacaaaaaacactttgtggcgcgccttggcccccaaaaaaccttttacagacacttccgtgtcggacagccaggggcccagttaggaacagtactccgtggcccacagcgtggtcccccaaggacaccccggcgcaccgaccagtgtgcggcgttctccgcccaattaaaaacgccggggggaacacgacggtccgaacacaatccgagaggagccgaggccgacggactatcacagagatcacagaccaataaacg

SEQ ID NO: 293040 - DNA, 2579 bp, Homo sapiens
cagtgcgcaggcgcggcggccgatgcgagtgtgtatgtgcgggcgagaagatggcggcggcgggggaagcagcgtgagcagccggaggatcgcggagtcccaatgaaacgggcagccatggccctccacagcccgcagtatatttttggagattttagccctgatgaattcaatcaattctttgtgactcctcgatcttcagttgagcttcctccatacagtggaacagttctgtgtggcacacaggctgtggataaactacctgatgagttgctggagaatgtaaccctaatccataaaccagtgtcgttgcaaccccgtgggctgatcaataaagggaactggtgctacattaatgctacactgcaggcattggttgcttgcccgccgatgtaccacctgatgaagttcattcctctgtattccaaagtgcaaaggccttgtacgtcaacacccatgatagacagctttgttcggctaatgaatgagttcactaatatgccagtacctccaaaaccccgacaagctcttggagataaaatcgtgagggatattcgccctggagctgcctttgagcccacatatatttacagactcctgacagttaacaagtcaagcctgtctgaaaagggtcgacaagaagatgctgaggaatacttaggcttcattctaaatggacttcatgaggaaatgttgaacctaaagaagcttctctcaccaagtaatgaaaaacttacgatttccaacggccccaaaaaccactcggtcaatgaagaagagcaggaagaacaaggtgaaggaagcgaggatgaatgggaacaagtgggcccccggaacaagacttccgtcacccgccaggcggattttgttcagactccaatcaccggcatttttggtggacacatcaggtctgtggtttaccagcagagttcaaaagaatctgccactttgcagccatttttcacgttgcagttggatatccagtcagacaagatacgcacagtccaggatgcactggagagcttggtggcaagagaatctgtccaaggttataccacaaaaaccaaacaagaggttgagataagtcgaagagtgactctggaaaaactccctcctgtcctcgtgctgcacctgaaacgattcgtttatgagaagactggtgggtgccagaagcttatcaaaaatattgaatatcctgtggacttggaaattagtaaagaactgctttctccaggggttaaaaataagaattttaaatgccaccgaacctatcggctgtttgcagtggtctaccatcacggcaacagtgcgacgggcggccattacactacagacgtcttccagatcggtctgaatggctggctgcgcatcgatgaccagacagtcaaggtgatcaaccagtaccaggtggtgaaaccaactgctgaacgcacagcctacctcctgtattaccgccgagtggacctgctgtaaaccctgtgtgcgctgtgtgtgcgcccagtgcccgcttcgtaggacaccacctcacactcacttcccgcctctctttagtggctctttagagagaaactctttctccctttgcaaaaatgggctagaatgaaaaggagatgccttggggttcgtgcacaacacagcttctgttgactctaacttccaaatcaaaatcatttggttgaaacagactgttgcttgattttagaaaatacacaaaaacccatatttctgaaataatgctgattcctgagataagaaagtggatttgatccccagtctcattgcttagtagaataaatcctgcaccagcaacaacacttgtaaatttgtgaaaatgaattttatctttccttaaaaaagaaattttttaatccatcacacttttcttccctaccctttagtttttgataaatgataaaaatgagccagttatcaaagaagaactagttcttacttcaaaagaaaaataaacataaaaaataagttgctggttcctaacaggaaaaattttaataattgtactgagagaaactgcttacgtacacattgcagatcaaatatttggagttaaaatgttagtctacatagatgggtgattgtaactttattgccattaaaagatttcaaattgcattcatgcttctgtgtacacataatgaaaaatgggcaaataatgaagatctctccttcagtctgctctgtttaattctgctgtctgctcttctctaatgctgcgtccctaattgtacacagtttagtgatatctaggagtataaagttgtcgcccatcaataaaaatcacaaagttggtttaaaaaacacccccacaaaaaacactttgtggcgcgccttggcccccaaaaaaccttttacagacacttccgtgtcggacagccaggggcccagttaggaacagtactccgtggcccacagcgtggtcccccaaggacaccccggcgcaccgaccagtgtgcggcgttctccgcccaattaaaaacgccggggggaacacgacggtccgaacacaatccgagaggagccgaggccgacggactatcacagagatcacagaccaataaacg

SEQ ID NO: 293041 - DNA, 2275 bp, Homo sapiens
aggaaatgtggtgtgtctgttcatttcctttacgcttccttactgccactacatagacactgcaggcattggttgcttgcccgccgatgtaccacctgatgaagttcattcctctgtattccaaagtgcaaaggccttgtacgtcaacacccatgatagacagctttgttcggctaatgaatgagttcactaatatgccagtacctccaaaaccccgacaagctcttggagataaaatcgtgagggatattcgccctggagctgcctttgagcccacatatatttacagactcctgacagttaacaagtcaagcctgtctgaaaagggtcgacaagaagatgctgaggaatacttaggcttcattctaaatggacttcatgaggaaatgttgaacctaaagaagcttctctcaccaagtaatgaaaaacttacgatttccaacggccccaaaaaccactcggtcaatgaagaagagcaggaagaacaaggtgaaggaagcgaggatgaatgggaacaagtgggcccccggaacaagacttccgtcacccgccaggcggattttgttcagactccaatcaccggcatttttggtggacacatcaggtctgtggtttaccagcagagttcaaaagaatctgccactttgcagccatttttcacgttgcagttggatatccagtcagacaagatacgcacagtccaggatgcactggagagcttggtggcaagagaatctgtccaaggttataccacaaaaaccaaacaagaggttgagataagtcgaagagtgactctggaaaaactccctcctgtcctcgtgctgcacctgaaacgattcgtttatgagaagactggtgggtgccagaagcttatcaaaaatattgaatatcctgtggacttggaaattagtaaagaactgctttctccaggggttaaaaataagaattttaaatgccaccgaacctatcggctgtttgcagtggtctaccatcacggcaacagtgcgacgggcggccattacactacagacgtcttccagatcggtctgaatggctggctgcgcatcgatgaccagacagtcaaggtgatcaaccagtaccaggtggtgaaaccaactgctgaacgcacagcctacctcctgtattaccgccgagtggacctgctgtaaaccctgtgtgcgctgtgtgtgcgcccagtgcccgcttcgtaggacaccacctcacactcacttcccgcctctctttagtggctctttagagagaaactctttctccctttgcaaaaatgggctagaatgaaaaggagatgccttggggttcgtgcacaacacagcttctgttgactctaacttccaaatcaaaatcatttggttgaaacagactgttgcttgattttagaaaatacacaaaaacccatatttctgaaataatgctgattcctgagataagaaagtggatttgatccccagtctcattgcttagtagaataaatcctgcaccagcaacaacacttgtaaatttgtgaaaatgaattttatctttccttaaaaaagaaattttttaatccatcacacttttcttccctaccctttagtttttgataaatgataaaaatgagccagttatcaaagaagaactagttcttacttcaaaagaaaaataaacataaaaaataagttgctggttcctaacaggaaaaattttaataattgtactgagagaaactgcttacgtacacattgcagatcaaatatttggagttaaaatgttagtctacatagatgggtgattgtaactttattgccattaaaagatttcaaattgcattcatgcttctgtgtacacataatgaaaaatgggcaaataatgaagatctctccttcagtctgctctgtttaattctgctgtctgctcttctctaatgctgcgtccctaattgtacacagtttagtgatatctaggagtataaagttgtcgcccatcaataaaaatcacaaagttggtttaaaaaacacccccacaaaaaacactttgtggcgcgccttggcccccaaaaaaccttttacagacacttccgtgtcggacagccaggggcccagttaggaacagtactccgtggcccacagcgtggtcccccaaggacaccccggcgcaccgaccagtgtgcggcgttctccgcccaattaaaaacgccggggggaacacgacggtccgaacacaatccgagaggagccgaggccgacggactatcacagagatcacagaccaataaacg

SEQ ID NO: 293042 - DNA, 2156 bp, Homo sapiens
cagtgcgcaggcgcggcggccgatgcgagtgtgtatgtgcgggcgagaagatggcggcggcgggggaagcagcgtgagcagccggaggatcgcggagtcccaatgaaacgggcagccatggccctccacagcccgcagtatatttttggagattttagccctgatgaattcaatcaattctttgtgactcctcgatcttcagttgagggtcgacaagaagatgctgaggaatacttaggcttcattctaaatggacttcatgaggaaatgttgaacctaaagaagcttctctcaccaagtaatgaaaaacttacgatttccaacggccccaaaaaccactcggtcaatgaagaagagcaggaagaacaaggtgaaggaagcgaggatgaatgggaacaagtgggcccccggaacaagacttccgtcacccgccaggcggattttgttcagactccaatcaccggcatttttggtggacacatcaggtctgtggtttaccagcagagttcaaaagaatctgccactttgcagccatttttcacgttgcagttggatatccagtcagacaagatacgcacagtccaggatgcactggagagcttggtggcaagagaatctgtccaaggttataccacaaaaaccaaacaagaggttgagataagtcgaagagtgactctggaaaaactccctcctgtcctcgtgctgcacctgaaacgattcgtttatgagaagactggtgggtgccagaagcttatcaaaaatattgaatatcctgtggacttggaaattagtaaagaactgctttctccaggggttaaaaataagaattttaaatgccaccgaacctatcggctgtttgcagtggtctaccatcacggcaacagtgcgacgggcggccattacactacagacgtcttccagatcggtctgaatggctggctgcgcatcgatgaccagacagtcaaggtgatcaaccagtaccaggtggtgaaaccaactgctgaacgcacagcctacctcctgtattaccgccgagtggacctgctgtaaaccctgtgtgcgctgtgtgtgcgcccagtgcccgcttcgtaggacaccacctcacactcacttcccgcctctctttagtggctctttagagagaaactctttctccctttgcaaaaatgggctagaatgaaaaggagatgccttggggttcgtgcacaacacagcttctgttgactctaacttccaaatcaaaatcatttggttgaaacagactgttgcttgattttagaaaatacacaaaaacccatatttctgaaataatgctgattcctgagataagaaagtggatttgatccccagtctcattgcttagtagaataaatcctgcaccagcaacaacacttgtaaatttgtgaaaatgaattttatctttccttaaaaaagaaattttttaatccatcacacttttcttccctaccctttagtttttgataaatgataaaaatgagccagttatcaaagaagaactagttcttacttcaaaagaaaaataaacataaaaaataagttgctggttcctaacaggaaaaattttaataattgtactgagagaaactgcttacgtacacattgcagatcaaatatttggagttaaaatgttagtctacatagatgggtgattgtaactttattgccattaaaagatttcaaattgcattcatgcttctgtgtacacataatgaaaaatgggcaaataatgaagatctctccttcagtctgctctgtttaattctgctgtctgctcttctctaatgctgcgtccctaattgtacacagtttagtgatatctaggagtataaagttgtcgcccatcaataaaaatcacaaagttggtttaaaaaacacccccacaaaaaacactttgtggcgcgccttggcccccaaaaaaccttttacagacacttccgtgtcggacagccaggggcccagttaggaacagtactccgtggcccacagcgtggtcccccaaggacaccccggcgcaccgaccagtgtgcggcgttctccgcccaattaaaaacgccggggggaacacgacggtccgaacacaatccgagaggagccgaggccgacggactatcacagagatcacagaccaataaacg

SEQ ID NO: 293043 - DNA, 1898 bp, Homo sapiens
tgctgttcttgtcgtaaatagtagtgtaagcagatgctctccttttcagaacttacgatttccaacggccccaaaaaccactcggtcaatgaagaagagcaggaagaacaaggtgaaggaagcgaggatgaatgggaacaagtgggcccccggaacaagacttccgtcacccgccaggcggattttgttcagactccaatcaccggcatttttggtggacacatcaggtctgtggtttaccagcagagttcaaaagaatctgccactttgcagccatttttcacgttgcagttggatatccagtcagacaagatacgcacagtccaggatgcactggagagcttggtggcaagagaatctgtccaaggttataccacaaaaaccaaacaagaggttgagataagtcgaagagtgactctggaaaaactccctcctgtcctcgtgctgcacctgaaacgattcgtttatgagaagactggtgggtgccagaagcttatcaaaaatattgaatatcctgtggacttggaaattagtaaagaactgctttctccaggggttaaaaataagaattttaaatgccaccgaacctatcggctgtttgcagtggtctaccatcacggcaacagtgcgacgggcggccattacactacagacgtcttccagatcggtctgaatggctggctgcgcatcgatgaccagacagtcaaggtgatcaaccagtaccaggtggtgaaaccaactgctgaacgcacagcctacctcctgtattaccgccgagtggacctgctgtaaaccctgtgtgcgctgtgtgtgcgcccagtgcccgcttcgtaggacaccacctcacactcacttcccgcctctctttagtggctctttagagagaaactctttctccctttgcaaaaatgggctagaatgaaaaggagatgccttggggttcgtgcacaacacagcttctgttgactctaacttccaaatcaaaatcatttggttgaaacagactgttgcttgattttagaaaatacacaaaaacccatatttctgaaataatgctgattcctgagataagaaagtggatttgatccccagtctcattgcttagtagaataaatcctgcaccagcaacaacacttgtaaatttgtgaaaatgaattttatctttccttaaaaaagaaattttttaatccatcacacttttcttccctaccctttagtttttgataaatgataaaaatgagccagttatcaaagaagaactagttcttacttcaaaagaaaaataaacataaaaaataagttgctggttcctaacaggaaaaattttaataattgtactgagagaaactgcttacgtacacattgcagatcaaatatttggagttaaaatgttagtctacatagatgggtgattgtaactttattgccattaaaagatttcaaattgcattcatgcttctgtgtacacataatgaaaaatgggcaaataatgaagatctctccttcagtctgctctgtttaattctgctgtctgctcttctctaatgctgcgtccctaattgtacacagtttagtgatatctaggagtataaagttgtcgcccatcaataaaaatcacaaagttggtttaaaaaacacccccacaaaaaacactttgtggcgcgccttggcccccaaaaaaccttttacagacacttccgtgtcggacagccaggggcccagttaggaacagtactccgtggcccacagcgtggtcccccaaggacaccccggcgcaccgaccagtgtgcggcgttctccgcccaattaaaaacgccggggggaacacgacggtccgaacacaatccgagaggagccgaggccgacggactatcacagagatcacagaccaataaacg

SEQ ID NO: 293044 - DNA, 1678 bp, Homo sapiens
ctcgagactagttctctctctctctctcttcaaaagaatctgccactttgcagccatttttcacgttgcagttggatatccagtcagacaagatacgcacagtccaggatgcactggagagcttggtggcaagagaatctgtccaaggttataccacaaaaaccaaacaagaggttgagataagtcgaagagtgactctggaaaaactccctcctgtcctcgtgctgcacctgaaacgattcgtttatgagaagactggtgggtgccagaagcttatcaaaaatattgaatatcctgtggacttggaaattagtaaagaactgctttctccaggggttaaaaataagaattttaaatgccaccgaacctatcggctgtttgcagtggtctaccatcacggcaacagtgcgacgggcggccattacactacagacgtcttccagatcggtctgaatggctggctgcgcatcgatgaccagacagtcaaggtgatcaaccagtaccaggtggtgaaaccaactgctgaacgcacagcctacctcctgtattaccgccgagtggacctgctgtaaaccctgtgtgcgctgtgtgtgcgcccagtgcccgcttcgtaggacaccacctcacactcacttcccgcctctctttagtggctctttagagagaaactctttctccctttgcaaaaatgggctagaatgaaaaggagatgccttggggttcgtgcacaacacagcttctgttgactctaacttccaaatcaaaatcatttggttgaaacagactgttgcttgattttagaaaatacacaaaaacccatatttctgaaataatgctgattcctgagataagaaagtggatttgatccccagtctcattgcttagtagaataaatcctgcaccagcaacaacacttgtaaatttgtgaaaatgaattttatctttccttaaaaaagaaattttttaatccatcacacttttcttccctaccctttagtttttgataaatgataaaaatgagccagttatcaaagaagaactagttcttacttcaaaagaaaaataaacataaaaaataagttgctggttcctaacaggaaaaattttaataattgtactgagagaaactgcttacgtacacattgcagatcaaatatttggagttaaaatgttagtctacatagatgggtgattgtaactttattgccattaaaagatttcaaattgcattcatgcttctgtgtacacataatgaaaaatgggcaaataatgaagatctctccttcagtctgctctgtttaattctgctgtctgctcttctctaatgctgcgtccctaattgtacacagtttagtgatatctaggagtataaagttgtcgcccatcaataaaaatcacaaagttggtttaaaaaacacccccacaaaaaacactttgtggcgcgccttggcccccaaaaaaccttttacagacacttccgtgtcggacagccaggggcccagttaggaacagtactccgtggcccacagcgtggtcccccaaggacaccccggcgcaccgaccagtgtgcggcgttctccgcccaattaaaaacgccggggggaacacgacggtccgaacacaatccgagaggagccgaggccgacggactatcacagagatcacagaccaataaacg

SEQ ID NO: 293045 - DNA, 1712 bp, Homo sapiens
cagtgcgcaggcgcggcggccgatgcgagtgtgtatgtgcgggcgagaagatggcggcggcgggggaagcagcgtgagcagccggaggatcgcggagtcccaatgaaacgggcagccatggccctccacagcccgcagtatatttttggagattttagccctgatgaattcaatcaattctttgtgactcctcgatcttcagttgagcttcctccatacagtggaacagttctgtgtggcacacaggctgtggataaactacctgatgaacgattcgtttatgagaagactggtgggtgccagaagcttatcaaaaatattgaatatcctgtggacttggaaattagtaaagaactgctttctccaggggttaaaaataagaattttaaatgccaccgaacctatcggctgtttgcagtggtctaccatcacggcaacagtgcgacgggcggccattacactacagacgtcttccagatcggtctgaatggctggctgcgcatcgatgaccagacagtcaaggtgatcaaccagtaccaggtggtgaaaccaactgctgaacgcacagcctacctcctgtattaccgccgagtggacctgctgtaaaccctgtgtgcgctgtgtgtgcgcccagtgcccgcttcgtaggacaccacctcacactcacttcccgcctctctttagtggctctttagagagaaactctttctccctttgcaaaaatgggctagaatgaaaaggagatgccttggggttcgtgcacaacacagcttctgttgactctaacttccaaatcaaaatcatttggttgaaacagactgttgcttgattttagaaaatacacaaaaacccatatttctgaaataatgctgattcctgagataagaaagtggatttgatccccagtctcattgcttagtagaataaatcctgcaccagcaacaacacttgtaaatttgtgaaaatgaattttatctttccttaaaaaagaaattttttaatccatcacacttttcttccctaccctttagtttttgataaatgataaaaatgagccagttatcaaagaagaactagttcttacttcaaaagaaaaataaacataaaaaataagttgctggttcctaacaggaaaaattttaataattgtactgagagaaactgcttacgtacacattgcagatcaaatatttggagttaaaatgttagtctacatagatgggtgattgtaactttattgccattaaaagatttcaaattgcattcatgcttctgtgtacacataatgaaaaatgggcaaataatgaagatctctccttcagtctgctctgtttaattctgctgtctgctcttctctaatgctgcgtccctaattgtacacagtttagtgatatctaggagtataaagttgtcgcccatcaataaaaatcacaaagttggtttaaaaaacacccccacaaaaaacactttgtggcgcgccttggcccccaaaaaaccttttacagacacttccgtgtcggacagccaggggcccagttaggaacagtactccgtggcccacagcgtggtcccccaaggacaccccggcgcaccgaccagtgtgcggcgttctccgcccaattaaaaacgccggggggaacacgacggtccgaacacaatccgagaggagccgaggccgacggactatcacagagatcacagaccaataaacg

SEQ ID NO: 293046 - DNA, 1765 bp, Homo sapiens
acgcgtctgtggtttaccatgcagagcttaaatagaaatcctgccacgattgcatgcctatgcttacactgctgcatgctgtggaatatccccgatcaggacgaagagtaccgcatcaggtccatggaatgcacctggttacgagcgtaggctggctaagagatatcctgtccaagggtctcactcacttcaacaaacacagacccacaatcatgcagggtctgcaggcatcatgactcgtcaagcagtgcacgtcatgggtaaagacaacttccacctccttgtctctcgctgactgctgaccatgcacacacgtatctcgattatcatgagcacagcactgtggtgggtgccagaagcttatcaaaaatattgaatatcctgtggacttggaaattagtaaagaactgctttctccaggggttaaaaataagaattttaaatgccaccgaacctatcggctgtttgcagtggtctaccatcacggcaacagtgcgacgggcggccattacactacagacgtcttccagatcggtctgaatggctggctgcgcatcgatgaccagacagtcaaggtgatcaaccagtaccaggtggtgaaaccaactgctgaacgcacagcctacctcctgtattaccgccgagtggacctgctgtaaaccctgtgtgcgctgtgtgtgcgcccagtgcccgcttcgtaggacaccacctcacactcacttcccgcctctctttagtggctctttagagagaaactctttctccctttgcaaaaatgggctagaatgaaaaggagatgccttggggttcgtgcacaacacagcttctgttgactctaacttccaaatcaaaatcatttggttgaaacagactgttgcttgattttagaaaatacacaaaaacccatatttctgaaataatgctgattcctgagataagaaagtggatttgatccccagtctcattgcttagtagaataaatcctgcaccagcaacaacacttgtaaatttgtgaaaatgaattttatctttccttaaaaaagaaattttttaatccatcacacttttcttccctaccctttagtttttgataaatgataaaaatgagccagttatcaaagaagaactagttcttacttcaaaagaaaaataaacataaaaaataagttgctggttcctaacaggaaaaattttaataattgtactgagagaaactgcttacgtacacattgcagatcaaatatttggagttaaaatgttagtctacatagatgggtgattgtaactttattgccattaaaagatttcaaattgcattcatgcttctgtgtacacataatgaaaaatgggcaaataatgaagatctctccttcagtctgctctgtttaattctgctgtctgctcttctctaatgctgcgtccctaattgtacacagtttagtgatatctaggagtataaagttgtcgcccatcaataaaaatcacaaagttggtttaaaaaacacccccacaaaaaacactttgtggcgcgccttggcccccaaaaaaccttttacagacacttccgtgtcggacagccaggggcccagttaggaacagtactccgtggcccacagcgtggtcccccaaggacaccccggcgcaccgaccagtgtgcggcgttctccgcccaattaaaaacgccggggggaacacgacggtccgaacacaatccgagaggagccgaggccgacggactatcacagagatcacagaccaataaacg

SEQ ID NO: 293047 - DNA, 1863 bp, Homo sapiens
cttgttttctcatttaatataccataagcgtattcccgcatcaccattcttaatctattccacgaaaaaataaattgtgttattttaatataatttactcatcagtcatttcttctagtggctattgaggttttccgttttttcactgttataaatgacatcataatctctgtccaagattcagataatctcttcaggacagtctagaagtagagtcagccacatccaagggcatgagccaggtctgtaggcctgtacagctgatggctgtgtaggagtgtctgtgtgaggcgtgggacattttaaatatgtggttaatatgcgtacatgcacacatgtacctatctgacttacccttaccttgcagttatagaaaagtttttattatggattgcttgcgtgtttgagttgaaatagcattggtttgtgtgatgacatctctctgtcccacctgctttggagaggggttttacacataggatgcatccctggagggaagtcggcggagacctgtaatgattcgtgtgcagtgctgttctcactctgctgcctgctgggctctcttccagtggtctaccatcacggcaacagtgcgacgggcggccattacactacagacgtcttccagatcggtctgaatggctggctgcgcatcgatgaccagacagtcaaggtgatcaaccagtaccaggtggtgaaaccaactgctgaacgcacagcctacctcctgtattaccgccgagtggacctgctgtaaaccctgtgtgcgctgtgtgtgcgcccagtgcccgcttcgtaggacaccacctcacactcacttcccgcctctctttagtggctctttagagagaaactctttctccctttgcaaaaatgggctagaatgaaaaggagatgccttggggttcgtgcacaacacagcttctgttgactctaacttccaaatcaaaatcatttggttgaaacagactgttgcttgattttagaaaatacacaaaaacccatatttctgaaataatgctgattcctgagataagaaagtggatttgatccccagtctcattgcttagtagaataaatcctgcaccagcaacaacacttgtaaatttgtgaaaatgaattttatctttccttaaaaaagaaattttttaatccatcacacttttcttccctaccctttagtttttgataaatgataaaaatgagccagttatcaaagaagaactagttcttacttcaaaagaaaaataaacataaaaaataagttgctggttcctaacaggaaaaattttaataattgtactgagagaaactgcttacgtacacattgcagatcaaatatttggagttaaaatgttagtctacatagatgggtgattgtaactttattgccattaaaagatttcaaattgcattcatgcttctgtgtacacataatgaaaaatgggcaaataatgaagatctctccttcagtctgctctgtttaattctgctgtctgctcttctctaatgctgcgtccctaattgtacacagtttagtgatatctaggagtataaagttgtcgcccatcaataaaaatcacaaagttggtttaaaaaacacccccacaaaaaacactttgtggcgcgccttggcccccaaaaaaccttttacagacacttccgtgtcggacagccaggggcccagttaggaacagtactccgtggcccacagcgtggtcccccaaggacaccccggcgcaccgaccagtgtgcggcgttctccgcccaattaaaaacgccggggggaacacgacggtccgaacacaatccgagaggagccgaggccgacggactatcacagagatcacagaccaataaacg

SEQ ID NO: 293048 - DNA, 1888 bp, Homo sapiens
tcgctattcatcggcacctcgctcgctattcatcggcacccttcctgtcagccagcccaagtcctgggccagcctctttcatgattctaagccctcttcctcctcgccggtggcctatgtggaaactaagtattcccctcccgccatatctcccctggtttctgaaaagcaggttgaagtcaaagaagggcttgttccggtttcagaggatcctgtagccataaagatttcagcttcctccatacagtggaacagttctgtgtggcacacaggctgtggataaactacctgatggacaagaatatcagagaattgagtttggtgtcgatgaagtcattgaacccagtgacactttgccgagaacccccagctacagtatttcaagcacactgaaccctcaggcccctgaatttattctcggttgtacagcttccaaaataacccctgatggtatcactaaagaagcaagctatggctccatcgactgccagtacccaggctctgccctcgctttggatggaagttctaatgtggaggcggaagttttggaaaatgatggtgtctcaggtggtcttggacaaagggagcgtaaaaagaagaaaaagcggccacctggatattacagctatttgaaagatggtggcgatgatagtatctccacagaagcctggctgcgcatcgatgaccagacagtcaaggtgatcaaccagtaccaggtggtgaaaccaactgctgaacgcacagcctacctcctgtattaccgccgagtggacctgctgtaaaccctgtgtgcgctgtgtgtgcgcccagtgcccgcttcgtaggacaccacctcacactcacttcccgcctctctttagtggctctttagagagaaactctttctccctttgcaaaaatgggctagaatgaaaaggagatgccttggggttcgtgcacaacacagcttctgttgactctaacttccaaatcaaaatcatttggttgaaacagactgttgcttgattttagaaaatacacaaaaacccatatttctgaaataatgctgattcctgagataagaaagtggatttgatccccagtctcattgcttagtagaataaatcctgcaccagcaacaacacttgtaaatttgtgaaaatgaattttatctttccttaaaaaagaaattttttaatccatcacacttttcttccctaccctttagtttttgataaatgataaaaatgagccagttatcaaagaagaactagttcttacttcaaaagaaaaataaacataaaaaataagttgctggttcctaacaggaaaaattttaataattgtactgagagaaactgcttacgtacacattgcagatcaaatatttggagttaaaatgttagtctacatagatgggtgattgtaactttattgccattaaaagatttcaaattgcattcatgcttctgtgtacacataatgaaaaatgggcaaataatgaagatctctccttcagtctgctctgtttaattctgctgtctgctcttctctaatgctgcgtccctaattgtacacagtttagtgatatctaggagtataaagttgtcgcccatcaataaaaatcacaaagttggtttaaaaaacacccccacaaaaaacactttgtggcgcgccttggcccccaaaaaaccttttacagacacttccgtgtcggacagccaggggcccagttaggaacagtactccgtggcccacagcgtggtcccccaaggacaccccggcgcaccgaccagtgtgcggcgttctccgcccaattaaaaacgccggggggaacacgacggtccgaacacaatccgagaggagccgaggccgacggactatcacagagatcacagaccaataaacg

SEQ ID NO: 293049 - DNA, 2404 bp, Homo sapiens
cagtgcgcaggcgcggcggccgatgcgagtgtgtatgtgcgggcgagaagatggcggcggcgggggaagcagcgtgagcagccggaggatcgcggagtcccaatgaaacgggcagccatggccctccacagcccgcagtatatttttggagattttagccctgatgaattcaatcaattctttgtgactcctcgatcttcagttgagcttcctccatacagtggaacagttctgtgtggcacacaggctgtggataaactacctgatggacaagaatatcagagaattgagtttggtgtcgatgaagtcattgaacccagtgacactttgccgagaacccccagctacagtatttcaagcacactgaaccctcaggcccctgaatttattctcggttgtacagcttccaaaataacccctgatggtatcactaaagaagcaagctatggctccatcgactgccagtacccaggctctgccctcgctttggatggaagttctaatgtggaggcggaagttttggaaaatgatggtgtctcaggtggtcttggacaaagggagcgtaaaaagaagaaaaagcggccacctggatattacagctatttgaaagatggtggcgatgatagtatctccacagaagccctggtcaatggccatgccaattcagcagtcccgaacagtgtcagtgcagaggatgcagaatttatgggtgacatgcccccgtcagttacgcccaggacttgtaacagcccccagaactccacagactctgtcagtgacattgtgcctgacagtcctttccccggagcactcggcagtgacaccaggactgcagggcagccagaggggggccccggggctgattttggtcagtcctgcttccctgcagaggctggcagagacaccctgtcaaggacagctggggctcagccctgcgttggtaccgatactactgaaaaccttggagttgctaatggacaaatacttgaatcctcgggtgagggcacagctaccaacggggtggagttgcacaccacggaaagcatagacttggacccaaccaaacccgagagtgcatcacctcctgctgacggcacgggctctgcatcaggcacccttcctgtcagccagcccaagtcctgggccagcctctttcatgattctaagccctcttcctcctcgccggtggcctatgtggaaactaagtattcccctcccgccatatctcccctggtttctgaaaagcaggttgaagtcaaagaagggcttgttccggtttcagaggatcctgtagccataaagattgcagagttgctggagaatgtaaccctaatccataaaccagtgtcgttgcaaccccgtgggctgatcaataaagggaactggtgctacattaatgctacactgcaggcattggttgcttgcccgccgatgtaccacctgatgaagttcattcctctgtattccaaagtgcaaaggccttgtacgtcaacacccatgatagacagctttgttcggctaatgaatgagttcactaatatgccagtacctccaaaaccccgacaagctcttggagataaaatcgtgagggatattcgccctggagctgcctttgagcccacatatatttacagactcctgacagttaacaagtcaagcctgtctgaaaagggtcgacaagaagatgctgaggaatacttaggcttcattctaaatggacttcatgaggaaatgttgaacctaaagaagcttctctcaccaagtaatgaaaaacttacgatttccaacggccccaaaaaccactcggtcaatgaagaagagcaggaagaacaaggtgaaggaagcgaggatgaatgggaacaagtgggcccccggaacaagacttccgtcacccgccaggcggattttgttcagactccaatcaccggcatttttggtggacacatcaggtctgtggtttaccagcagagttcaaaagaatctgccactttgcagccatttttcacgttgcagttggatatccagtcagacaagatacgcacagtccaggatgcactggagagcttggtggcaagagaatctgtccaaggttataccacaaaaaccaaacaagaggttgagataagtcgaagagtgactctggaaaaactccctcctgtcctcgtgctgcacctgaaacgattcgtttatgagaagactggtgggtgccagaagcttatcaaaaatattgaatatcctgtggacttggaaattagtaaagaactgctttgtccggggttgttaacaaccccggacaactaccccggacaagatctcccttataaatacacgtgatgccaaaaccatagtttctccagaagccagttttctgagtaaaggcaaaatggttgtcactggaaacttt

SEQ ID NO: 293050 - DNA, 2163 bp, Homo sapiens
cagtgcgcaggcgcggcggccgatgcgagtgtgtatgtgcgggcgagaagatggcggcggcgggggaagcagcgtgagcagccggaggatcgcggagtcccaatgaaacgggcagccatggccctccacagcccgcagtatatttttggagattttagccctgatgaattcaatcaattctttgtgactcctcgatcttcagttgagcttcctccatacagtggaacagttctgtgtggcacacaggctgtggataaactacctgatggacaagaatatcagagaattgagtttggtgtcgatgaagtcattgaacccagtgacactttgccgagaacccccagctacagtatttcaagcacactgaaccctcaggcccctgaatttattctcggttgtacagcttccaaaataacccctgatggtatcactaaagaagcaagctatggctccatcgactgccagtacccaggctctgccctcgctttggatggaagttctaatgtggaggcggaagttttggaaaatgatggtgtctcaggtggtcttggacaaagggagcgtaaaaagaagaaaaagcggccacctggatattacagctatttgaaagatggtggcgatgatagtatctccacagaagccctggtcaatggccatgccaattcagcagtcccgaacagtgtcagtgcagaggatgcagaatttatgggtgacatgcccccgtcagttacgcccaggacttgtaacagcccccagaactccacagactctgtcagtgacattgtgcctgacagtcctttccccggagcactcggcagtgacaccaggactgcagggcagccagaggggggccccggggctgattttggtcagtcctgcttccctgcagaggctggcagagacaccctgtcaaggacagctggggctcagccctgcgttggtaccgatactactgaaaaccttggagttgctaatggacaaatacttgaatcctcgggtgagggcacagctaccaacggggtggagttgcacaccacggaaagcatagacttggacccaaccaaacccgagagtgcatcacctcctgctgacggcacgggctctgcatcaggcacccttcctgtcagccagcccaagtcctgggccagcctctttcatgattctaagccctcttcctcctcgccggtggcctatgtggaaactaagtattcccctcccgccatatctcccctggtttctgaaaagcaggttgaagtcaaagaagggcttgttccggtttcagaggatcctgtagccataaagattgcagagttgctggagaatgtaaccctaatccataaaccagtgtcgttgcaaccccgtgggctgatcaataaagggaactggtgctacattaatgctacactgcaggcattggttgcttgcccgccgatgtaccacctgatgaagttcattcctctgtattccaaagtgcaaaggccttgtacgtcaacacccatgatagacagctttgttcggctaatgaatgagttcactaatatgccagtacctccaaaaccccgacaagctcttggagataaaatcgtgagggatattcgccctggagctgcctttgagcccacatatatttacagactcctgacagttaacaagtcaagcctgtctgaaaagggtcgacaagaagatgctgaggaatacttaggcttcattctaaatggacttcatgaggaaatgttgaacctaaagaagcttctctcaccaagtaatgaaaaacttacgatttccaacggccccaaaaaccactcggtcaatgaagaagagcaggaagaacaaggtgaaggaagcgaggatgaatgggaacaagtgggcccccggaacaagacttccgtcacccgccaggcggattttgttcagactccaatcaccggcatttttggtggacacatcaggtctgtggtttaccagcagagttcaaaagaatctgccactttgcagccatttttcacgttgcagttggatatccagtcagacaagatacgcacagtccaggatgcactggagagcttggtggcaagagaatctgtccaaggttataccacaaaaaccaaacaagagttgggataagtcggagagtgactcaggtggtgtggggtaccgagctag

SEQ ID NO: 293051 - DNA, 1046 bp, Homo sapiens
cggacgcgtgggttttagaaaatacacaaaaacccatatttctaaaatcaagcaacagtctgtttcaaccaaatgattttgatttggaagttagagtcaacagaagctgtgttgtgcacgaaccccaaggcatctcctttggttgaaacagactgttgcttgattttagaaaatacacaaaaacccatatttctgaaataatgctgattcctgagataagaaagtggatttgatccccagtctcattgcttagtagaataaatcctgcaccagcaacaacacttgtaaatttgtgaaaatgaattttatctttccttaaaaaagaaattttttaatccatcacacttttcttccctaccctttagtttttgataaatgataaaaatgagccagttatcaaagaagaactagttcttacttcaaaagaaaaataaacataaaaaataagttgctggttcctaacaggaaaaattttaataattgtactgagagaaactgcttacgtacacattgcagatcaaatatttggagttaaaatgttagtctacatagatgggtgattgtaactttattgccattaaaagatttcaaattgcattcatgcttctgtgtacacataatgaaaaatgggcaaataatgaagatctctccttcagtctgctctgtttaattctgctgtctgctcttctctaatgctgcgtccctaattgtacacagtttagtgatatctaggagtataaagttgtcgcccatcaataaaaatcacaaagttggtttaaaaaacacccccacaaaaaacactttgtggcgcgccttggcccccaaaaaaccttttacagacacttccgtgtcggacagccaggggcccagttaggaacagtactccgtggcccacagcgtggtcccccaaggacaccccggcgcaccgaccagtgtgcggcgttctccgcccaattaaaaacgccggggggaacacgacggtccgaacacaatccgagaggagccgaggccgacggactatcacagagatcacagaccaataaacg

SEQ ID NO: 293052 - DNA, 1744 bp, Homo sapiens
cagtgcgcaggcgcggcggccgatgcgagtgtgtatgtgcgggcgagaagatggcggcggcgggggaagcagcgtgagcagccggaggatcgcggagtcccaatgaaacgggcagccatggccctccacagcccgcagtatatttttggagattttagccctgatgaattcaatcaattctttgtgactcctcgatcttcagttgagcttcctccatacagtggaacagttctgtgtggcacacaggctgtggataaactacctgatggacaagaatatcagagaattgagtttggtgtcgatgaagtcattgaacccagtgacactttgccgagaacccccagctacagtatttcaagcacactgaaccctcaggcccctgaatttattctcggttgtacagcttccaaaataacccctgatggtatcactaaagaagcaagctatggctccatcgactgccagtacccaggctctgccctcgctttggatggaagttctaatgtggaggcggaagttttggaaaatgatggtgtctcaggtggtcttggacaaagggagcgtaaaaagaagaaaaagcggccacctggatattacagctatttgaaagatggtggcgatgatagtatctccacagaagccctggtcaatggccatgccaattcagcagtcccgaacagtgtcagtgcagaggatgcagaatttatgggtgacatgcccccgtcagttacgcccaggacttgtaacagcccccagaactccacagactctgtcagtgacattgtgcctgacagtcctttccccggagcactcggcagtgacaccaggactgcagggcagccagaggggggccccggggctgattttggtcagtcctgcttccctgcagaggctggcagagacaccctgtcaaggacagctggggctcagccctgcgttggtaccgatactactgaaaaccttggagttgctaatggacaaatacttgaatcctcgggtgagggcacagctaccaacggggtggagttgcacaccacggaaagcatagacttggacccaaccaaacccgagagtgcatcacctcctgctgacggcacgggctctgcatcaggcacccttcctgtcagccagcccaagtcctgggccagcctctttcatgattctaagccctcttcctcctcgccggtggcctatgtggaaactaagtattcccctcccgccatatctcccctggtttctgaaaagcaggttgaagtcaaagaagggcttgttccggtttcagaggatcctgtagccataaagattgcaggtatagttgaaaagatacaaatctagagtgaagatgggagcagacctcatcaactgggcttatagactgtggtgttacccataacaatggcagattacctgtgtgttaatagcaacgtctgaaggatgcctatgtcttaaatgttctctaaaagtaagataatatagaaacaaatgggaggagagggttgtcgtaactttatgttaagtgaaagatccatgtctgttagcagttcttttctgttgacaagttacatttccatttcttgccttttgttcaagtaattctgctccacggtatgaatgtataatggactttttctgtgatatacctttggtatgataatcctgatttgtactcactgtgtgctccttttttatatttcttaagatacaagaaatcattttgtgaaataacatggttttttttttttgg

SEQ ID NO: 293053 - DNA, 494 bp, Homo sapiens
gaccgtaaaccagtctagtagactaacattttaactccaaagtattgatctgcaatgtgtacacataatgaaaaatgggcaaataatgaagatctctccttcagtctgctctgtttaattctgctgtctgctcttctctaatgctgcgtccctaattgtacacagtttagtgatatctaggagtataaagttgtcgcccatcaataaaaatcacaaagttggtttaaaaaacacccccacaaaaaacactttgtggcgcgccttggcccccaaaaaaccttttacagacacttccgtgtcggacagccaggggcccagttaggaacagtactccgtggcccacagcgtggtcccccaaggacaccccggcgcaccgaccagtgtgcggcgttctccgcccaattaaaaacgccggggggaacacgacggtccgaacacaatccgagaggagccgaggccgacggactatcacagagatcacagaccaataaacg

SEQ ID NO: 293054 - DNA, 409 bp, Homo sapiens
actttgcaagtactgcatgtcctgcaggcctttgacagtgatcagttcacagtaacgtgattatatttgaccttttcagggtcgacaagaagatgctgaggaatacttaggcttcattctaaatggacttcatgaggaaatgttgaacctaaagaagcttctctcaccaagtaatgaaagtaggttatggtccacttgccgcagagttgtgcaagagttcgctgtaaacaggtgttgcatactcatatgttatgttgcttccctgcccctcagtcgttttcctttcaaatagcatttattccctacgataacttacaccatcgagaaggttatatttaggtaaattacagtttatcccgaacctctgccattttcctttaacttttaattaggaaaatgatcaagccta

SEQ ID NO: 293055 - DNA, 790 bp, Homo sapiens
ctcgagagtttgcgccggttcgcattccccggcctcccgttcgctcccccgcgaaccaggcggccgtgcgcctctcggggcaaccacccaagagcacccgggcgggaggacgccgagcagggggtgttgcgggctgggacaggggcagccacctcccgaagatgcaggatggcagcagagccgcagccgtccagcctttcctaccgcaccacgggctccacctacctgcacccgctcagcgagctcctgggcatcccgctggaccaggtgaattttgtggtatgccagcttgttgctctgtttgctgctttctggtttcgcatctacttacgtcctggtacaaccagctctgatgtccggcatgcggttgccaccatttttggcatctattttgtcatcttttgtttcggctggtactctgtgcatctttttgtgctggtgttaatgtgctatgcaatcatggtcactgctagtgtatccaatattcacagatattccttttttgtagcaatgggatatcttacaatatgccacatcagccgaatatacatcttccactatggaattctcactacggatttttctgggcctctgatgattgtcactcagaagatcacaaccttggcattccaggttcatgatggattaggtcgaagagctgaagacctttctgctgaacaacatcgacttgctatcaaagtgaaaccctcttttttggaatacttaagttaccttctcaatttcatgagtgtcatagctggtccttgtaacaatttcaaggactacatag

SEQ ID NO: 293056 - DNA, 467 bp, Homo sapiens
ggaggggagggtagaggagttattgggtagattttaagtttagcaaatagaaaaaaaaaatctgaagatggatgatggtgatggttgcacaaagtgaatgtacttaataccactgaattgttacatttaaaaatggttaaaatgatttttaaaacacacacgtctgcccaagacagagcttgctctgaggccaaaactcttctaagggagctaggatctgaggaacaaaaataataattccaccctcagctcatcatgacaccattccctgtatagcccctgccacctctgcaatggaaaaatggccaacatgggctttgctgagttgctcagcagatccaaggcctcccaatggctttgctactccctgacaagagaagccttcctacaagaatgcctagtgacccacatataactagcattctcttctttctctcctcagctggagttatactcccaaagacaag

SEQ ID NO: 293057 - DNA, 12468 bp, Homo sapiens
gaagatggcggcggcggcggcggtgacggcgcttcccgtgcggctgaggacgatccgccagtgagcgcggagactgcttccacttcgggcgggggagcgccggaccgaatcggctctctaggccgtggagcttgccgtcccacctccgtccaaatcgacctttcctttctatccccaaccacccctcaacccctgttttcccctgccttccttgcagaggccatggaggacgaggagagacagaagaagctggaggccggcaaagccaagcttgcccagtttcgacaaagaaaagctcagtcggatgggcagagtccttccaagaagcagaaaaaaaagagaaaaacgtcaagcagtaaacatgatgtgtcagcacaccatgatttgaatattgatcaatcacagtgtaatgaaatgtacataaatagttctcagagagtagaatcaactgtgattcctgaatctacaataatgagaactctacatagtggagaaataaccagtcatgagcagggcttctctgtggaactggaaagtgaaatttcaaccacagcagatgactgcagttcagaggtaaatggttgcagttttgtgatgagaacaggaaagcctacaaatttattaagggaagaagaatttggtgttgatgattcttattctgaacaaggagcacaagacagtccgactcatctagagatgatggaaagtgagttggctgggaagcagcatgagattgaagagctaaacagagagctggaagaaatgagggttacctatgggactgaaggactgcagcagttacaagaatttgaagctgccattaaacaaagagatggcattataacccagctcactgctaatttacaacaagcaagaagagaaaaggatgagacaatgagagaatttttagagttgacagaacagagtcaaaaattacagattcaatttcagcaattacaggctagtgaaactctgagaaacagcactcatagtagcacagctgcagacttactacaagccaaacaacagatcctcactcatcaacagcagcttgaagaacaagaccacttattagaagattatcagaaaaagaaagaagacttcacaatgcaaattagtttcttgcaagagaaaattaaagtatatgaaatggaacaagataaaaaagtagaaaactcaaataaagaagaaatacaggaaaaggagacaatcattgaagaattaaacacaaaaataatagaagaagaaaagaaaactcttgagctaaaggataaattaacaactgctgataaattactaggagaattacaagaacagattgtgcaaaagaaccaagaaataaaaaacatgaaattagagctgactaattctaagcaaaaagaaagacagtcttctgaagaaataaaacagttaatggggacagtcgaagaacttcagaagagaaatcataaagacagccagttcgaaactgatatagtacaacgaatggaacaagaaacacaaagaaagttagaacaactccgggcagagctggatgagatgtatgggcagcagatagtgcaaatgaaacaagaattaataagacaacacatggcacagatggaggaaattaaaacacggcataagggagaaatggagaatgctttaaggtcatattcaaatattacagttaatgaagatcagataaagttaatgaatgtggcaataaatgaactgaatataaaattgcaagatactaactctcaaaaggaaaaactcaaggaagaactaggactaattttagaagaaaagtgtgctctacagagacagcttgaagaccttgttgaagaattgagcttttcaagggaacagattcagagagctagacagacaatagctgaacaagaaagtaaacttaatgaagcacataagtcccttagtacagtggaagatttgaaagctgagattgtttctgcatctgaatccagaaaggaactagaattaaaacatgaagcagaagttacaaattacaagataaaacttgaaatgttagaaaaagaaaagaatgctgtgttagacagaatggctgaatcacaagaagctgaattagagaggctgagaacacagcttctatttagtcacgaagaagagctttccaaactgaaggaagatttagaaattgaacatcgaataaatattgaaaaacttaaagataatttaggcattcactataaacagcagatagatggtttacagaatgaaatgagtcaaaagatagaaaccatgcagtttgaaaaggacaatttgataactaagcagaatcaattaattttggaaatttcaaagctaaaagatttacagcagtctcttgtaaattcaaagtcagaagaaatgactcttcaaatcaatgaacttcaaaaagaaattgaaatactcagacaagaagaaaaagaaaagggtacacttgaacaagaagttcaagaattacaacttaaaacagaattgttagaaaaacagatgaaggaaaaagagaatgatcttcaagaaaaatttgcacaacttgaagcagagaatagcattcttaaagatgaaaagaaaacccttgaagacatgttgaaaatacatactcctgttagccaagaagaaagattgattttcttagactccattaagtccaaatccaaagactctgtgtgggaaaaagaaatagaaatacttatagaggaaaatgaggacctcaaacaacaatgtattcagctaaatgaagagattgaaaagcaaaggaacactttttcatttgctgaaaaaaactttgaagttaactatcaagagttacaagaggagtatgcttgccttctcaaagtaaaagatgatttagaagacagtaaaaataaacaggaattagagtataaaagtaaacttaaagcacttaatgaagagcttcatttgcaaagaataaatccaactacagtgaaaatgaaaagttctgtctttgatgaagacaaaacttttgtagcagaaacattggaaatgggtgaggttgttgaaaaggatacaacagaactcatggaaaaacttgaggtaaccaagcgagagaaattagagctgtcacagagactgtctgatctttctgaacaattgaaacagaaacatggtgagattagttttctaaatgaagaagttaaatctttaaagcaagagaaagaacaagtttcattgagatgtagagagctagaaatcattattaaccacaacagggcagaaaatgtacagtcatgtgatactcaagtaagctctttattagatggagttgtgactatgacaagcaggggtgctgaaggatcagtttctaaagtaaataaaagttttggtgaagaatcaaaaataatggtggaagataaagtttcttttgaaaatatgactgttggagaagaaagtaagcaagaacagttgattttggatcacttaccatctgtaacaaaggaatcatcacttagagcaactcaaccaagtgaaaatgataaacttcagaaagaactcaatgtacttaaatcagaacagaatgatttaaggctacagatggaagcccaacgcatttgcctctctctggtttattcaactcatgtggatcaggttcgtgaatatatggaaaatgaaaaagataaagctctttgcagtcttaaagaagagcttatttttgctcaagaggaaaagatcaaggaacttcagaaaatacaccagttagaactacagactatgaaaacacaagaaacaggtgatgaaggaaagcctttacatctgctcattggaaaacttcaaaaggcagtgtctgaagaatgttcttattttttacagactttatgcagtgtccttggtgaatattatactcctgctttaaaatgtgaagtaaatgcagaagacaaagagaattctggtgattacatttctgaaaatgaagatccagaattacaagattatagatatgaagttcaagactttcaagaaaatatgcacactcttctcaacaaagtaacagaagaatacaacaaactcttggtacttcaaacacgactaagcaagatctggggacagcagacagatggtatgaaacttgaatttggagaagaaaaccttccaaaagaggaaacagagtttttatcaatccattctcagatgaccaatttggaagacattgatgtcaatcataaaagcaagttatcttctctgcaagatcttgaaaaaactaaacttgaagaacaagttcaagaattagaaagcctcatatcctctttgcagcaacagttgaaagaaactgaacaaaactatgaggcagagatccactgtttacagaagaggcttcaagctgttagtgagtccacggttccgccaagcttacctgttgattcggtggtaattacagaatctgatgcacagagaacaatgtaccctggaagttgtgtgaaaaagaatattgatggtacaatagagttttctggtgaatttggagtgaaagaggaaacaaatatcgttaagttgcttgaaaaacaataccaagaacaattagaagaagaagtagctaaggttattgtgtcaatgagtatagcatttgctcaacaaactgaactgtctagaatatctgggggaaaagaaaatactgcatcatcaaagcaagcacatgctgtgtgtcagcaagaacaacattattttaatgaaatgaaattatcacaggatcaaattggttttcagacttttgagacagtggatgtgaaatttaaagaagaatttaaaccacttagtaaagagttaggagaacatggaaaggaaattttattatcaaatagtgatccccatgatataccagaatcaaaggactgtgtgctgactatttcagaagaaatgttctccaaagataaaacatttatagttagacagtctattcatgatgagatttcagtgtcaagcatggatgcttctagacaactaatgttgaatgaagaacagttggaagatatgagacaggaacttgtacgacaataccaagaacatcaacaggcaacggaattgttaaggcaagcacatatgcggcaaatggagagacagcgagaagaccaggaacagctacaagaagagattaagagacttaatagacaattagcccagagatcctccatagataatgaaaacctggtttcagagagagagagggtgcttttagaggagctggaagcactaaagcagctgtctttagctggaagagagaagctgtgttgtgagctgcgcaacagcagtacgcaaacacagaatggaaatgaaaaccaaggagaagttgaagaacaaacatttaaagaaaaggaattagacagaaaacctgaagatgtgcctcctgagattttgtctaatgaaaggtatgcactccagaaagctaataatagacttttgaagatcctcttagaagttgtaaagacaacagcagctgttgaagaaacaattggtcgccatgtccttgggattctagatagatctagtaaaagccagtcatctgccagcctaatttggaggtcagaagcagaggcatctgtaaagtcatgtgtccatgaggaacatacaagagttacagatgaatccattccctcttattctggaagtgatatgccaagaaatgacattaacatgtggtcaaaagtaactgaggaaggaacagagctgtcacaacgacttgtgaggagtggttttgctggaactgaaatagaccctgaaaatgaagaacttatgctgaacattagctctcgactacaagcagcagttgaaaaactcctagaagccataagtgaaactagcagtcagcttgaacatgcgaaagtgacacagacagagttgatgcgtgagtcatttagacagaaacaagaagcaacagagtcccttaagtgccaagaggaacttcgagagcgccttcatgaggagtccagggccagagaacagctagctgtggagctcagtaaggctgagggcgtcattgatggctatgcagatgaaaaaactctttttgaaaggcaaattcaggaaaaaactgatataatagatcgtcttgagcaggagttgttatgtgcaagtaacaggttgcaagaattggaggcagagcaacagcagatccaagaagaaagagaattactgtccagacaaaaggaagctatgaaagcagaggcaggcccagttgaacaacaattactacaggagacagaaaaattaatgaaggaaaaactagaagtacaatgtcaagctgaaaaagtacgtgatgaccttcaaaaacaagtgaaagctctagaaatagatgtggaagaacaagtcagtaggtttatagagctggaacaagaaaaaaatactgaactaatggatttaagacagcaaaaccaagcattggaaaagcagttagaaaaaatgagaaaatttttagatgagcaagccattgacagagaacatgagagagatgtattccaacaggaaatacagaaactagaacagcaacttaaggttgttcctcgattccagcctatcagtgaacatcaaactagagaggttgaacagttagcaaatcatctgaaagaaaaaacagacaaatgcagtgagcttttgctctctaaagagcagcttcaaagggatatacaagaaaggaatgaagaaatagagaaactggagttcagagtaagagaactggagcaggcgcttcttgtgagtgcagatacttttcaaaaggtagaggaccgaaaacactttggagctgtagaagctaaaccagaattgtccctagaagtacaattgcaggctgaacgagatgccatagacagaaaggaaaaagagattacaaacttagaagagcaattagaacagtttagagaagaactggaaaataagaatgaagaagttcaacaattacatatgcaattagaaatacagaaaaaggaatctactacccgcctacaagaacttgaacaggaaaacaaattatttaaggatgacatggagaaactgggacttgccataaaggaatctgatgccatgtctactcaagaccaacatgtgctatttgggaaatttgctcaaataatacaggaaaaagaggtagaaattgaccaattaaatgaacaagttacgaaactccagcagcaacttaaaattacaacagataacaaggttattgaagaaaaaaatgaactgataagggatcttgaaacccaaatagaatgtttgatgagtgatcaagaatgtgtgaagagaaatagagaagaagaaatagagcagctcaatgaagtgattgaaaaacttcaacaggaattggcaaatattggacagaagacatcaatgaatgctcattccctctcagaagaagcagacagtttaaaacatcaattggatgtggttatagctgaaaagctggccttggaacagcaagtagaaaccgctaatgaagaaatgaccttcatgaaaaatgtacttaaagaaaccaattttaaaatgaatcagctaacacaggaattattcagcttaaagagagaacgtgaaagtgtggaaaagattcaaagcataccagagaatagtgttaacgtggctatagatcatctgagcaaagacaaacctgaactagaagtagtccttacagaggatgctcttaaatccctagaaaatcagacatacttcaaatcttttgaagaaaatggcaaaggttccataattaatttggaaacaaggttgctacaacttgagagcactgttagtgcaaaggacttagaacttacccagtgttataaacaaataaaagacatgcaagaacaaggccagtttgaaacagaaatgcttcaaaagaagattgtaaacctacagaaaatagttgaagaaaaagtggctgctgctcttgtcagtcaaatccaacttgaggcagttcaggaatatgcaaaattctgtcaagataatcaaacaatttcatcagaacctgaaagaacaaatattcagaatttaaatcaactaagagaagatgagttggggtcagatatatcagcattaaccttgagaatatcagaattagaaagccaggttgttgaaatgcatactagtttgattttagaaaaagaacaagtagaaattgcagaaaaaaatgttttagaaaaagaaaagaagctgctagaactacagaagctattggagggcaatgagaaaaaacagagagagaaagaaaagaaaagaagccctcaagatgttgaagttctcaagacaactactgagctatttcatagcaatgaagaaagtggattttttaatgaactcgaggctcttagagctgaatcagtggctaccaaagcagaacttgccagttataaagaaaaggctgaaaaacttcaagaagagcttttggtaaaagaaacaaatatgacatctcttcagaaagacttaagccaagttagggatcacctcgcagaggcaaaagagaaattgtccattttagaaaaagaagatgagactgaggtacaagaaagcaaaaaggcctgcatgtttgagccacttcctataaaactgagtaagagcattgcatcccagacagatgggactctgaagatcagtagcagcaatcagactccacaaattcttgttaaaaatgcaggaatacaaattaatttacagagtgaatgttcctcagaagaagttactgaaataatcagtcagtttactgaaaaaattgagaagatgcaagaactacatgctgctgaaattttggacatggaatccagacatatttcagaaactgaaaccttaaagagggaacactatgttgccgttcagttactgaaagaggaatgtggtaccttgaaggcagtgatacagtgtctgagaagtaaagagggatcctcaattcctgagctagcacattctgatgcttaccagactagagaaatatgctccagtgattctggatcagactggggtcagggaatttatcttacacacagtcagggatttgacatagcatcagaaggccgaggagaagaaagtgaaagtgcaacagattcctttccaaagaaaataaagggattactgagagctgtccataatgaaggcatgcaggtgctttctctcactgagtctccctatagtgatggagaggaccattctattcagcaggtttcagaatcttggctagaagagagaaaagcttacatcaatacaatctcatctctaaaggatttaattacaaagatgcaactgcaaagagaagccgaggtttatgatagttctcaatctcatgagagcttctcagactggcgaggtgaactactgcttgcccttcaacaagttttcttagaagagcgtagtgttttactagcagcatttcggacggagctgacagctctaggtactacagatgcagttggtttactaaactgtttggaacagagaatacaagaacagggtgttgaatatcaagcagctatggaatgcctccagaaagcagatagaaggagtttgttatctgaaattcaggcactgcatgcacaaatgaatggtaggaaaattactctgaaaagagaacaagagagtgagaaaccaagccaagaactcttggaatataatatacagcagaagcagtctcaaatgctggagatgcaagtggagctcagcagtatgaaagacagagcaacggaactgcaggagcagctgagttctgagaaaatggtggttgctgaactgaagagtgagcttgcacaaactaaattggaactagaaacaacactcaaggcacagcataaacacctaaaagaattggaggctttcaggttggaagttaaagataagacagatgaagtacatttgcttaatgacacattagcaagtgaacagaaaaaatcaagagagctccagtgggctttggagaaagagaaagccaagttgggacgcagtgaagaacgggataaagaagaacttgaggatctgaagttttcacttgagagtcagaaacaaaggaatcttcagctaaatctacttttggaacaacagaaacaactactgaacgaatcccagcaaaaaatagaatcacagagaatgctatatgatgcccagttgtcagaagaacaaggtcgaaacttagagcttcaggtacttcttgaatctgagaaagttcgaattcgggaaatgagtagtaccctagatagggagcgggaattgcacgcacagctgcagagcagtgatggtactggacagtctcggccacccttgccctcagaggacctactgaaagagctgcagaaacagctagaggaaaaacacagtcgcatagtagaattgttaaatgagactgaaaaatataaactggattctttgcaaacacgacagcaaatggaaaaagataggcaggttcacaggaaaacactgcagacagaacaggaggccaacactgagggacagaaaaaaatgcatgagctccagtccaaagtggaagatcttcagcgccagctggaagagaaaagacaacaagtttataagttagaccttgaaggacagcgactacaaggaatcatgcaggaattccagaagcaagaactagaacgagaagaaaaacgagaaagtagaagaattctgtatcagaaccttaatgagccaaccacgtggagcttaaccagtgatagaactagaaattgggttcttcaacagaaaatagaaggagaaacaaaagaatcaaactacgctaaattgattgaaatgaatggaggaggaaccggctgtaatcatgaattagaaatgatcagacaaaagcttcaatgtgtagcttcaaaactacaggttctaccccagaaagcctctgagagactacagtttgaaacagcagatgatgaagatttcatttgggttcaggaaaatattgatgaaattattttacaactacagaaattaactggccagcaaggtgaagagcccagcttggtgtccccaagtacttcttgtggctcattgactgaaagactactgagacaaaatgctgagctgacagggcatatcagtcaactgactgaagagaagaatgacttaaggaacatggttatgaagctggaagagcagatcaggtggtatcgacagacaggagctggtagagataattcttccaggttttcattgaatggtggtgccaacattgaagccatcattgcctctgaaaaagaagtatggaacagagaaaaattgactctccagaaatctttgaaaagggcagaggctgaagtatacaaactgaaagctgaactaagaaatgactctttacttcaaactctgagccctgattctgaacatgtcactttaaagagaatttatggtaaatacttgagggcagaaagttttcgaaaggctctcatttaccagaagaaatacctgctgctgttactgggtgggttccaggaatgtgaagatgccaccttggccctgcttgcccggatgggggggcagccagctttcacggatctagaggtgatcaccaatcgcccaaagggcttcaccaggtttcggtcggccgtcagagtatccattgcaatttccagaatgaaatttttggttcgacggtggcatcgagtcacaggttctgtttccatcaatattaacagagatggctttggactgaatcaaggtgcagaaaagactgactcattttatcattcttctggtgggctggagttatatggagaaccaagacatactacgtatcgctcaagatcagatctggactatattaggtcccctttaccatttcagaataggtacccaggcactccagctgatttcaatcctggttctttagcatgttctcagcttcagaattacgatcctgacagagccctaacagattatatcactcggctagaggcactgcaaagacgacttggaactatacagtcaggttcaactactcaatttcatgctggcatgagaagataatcctttgaaacatcattaattgaagtgattttaaatagatttccttttgtaaatcaatggttcttttgtgcttttgtattgtgaatattcaatgggaccaatatgaacacagcttatgattgtatacaaatcccttgccagcacatgaaaacaaactggaatttgtatatataagcattgtgtatgtattcatgcacaataattattgaattacctgtatatttgtggaatgctaatttaaaacattaaattataaaccttgtgtatttatcaaatgggtgaaaagattaaacttttacgcattacaatactgctgaatgtgtagctcgaggtgtcctgcacttttcttataaggctactgaagttacatgttttgcctaatatattctactggtgatgaagacagataatatcacttgtagagacctatttttgtataatggtagaagttttgaattttatggggtattttgtcaagtactgaaataaaaatgacttcaccattttcaccaaaatatattt

SEQ ID NO: 293058 - DNA, 12445 bp, Homo sapiens
gaagatggcggcggcggcggcggtgacggcgcttcccgtgcggctgaggacgatccgccagtgagcgcggagactgcttccacttcgggcgggggagcgccggaccgaatcggctctctaggccgtggagcttgccgtcccacctccgtccaaatcgacctttcctttctatccccaaccacccctcaacccctgttttcccctgccttccttgcagaggccatggaggacgaggagagacagaagaagctggaggccggcaaagccaagcttgcccagtttcgacaaagaaaagctcagtcggatgggcagagtccttccaagaagcagaaaaaaaagagaaaaacgtcaagcagtaaacatgatgtgtcagcacaccatgatttgaatattgatcaatcacagtgtaatgaaatgtacataaatagttctcagagagtagaatcaactgtgattcctgaatctacaataatgagaactctacatagtggagaaataaccagtcatgagcagggcttctctgtggaactggaaagtgaaatttcaaccacagcagatgactgcagttcagaggtaaatggttgcagttttgtgatgagaacaggaaagcctacaaatttattaagggaagaagaatttggtgttgatgattcttattctgaacaaggagcacaagacagtccgactcatctagagatgatggaaagtgagttggctgggaagcagcatgagattgaagagctaaacagagagctggaagaaatgagggttacctatgggactgaaggactgcagcagttacaagaatttgaagctgccattaaacaaagagatggcattataacccagctcactgctaatttacaacaagcaagaagagaaaaggatgagacaatgagagaatttttagagttgacagaacagagtcaaaaattacagattcaatttcagcaattacaggctagtgaaactctgagaaacagcactcatagtagcacagctgcagacttactacaagccaaacaacagatcctcactcatcaacagcagcttgaagaacaagaccacttattagaagattatcagaaaaagaaagaagacttcacaatgcaaattagtttcttgcaagagaaaattaaagtatatgaaatggaacaagataaaaaagtagaaaactcaaataaagaagaaatacaggaaaaggagacaatcattgaagaattaaacacaaaaataatagaagaagaaaagaaaactcttgagctaaaggataaattaacaactgctgataaattactaggagaattacaagaacagattgtgcaaaagaaccaagaaataaaaaacatgaaattagagctgactaattctaagcaaaaagaaagacagtcttctgaagaaataaaacagttaatggggacagtcgaagaacttcagaagagaaatcataaagacagccagttcgaaactgatatagtacaacgaatggaacaagaaacacaaagaaagttagaacaactccgggcagagctggatgagatgtatgggcagcagatagtgcaaatgaaacaagaattaataagacaacacatggcacagatggaggaaattaaaacacggcataagggagaaatggagaatgctttaaggtcatattcaaatattacagttaatgaagatcagataaagttaatgaatgtggcaataaatgaactgaatataaaattgcaagatactaactctcaaaaggaaaaactcaaggaagaactaggactaattttagaagaaaagtgtgctctacagagacagcttgaagaccttgttgaagaattgagcttttcaagggaacagattcagagagctagacagacaatagctgaacaagaaagtaaacttaatgaagcacataagtcccttagtacagtggaagatttgaaagctgagattgtttctgcatctgaatccagaaaggaactagaattaaaacatgaagcagaagttacaaattacaagataaaacttgaaatgttagaaaaagaaaagaatgctgtgttagacagaatggctgaatcacaagaagctgaattagagaggctgagaacacagcttctatttagtcacgaagaagagctttccaaactgaaggaagatttagaaattgaacatcgaataaatattgaaaaacttaaagataatttaggcattcactataaacagcagatagatggtttacagaatgaaatgagtcaaaagatagaaaccatgcagtttgaaaaggacaatttgataactaagcagaatcaattaattttggaaatttcaaagctaaaagatttacagcagtctcttgtaaattcaaagtcagaagaaatgactcttcaaatcaatgaacttcaaaaagaaattgaaatactcagacaagaagaaaaagaaaagggtacacttgaacaagaagttcaagaattacaacttaaaacagaattgttagaaaaacagatgaaggaaaaagagaatgatcttcaagaaaaatttgcacaacttgaagcagagaatagcattcttaaagatgaaaagaaaacccttgaagacatgttgaaaatacatactcctgttagccaagaagaaagattgattttcttagactccattaagtccaaatccaaagactctgtgtgggaaaaagaaatagaaatacttatagaggaaaatgaggacctcaaacaacaatgtattcagctaaatgaagagattgaaaagcaaaggaacactttttcatttgctgaaaaaaactttgaagttaactatcaagagttacaagaggagtatgcttgccttctcaaagtaaaagatgatttagaagacagtaaaaataaacaggaattagagtataaaagtaaacttaaagcacttaatgaagagcttcatttgcaaagaataaatccaactacagtgaaaatgaaaagttctgtctttgatgaagacaaaacttttgtagcagaaacattggaaatgggtgaggttgttgaaaaggatacaacagaactcatggaaaaacttgaggtaaccaagcgagagaaattagagctgtcacagagactgtctgatctttctgaacaattgaaacagaaacatggtgagattagttttctaaatgaagaagttaaatctttaaagcaagagaaagaacaagtttcattgagatgtagagagctagaaatcattattaaccacaacagggcagaaaatgtacagtcatgtgatactcaagtaagctctttattagatggagttgtgactatgacaagcaggggtgctgaaggatcagtttctaaagtaaataaaagttttggtgaagaatcaaaaataatggtggaagataaagtttcttttgaaaatatgactgttggagaagaaagtaagcaagaacagttgattttggatcacttaccatctgtaacaaaggaatcatcacttagagcaactcaaccaagtgaaaatgataaacttcagaaagaactcaatgtacttaaatcagaacagaatgatttaaggctacagatggaagcccaacgcatttgcctctctctggtttattcaactcatgtggatcaggttcgtgaatatatggaaaatgaaaaagataaagctctttgcagtcttaaagaagagcttatttttgctcaagaggaaaagatcaaggaacttcagaaaatacaccagttagaactacagactatgaaaacacaagaaacaggtgatgaaggaaagcctttacatctgctcattggaaaacttcaaaaggcagtgtctgaagaatgttcttattttttacagactttatgcagtgtccttggtgaatattatactcctgctttaaaatgtgaagtaaatgcagaagacaaagagaattctggtgattacatttctgaaaatgaagatccagaattacaagattatagatatgaagttcaagactttcaagaaaatatgcacactcttctcaacaaagtaacagaagaatacaacaaactcttggtacttcaaacacgactaagcaagatctggggacagcagacagatggtatgaaacttgaatttggagaagaaaaccttccaaaagaggaaacagagtttttatcaatccattctcagatgaccaatttggaagacattgatgtcaatcataaaagcaagttatcttctctgcaagatcttgaaaaaactaaacttgaagaacaagttcaagaattagaaagcctcatatcctctttgcagcaacagttgaaagaaactgaacaaaactatgaggcagagatccactgtttacagaagaggcttcaagctgttagtgagtccacggttccgccaagcttacctgttgattcggtggtaattacagaatctgatgcacagagaacaatgtaccctggaagttgtgtgaaaaagaatattgatggtacaatagagttttctggtgaatttggagtgaaagaggaaacaaatatcgttaagttgcttgaaaaacaataccaagaacaattagaagaagaagtagctaaggttattgtgtcaatgagtatagcatttgctcaacaaactgaactgtctagaatatctgggggaaaagaaaatactgcatcatcaaagcaagcacatgctgtgtgtcagcaagaacaacattattttaatgaaatgaaattatcacaggatcaaattggttttcagacttttgagacagtggatgtgaaatttaaagaagaatttaaaccacttagtaaagagttaggagaacatggaaaggaaattttattatcaaatagtgatccccatgatataccagaatcaaaggactgtgtgctgactatttcagaagaaatgttctccaaagataaaacatttatagttagacagtctattcatgatgagatttcagtgtcaagcatggatgcttctagacaactaatgttgaatgaagaacagttggaagatatgagacaggaacttgtacgacaataccaagaacatcaacaggcaacggaattgttaaggcaagcacatatgcggcaaatggagagacagcgagaagaccaggaacagctacaagaagagattaagagacttaatagacaattagcccagagatcctccatagataatgaaaacctggtttcagagagagagagggtgcttttagaggagctggaagcactaaagcagctgtctttagctggaagagagaagctgtgttgtgagctgcgcaacagcagtacgcaaacacagaatggaaatgaaaaccaaggagaagttgaagaacaaacatttaaagaaaaggaattagacagaaaacctgaagatgtgcctcctgagattttgtctaatgaaaggtatgcactccagaaagctaataatagacttttgaagatcctcttagaagttgtaaagacaacagcagctgttgaagaaacaattggtcgccatgtccttgggattctagatagatctagtaaaagccagtcatctgccagcctaatttggaggtcagaagcagaggcatctgtaaagtcatgtgtccatgaggaacatacaagagttacagatgaatccattccctcttattctggaagtgatatgccaagaaatgacattaacatgtggtcaaaagtaactgaggaaggaacagagctgtcacaacgacttgtgaggagtggttttgctggaactgaaatagaccctgaaaatgaagaacttatgctgaacattagctctcgactacaagcagcagttgaaaaactcctagaagccataagtgaaactagcagtcagcttgaacatgcgaaagtgacacagacagagttgatgcgtgagtcatttagacagaaacaagaagcaacagagtcccttaagtgccaagaggaacttcgagagcgccttcatgaggagtccagggccagagaacagctagctgtggagctcagtaaggctgagggcgtcattgatggctatgcagatgaaaaaactctttttgaaaggcaaattcaggaaaaaactgatataatagatcgtcttgagcaggagttgttatgtgcaagtaacaggttgcaagaattggaggcagagcaacagcagatccaagaagaaagagaattactgtccagacaaaaggaagctatgaaagcagaggcaggcccagttgaacaacaattactacaggagacagaaaaattaatgaaggaaaaactagaagtacaatgtcaagctgaaaaagtacgtgatgaccttcaaaaacaagtgaaagctctagaaatagatgtggaagaacaagtcagtaggtttatagagctggaacaagaaaaaaatactgaactaatggatttaagacagcaaaaccaagcattggaaaagcagttagaaaaaatgagaaaatttttagatgagcaagccattgacagagaacatgagagagatgtattccaacaggaaatacagaaactagaacagcaacttaaggttgttcctcgattccagcctatcagtgaacatcaaactagagaggttgaacagttagcaaatcatctgaaagaaaaaacagacaaatgcagtgagcttttgctctctaaagagcagcttcaaagggatatacaagaaaggaatgaagaaatagagaaactggagttcagagtaagagaactggagcaggcgcttcttggtagaggaccgaaaacactttggagctgtagaagctaaaccagaattgtccctagaagtacaattgcaggctgaacgagatgccatagacagaaaggaaaaagagattacaaacttagaagagcaattagaacagtttagagaagaactggaaaataagaatgaagaagttcaacaattacatatgcaattagaaatacagaaaaaggaatctactacccgcctacaagaacttgaacaggaaaacaaattatttaaggatgacatggagaaactgggacttgccataaaggaatctgatgccatgtctactcaagaccaacatgtgctatttgggaaatttgctcaaataatacaggaaaaagaggtagaaattgaccaattaaatgaacaagttacgaaactccagcagcaacttaaaattacaacagataacaaggttattgaagaaaaaaatgaactgataagggatcttgaaacccaaatagaatgtttgatgagtgatcaagaatgtgtgaagagaaatagagaagaagaaatagagcagctcaatgaagtgattgaaaaacttcaacaggaattggcaaatattggacagaagacatcaatgaatgctcattccctctcagaagaagcagacagtttaaaacatcaattggatgtggttatagctgaaaagctggccttggaacagcaagtagaaaccgctaatgaagaaatgaccttcatgaaaaatgtacttaaagaaaccaattttaaaatgaatcagctaacacaggaattattcagcttaaagagagaacgtgaaagtgtggaaaagattcaaagcataccagagaatagtgttaacgtggctatagatcatctgagcaaagacaaacctgaactagaagtagtccttacagaggatgctcttaaatccctagaaaatcagacatacttcaaatcttttgaagaaaatggcaaaggttccataattaatttggaaacaaggttgctacaacttgagagcactgttagtgcaaaggacttagaacttacccagtgttataaacaaataaaagacatgcaagaacaaggccagtttgaaacagaaatgcttcaaaagaagattgtaaacctacagaaaatagttgaagaaaaagtggctgctgctcttgtcagtcaaatccaacttgaggcagttcaggaatatgcaaaattctgtcaagataatcaaacaatttcatcagaacctgaaagaacaaatattcagaatttaaatcaactaagagaagatgagttggggtcagatatatcagcattaaccttgagaatatcagaattagaaagccaggttgttgaaatgcatactagtttgattttagaaaaagaacaagtagaaattgcagaaaaaaatgttttagaaaaagaaaagaagctgctagaactacagaagctattggagggcaatgagaaaaaacagagagagaaagaaaagaaaagaagccctcaagatgttgaagttctcaagacaactactgagctatttcatagcaatgaagaaagtggattttttaatgaactcgaggctcttagagctgaatcagtggctaccaaagcagaacttgccagttataaagaaaaggctgaaaaacttcaagaagagcttttggtaaaagaaacaaatatgacatctcttcagaaagacttaagccaagttagggatcacctcgcagaggcaaaagagaaattgtccattttagaaaaagaagatgagactgaggtacaagaaagcaaaaaggcctgcatgtttgagccacttcctataaaactgagtaagagcattgcatcccagacagatgggactctgaagatcagtagcagcaatcagactccacaaattcttgttaaaaatgcaggaatacaaattaatttacagagtgaatgttcctcagaagaagttactgaaataatcagtcagtttactgaaaaaattgagaagatgcaagaactacatgctgctgaaattttggacatggaatccagacatatttcagaaactgaaaccttaaagagggaacactatgttgccgttcagttactgaaagaggaatgtggtaccttgaaggcagtgatacagtgtctgagaagtaaagagggatcctcaattcctgagctagcacattctgatgcttaccagactagagaaatatgctccagtgattctggatcagactggggtcagggaatttatcttacacacagtcagggatttgacatagcatcagaaggccgaggagaagaaagtgaaagtgcaacagattcctttccaaagaaaataaagggattactgagagctgtccataatgaaggcatgcaggtgctttctctcactgagtctccctatagtgatggagaggaccattctattcagcaggtttcagaatcttggctagaagagagaaaagcttacatcaatacaatctcatctctaaaggatttaattacaaagatgcaactgcaaagagaagccgaggtttatgatagttctcaatctcatgagagcttctcagactggcgaggtgaactactgcttgcccttcaacaagttttcttagaagagcgtagtgttttactagcagcatttcggacggagctgacagctctaggtactacagatgcagttggtttactaaactgtttggaacagagaatacaagaacagggtgttgaatatcaagcagctatggaatgcctccagaaagcagatagaaggagtttgttatctgaaattcaggcactgcatgcacaaatgaatggtaggaaaattactctgaaaagagaacaagagagtgagaaaccaagccaagaactcttggaatataatatacagcagaagcagtctcaaatgctggagatgcaagtggagctcagcagtatgaaagacagagcaacggaactgcaggagcagctgagttctgagaaaatggtggttgctgaactgaagagtgagcttgcacaaactaaattggaactagaaacaacactcaaggcacagcataaacacctaaaagaattggaggctttcaggttggaagttaaagataagacagatgaagtacatttgcttaatgacacattagcaagtgaacagaaaaaatcaagagagctccagtgggctttggagaaagagaaagccaagttgggacgcagtgaagaacgggataaagaagaacttgaggatctgaagttttcacttgagagtcagaaacaaaggaatcttcagctaaatctacttttggaacaacagaaacaactactgaacgaatcccagcaaaaaatagaatcacagagaatgctatatgatgcccagttgtcagaagaacaaggtcgaaacttagagcttcaggtacttcttgaatctgagaaagttcgaattcgggaaatgagtagtaccctagatagggagcgggaattgcacgcacagctgcagagcagtgatggtactggacagtctcggccacccttgccctcagaggacctactgaaagagctgcagaaacagctagaggaaaaacacagtcgcatagtagaattgttaaatgagactgaaaaatataaactggattctttgcaaacacgacagcaaatggaaaaagataggcaggttcacaggaaaacactgcagacagaacaggaggccaacactgagggacagaaaaaaatgcatgagctccagtccaaagtggaagatcttcagcgccagctggaagagaaaagacaacaagtttataagttagaccttgaaggacagcgactacaaggaatcatgcaggaattccagaagcaagaactagaacgagaagaaaaacgagaaagtagaagaattctgtatcagaaccttaatgagccaaccacgtggagcttaaccagtgatagaactagaaattgggttcttcaacagaaaatagaaggagaaacaaaagaatcaaactacgctaaattgattgaaatgaatggaggaggaaccggctgtaatcatgaattagaaatgatcagacaaaagcttcaatgtgtagcttcaaaactacaggttctaccccagaaagcctctgagagactacagtttgaaacagcagatgatgaagatttcatttgggttcaggaaaatattgatgaaattattttacaactacagaaattaactggccagcaaggtgaagagcccagcttggtgtccccaagtacttcttgtggctcattgactgaaagactactgagacaaaatgctgagctgacagggcatatcagtcaactgactgaagagaagaatgacttaaggaacatggttatgaagctggaagagcagatcaggtggtatcgacagacaggagctggtagagataattcttccaggttttcattgaatggtggtgccaacattgaagccatcattgcctctgaaaaagaagtatggaacagagaaaaattgactctccagaaatctttgaaaagggcagaggctgaagtatacaaactgaaagctgaactaagaaatgactctttacttcaaactctgagccctgattctgaacatgtcactttaaagagaatttatggtaaatacttgagggcagaaagttttcgaaaggctctcatttaccagaagaaatacctgctgctgttactgggtgggttccaggaatgtgaagatgccaccttggccctgcttgcccggatgggggggcagccagctttcacggatctagaggtgatcaccaatcgcccaaagggcttcaccaggtttcggtcggccgtcagagtatccattgcaatttccagaatgaaatttttggttcgacggtggcatcgagtcacaggttctgtttccatcaatattaacagagatggctttggactgaatcaaggtgcagaaaagactgactcattttatcattcttctggtgggctggagttatatggagaaccaagacatactacgtatcgctcaagatcagatctggactatattaggtcccctttaccatttcagaataggtacccaggcactccagctgatttcaatcctggttctttagcatgttctcagcttcagaattacgatcctgacagagccctaacagattatatcactcggctagaggcactgcaaagacgacttggaactatacagtcaggttcaactactcaatttcatgctggcatgagaagataatcctttgaaacatcattaattgaagtgattttaaatagatttccttttgtaaatcaatggttcttttgtgcttttgtattgtgaatattcaatgggaccaatatgaacacagcttatgattgtatacaaatcccttgccagcacatgaaaacaaactggaatttgtatatataagcattgtgtatgtattcatgcacaataattattgaattacctgtatatttgtggaatgctaatttaaaacattaaattataaaccttgtgtatttatcaaatgggtgaaaagattaaacttttacgcattacaatactgctgaatgtgtagctcgaggtgtcctgcacttttcttataaggctactgaagttacatgttttgcctaatatattctactggtgatgaagacagataatatcacttgtagagacctatttttgtataatggtagaagttttgaattttatggggtattttgtcaagtactgaaataaaaatgacttcaccattttcaccaaaatatattt

SEQ ID NO: 293059 - DNA, 3264 bp, Homo sapiens
  misc_feature (183)..(183): n is a, c, g, or t
attgcaacctccacctcccgggctcaagcaatccccccacctcagcctcctgagtcgatgggactacaggcacatgccagcacgcccagctaatttttgtatttttagtagagacagagtttcaccatgttgcccaggctggtcttgaactcctggccttaagcagtcctccctcccacctcngcctcccaaagtgctgggattacaggtgtgagccaccatgcctggactgcattaccaactcttgggactataatttttcatgtttcctttgaagtaatctccttaactacaaatcagttcttatcaacaaatatttataaaccaaatatgagttgcttgattatgtttcaaatattaatcatgttctgtgtagaactcttggaatataatatacagcagaagcagtctcaaatgctggagatgcaagtggagctcagcagtatgaaagacagagcaacggaactgcaggagcagctgagttctgagaaaatggtggttgctgaactgaagagtgagcttgcacaaactaaattggaactagaaacaacactcaaggcacagcataaacacctaaaagaattggaggctttcaggttggaagttaaagataagacagatgaagtacatttgcttaatgacacattagcaagtgaacagaaaaaatcaagagagctccagtgggctttggagaaagagaaagccaagttgggacgcagtgaagaacgggataaagaagaacttgaggatctgaagttttcacttgagagtcagaaacaaaggaatcttcagctaaatctacttttggaacaacagaaacaactactgaacgaatcccagcaaaaaatagaatcacagagaatgctatatgatgcccagttgtcagaagaacaaggtcgaaacttagagcttcaggtacttcttgaatctgagaaagttcgaattcgggaaatgagtagtaccctagatagggagcgggaattgcacgcacagctgcagagcagtgatggtactggacagtctcggccacccttgccctcagaggacctactgaaagagctgcagaaacagctagaggaaaaacacagtcgcatagtagaattgttaaatgagactgaaaaatataaactggattctttgcaaacacgacagcaaatggaaaaagataggcaggttcacaggaaaacactgcagacagaacaggaggccaacactgagggacagaaaaaaatgcatgagctccagtccaaagtggaagatcttcagcgccagctggaagagaaaagacaacaagtttataagttagaccttgaaggacagcgactacaaggaatcatgcaggaattccagaagcaagaactagaacgagaagaaaaacgagaaagtagaagaattctgtatcagaaccttaatgagccaaccacgtggagcttaaccagtgatagaactagaaattgggttcttcaacagaaaatagaaggagaaacaaaagaatcaaactacgctaaattgattgaaatgaatggaggaggaaccggctgtaatcatgaattagaaatgatcagacaaaagcttcaatgtgtagcttcaaaactacaggttctaccccagaaagcctctgagagactacagtttgaaacagcagatgatgaagatttcatttgggttcaggaaaatattgatgaaattattttacaactacagaaattaactggccagcaaggtgaagagcccagcttggtgtccccaagtacttcttgtggctcattgactgaaagactactgagacaaaatgctgagctgacagggcatatcagtcaactgactgaagagaagaatgacttaaggaacatggttatgaagctggaagagcagatcaggtggtatcgacagacaggagctggtagagataattcttccaggttttcattgaatggtggtgccaacattgaagccatcattgcctctgaaaaagaagtatggaacagagaaaaattgactctccagaaatctttgaaaagggcagaggctgaagtatacaaactgaaagctgaactaagaaatgactctttacttcaaactctgagccctgattctgaacatgtcactttaaagagaatttatggtaaatacttgagggcagaaagttttcgaaaggctctcatttaccagaagaaatacctgctgctgttactgggtgggttccaggaatgtgaagatgccaccttggccctgcttgcccggatgggggggcagccagctttcacggatctagaggtgatcaccaatcgcccaaagggcttcaccaggtttcggtcggccgtcagagtatccattgcaatttccagaatgaaatttttggttcgacggtggcatcgagtcacaggttctgtttccatcaatattaacagagatggctttggactgaatcaaggtgcagaaaagactgactcattttatcattcttctggtgggctggagttatatggagaaccaagacatactacgtatcgctcaagatcagatctggactatattaggtcccctttaccatttcagaataggtacccaggcactccagctgatttcaatcctggttctttagcatgttctcagcttcagaattacgatcctgacagagccctaacagattatatcactcggctagaggcactgcaaagacgacttggaactatacagtcaggttcaactactcaatttcatgctggcatgagaagataatcctttgaaacatcattaattgaagtgattttaaatagatttccttttgtaaatcaatggttcttttgtgcttttgtattgtgaatattcaatgggaccaatatgaacacagcttatgattgtatacaaatcccttgccagcacatgaaaacaaactggaatttgtatatataagcattgtgtatgtattcatgcacaataattattgaattacctgtatatttgtggaatgctaatttaaaacattaaattataaaccttgtgtatttatcaaatgggtgaaaagattaaacttttacgcattacaatactgctgaatgtgtagctcgaggtgtcctgcacttttcttataaggctactgaagttacatgttttgcctaatatattctactggtgatgaagacagataatatcacttgtagagacctatttttgtataatggtagaagttttgaattttatggggtattttgtcaagtactgaaataaaaatgacttcaccattttcaccaaaatatattt

SEQ ID NO: 293060 - DNA, 1403 bp, Homo sapiens
gaagatggcggcggcggcggcggtgacggcgcttcccgtgcggctgaggacgatccgccagtgagcgcggagactgcttccacttcgggcgggggagcgccggaccgaatcggctctctaggccgtggagcttgccgtcccacctccgtccaaatcgacctttcctttctatccccaaccacccctcaacccctgttttcccctgccttccttgcagaggccatggaggacgaggagagacagaagaagctggaggccggcaaagccaagcttgcccagtttcgacaaagaaaagctcagtcggatgggcagagtccttccaagaagcagaaaaaaaagagaaaaacgtcaagcagtaaacatgatgtgtcagcacaccatgatttgaatattgatcaatcacagtgtaatgaaatgtacataaatagttctcagagagtagaatcaactgtgattcctgaatctacaataatgagaactctacatagtggagaaataaccagtcatgagcagggcttctctgtggaactggaaagtgaaatttcaaccacagcagatgactgcagttcagaggtaaatggttgcagttttgtgatgagaacaggaaagcctacaaatttattaagggaagaagaatttggtgttgatgattcttattctgaacaaggagcacaagacagtccgactcatctagagatgatggaaagtgagttggctgggaagcagcatgagattgaagagctaaacagagagctggaagaaatgagggttacctatgggactgaaggactgcagcagttacaagaatttgaagctgccattaaacaaagagatggcattataacccagctcactgctaatttacaacaagcaagaagagaaaaggatgagacaatgagagaatttttagagttgacagaacagagtcaaaaattacagattcaatttcagcaattacaggctagtgaaactctgagaaacagcactcatagtagcacagctgcagacttactacaagccaaacaacagatcctcactcatcaacagcagcttgaagaacaagaccacttattagaagattatcagaaaaagaaagaagacttcacaatgcaaattagtttcttgcaagagaaaattaaagtatatgaaatggtatgtttattttaaggaagtcagctaacttgtagaagctttagagtttcaagttttttatgcaagtggtttttttttgttaggcacatgaatcacaaaatttcataattaagctctttgtgtaatttatttcaaaagcaaatgggaatctcagtaatgtagtttttaagataatagtcattactgagttccctaaaagtgatcagcctatgttaaactgaattagcaggaaaatacaaatttatagctat

SEQ ID NO: 293061 - DNA, 685 bp, Homo sapiens
tagtagcagtatatgagagttacgttgcttcacatctttgccaacagttagtatagtcagacttctgttgccaatctgatgggtgtgcagtggattcttattgtggttttaattggctgttctctagttcctgaagggtttagtcctttttcatatggtaattggctagttggatttttatttttgtgatatgcttgtttaggtactttttgataacagtatctggtcttttaaattgagctacagatggaaatcattagaaagtaaagtgaaatctaattttcatcatgtccactgaggacacatacctgtgtgttcagtaattttgtgtcatgtactggtagaaacatgtatcctttggaaaattttgaaagtcacagcatggtctcacattggtcattataaagctgaagcaggctgggccctgtggttcacgcctgtggtcccagcactttgggaggccgaggtgggaggatcacgaggtcaggagtgcgagaccagcctggccaacatggtgaaaccccgtctctgctaagaatacaaaaattagcttggcgtgatgctcggtgcctgtggtcccagctactcgggaggctgaggcaggagaatcgtctgaacttaggaggcagaggttgcggtgagttgggatcgtgccattgtactccagcttggacgacagggcaag

SEQ ID NO: 293062 - DNA, 869 bp, Homo sapiens
attccagatactcagaaatactcatattcaaaagtaaacaaaataacattttgaaagccgaatttttgtttgtactgttttctcctttagcaagaataatagaaaatgactataaataggagattgtataatatagtataatagtcttttgagcagttacctattttgtagaaattttttaaggtcttgggattttatttttctttacaaggaatattttgggttactttaggtgcagaaaagactgactcattttatcattcttctggtgggctggagttatatggagaaccaagacatactacgtatcgctcaagatcagatctggactatattaggtcccctttaccatttcagaataggtaagaatatgagaaaacctgcctggaattgttaaatgtattaatatttaacagagataaatggacatttttagggctttgacttctttgcattgagatagacatctttgttatatataatttacataatatgaccaagtgcggtggctcacacctataatcccagcactttgggaggctgaggcgggcagatcatgaggtcaggagttcaagaccagctagttggagactagcctggccaacatggtgaaaccctgtctctactaaaaatacaaaaaattagccaggcgtggtggcaggcgcctgtggtcccagctacttgggaggctgaggcaggagaatggtgtgaacccgggaggcggagctggcagtgagctgagattgtgccactgcactctggcctgggcaacggagcgagactctgtctcaaaaaaaaatacaaaaaaattagccaggcatggtggtgggtgcctgtaatcccagctactcaggaggctgaggcaggag

SEQ ID NO: 293063 - DNA, 12617 bp, Homo sapiens
gatctgtggagcccagaaagttgaggtgagctgtgatggcgctactgcactccagcctggatgacagagtaagaccctgtctcaaaaaataaaataaaatcttggtgagattatattctcactaagcagtgaatgacagtgcctgatttcccttattctgcctaattctgggcttattttcttttatttagacatgacattttcagttcttacccctcaatatttcagtaggtttattcagaaatgtttctttgcattccagtagttacattaaagactgtaataattgttctttattttttcatttttatttagtgatagtttgatctttaaaagagagactcccaaagctgcttttttcttggtggcaataaagaaaaattatctttgacaataacggttattttcttttttcttagcttgcccagtttcgacaaagaaaagctcagtcggatgggcagagtccttccaagaagcagaaaaaaaagagaaaaacgtcaagcagtaaacatgatgtgtcagcacaccatgatttgaatattgatcaatcacagtgtaatgaaatgtacataaatagttctcagagagtagaatcaactgtgattcctgaatctacaataatgagaactctacatagtggagaaataaccagtcatgagcagggcttctctgtggaactggaaagtgaaatttcaaccacagcagatgactgcagttcagaggtaaatggttgcagttttgtgatgagaacaggaaagcctacaaatttattaagggaagaagaatttggtgttgatgattcttattctgaacaaggagcacaagacagtccgactcatctagagatgatggaaagtgagttggctgggaagcagcatgagattgaagagctaaacagagagctggaagaaatgagggttacctatgggactgaaggactgcagcagttacaagaatttgaagctgccattaaacaaagagatggcattataacccagctcactgctaatttacaacaagcaagaagagaaaaggatgagacaatgagagaatttttagagttgacagaacagagtcaaaaattacagattcaatttcagcaattacaggctagtgaaactctgagaaacagcactcatagtagcacagctgcagacttactacaagccaaacaacagatcctcactcatcaacagcagcttgaagaacaagaccacttattagaagattatcagaaaaagaaagaagacttcacaatgcaaattagtttcttgcaagagaaaattaaagtatatgaaatggaacaagataaaaaagtagaaaactcaaataaagaagaaatacaggaaaaggagacaatcattgaagaattaaacacaaaaataatagaagaagaaaagaaaactcttgagctaaaggataaattaacaactgctgataaattactaggagaattacaagaacagattgtgcaaaagaaccaagaaataaaaaacatgaaattagagctgactaattctaagcaaaaagaaagacagtcttctgaagaaataaaacagttaatggggacagtcgaagaacttcagaagagaaatcataaagacagccagttcgaaactgatatagtacaacgaatggaacaagaaacacaaagaaagttagaacaactccgggcagagctggatgagatgtatgggcagcagatagtgcaaatgaaacaagaattaataagacaacacatggcacagatggaggaaattaaaacacggcataagggagaaatggagaatgctttaaggtcatattcaaatattacagttaatgaagatcagataaagttaatgaatgtggcaataaatgaactgaatataaaattgcaagatactaactctcaaaaggaaaaactcaaggaagaactaggactaattttagaagaaaagtgtgctctacagagacagcttgaagaccttgttgaagaattgagcttttcaagggaacagattcagagagctagacagacaatagctgaacaagaaagtaaacttaatgaagcacataagtcccttagtacagtggaagatttgaaagctgagattgtttctgcatctgaatccagaaaggaactagaattaaaacatgaagcagaagttacaaattacaagataaaacttgaaatgttagaaaaagaaaagaatgctgtgttagacagaatggctgaatcacaagaagctgaattagagaggctgagaacacagcttctatttagtcacgaagaagagctttccaaactgaaggaagatttagaaattgaacatcgaataaatattgaaaaacttaaagataatttaggcattcactataaacagcagatagatggtttacagaatgaaatgagtcaaaagatagaaaccatgcagtttgaaaaggacaatttgataactaagcagaatcaattaattttggaaatttcaaagctaaaagatttacagcagtctcttgtaaattcaaagtcagaagaaatgactcttcaaatcaatgaacttcaaaaagaaattgaaatactcagacaagaagaaaaagaaaagggtacacttgaacaagaagttcaagaattacaacttaaaacagaattgttagaaaaacagatgaaggaaaaagagaatgatcttcaagaaaaatttgcacaacttgaagcagagaatagcattcttaaagatgaaaagaaaacccttgaagacatgttgaaaatacatactcctgttagccaagaagaaagattgattttcttagactccattaagtccaaatccaaagactctgtgtgggaaaaagaaatagaaatacttatagaggaaaatgaggacctcaaacaacaatgtattcagctaaatgaagagattgaaaagcaaaggaacactttttcatttgctgaaaaaaactttgaagttaactatcaagagttacaagaggagtatgcttgccttctcaaagtaaaagatgatttagaagacagtaaaaataaacaggaattagagtataaaagtaaacttaaagcacttaatgaagagcttcatttgcaaagaataaatccaactacagtgaaaatgaaaagttctgtctttgatgaagacaaaacttttgtagcagaaacattggaaatgggtgaggttgttgaaaaggatacaacagaactcatggaaaaacttgaggtaaccaagcgagagaaattagagctgtcacagagactgtctgatctttctgaacaattgaaacagaaacatggtgagattagttttctaaatgaagaagttaaatctttaaagcaagagaaagaacaagtttcattgagatgtagagagctagaaatcattattaaccacaacagggcagaaaatgtacagtcatgtgatactcaagtaagctctttattagatggagttgtgactatgacaagcaggggtgctgaaggatcagtttctaaagtaaataaaagttttggtgaagaatcaaaaataatggtggaagataaagtttcttttgaaaatatgactgttggagaagaaagtaagcaagaacagttgattttggatcacttaccatctgtaacaaaggaatcatcacttagagcaactcaaccaagtgaaaatgataaacttcagaaagaactcaatgtacttaaatcagaacagaatgatttaaggctacagatggaagcccaacgcatttgcctctctctggtttattcaactcatgtggatcaggttcgtgaatatatggaaaatgaaaaagataaagctctttgcagtcttaaagaagagcttatttttgctcaagaggaaaagatcaaggaacttcagaaaatacaccagttagaactacagactatgaaaacacaagaaacaggtgatgaaggaaagcctttacatctgctcattggaaaacttcaaaaggcagtgtctgaagaatgttcttattttttacagactttatgcagtgtccttggtgaatattatactcctgctttaaaatgtgaagtaaatgcagaagacaaagagaattctggtgattacatttctgaaaatgaagatccagaattacaagattatagatatgaagttcaagactttcaagaaaatatgcacactcttctcaacaaagtaacagaagaatacaacaaactcttggtacttcaaacacgactaagcaagatctggggacagcagacagatggtatgaaacttgaatttggagaagaaaaccttccaaaagaggaaacagagtttttatcaatccattctcagatgaccaatttggaagacattgatgtcaatcataaaagcaagttatcttctctgcaagatcttgaaaaaactaaacttgaagaacaagttcaagaattagaaagcctcatatcctctttgcagcaacagttgaaagaaactgaacaaaactatgaggcagagatccactgtttacagaagaggcttcaagctgttagtgagtccacggttccgccaagcttacctgttgattcggtggtaattacagaatctgatgcacagagaacaatgtaccctggaagttgtgtgaaaaagaatattgatggtacaatagagttttctggtgaatttggagtgaaagaggaaacaaatatcgttaagttgcttgaaaaacaataccaagaacaattagaagaagaagtagctaaggttattgtgtcaatgagtatagcatttgctcaacaaactgaactgtctagaatatctgggggaaaagaaaatactgcatcatcaaagcaagcacatgctgtgtgtcagcaagaacaacattattttaatgaaatgaaattatcacaggatcaaattggttttcagacttttgagacagtggatgtgaaatttaaagaagaatttaaaccacttagtaaagagttaggagaacatggaaaggaaattttattatcaaatagtgatccccatgatataccagaatcaaaggactgtgtgctgactatttcagaagaaatgttctccaaagataaaacatttatagttagacagtctattcatgatgagatttcagtgtcaagcatggatgcttctagacaactaatgttgaatgaagaacagttggaagatatgagacaggaacttgtacgacaataccaagaacatcaacaggcaacggaattgttaaggcaagcacatatgcggcaaatggagagacagcgagaagaccaggaacagctacaagaagagattaagagacttaatagacaattagcccagagatcctccatagataatgaaaacctggtttcagagagagagagggtgcttttagaggagctggaagcactaaagcagctgtctttagctggaagagagaagctgtgttgtgagctgcgcaacagcagtacgcaaacacagaatggaaatgaaaaccaaggagaagttgaagaacaaacatttaaagaaaaggaattagacagaaaacctgaagatgtgcctcctgagattttgtctaatgaaaggtatgcactccagaaagctaataatagacttttgaagatcctcttagaagttgtaaagacaacagcagctgttgaagaaacaattggtcgccatgtccttgggattctagatagatctagtaaaagccagtcatctgccagcctaatttggaggtcagaagcagaggcatctgtaaagtcatgtgtccatgaggaacatacaagagttacagatgaatccattccctcttattctggaagtgatatgccaagaaatgacattaacatgtggtcaaaagtaactgaggaaggaacagagctgtcacaacgacttgtgaggagtggttttgctggaactgaaatagaccctgaaaatgaagaacttatgctgaacattagctctcgactacaagcagcagttgaaaaactcctagaagccataagtgaaactagcagtcagcttgaacatgcgaaagtgacacagacagagttgatgcgtgagtcatttagacagaaacaagaagcaacagagtcccttaagtgccaagaggaacttcgagagcgccttcatgaggagtccagggccagagaacagctagctgtggagctcagtaaggctgagggcgtcattgatggctatgcagatgaaaaaactctttttgaaaggcaaattcaggaaaaaactgatataatagatcgtcttgagcaggagttgttatgtgcaagtaacaggttgcaagaattggaggcagagcaacagcagatccaagaagaaagagaattactgtccagacaaaaggaagctatgaaagcagaggcaggcccagttgaacaacaattactacaggagacagaaaaattaatgaaggaaaaactagaagtacaatgtcaagctgaaaaagtacgtgatgaccttcaaaaacaagtgaaagctctagaaatagatgtggaagaacaagtcagtaggtttatagagctggaacaagaaaaaaatactgaactaatggatttaagacagcaaaaccaagcattggaaaagcagttagaaaaaatgagaaaatttttagatgagcaagccattgacagagaacatgagagagatgtattccaacaggaaatacagaaactagaacagcaacttaaggttgttcctcgattccagcctatcagtgaacatcaaactagagaggttgaacagttagcaaatcatctgaaagaaaaaacagacaaatgcagtgagcttttgctctctaaagagcagcttcaaagggatatacaagaaaggaatgaagaaatagagaaactggagttcagagtaagagaactggagcaggcgcttcttgtgagtgcagatacttttcaaaaggtagaggaccgaaaacactttggagctgtagaagctaaaccagaattgtccctagaagtacaattgcaggctgaacgagatgccatagacagaaaggaaaaagagattacaaacttagaagagcaattagaacagtttagagaagaactggaaaataagaatgaagaagttcaacaattacatatgcaattagaaatacagaaaaaggaatctactacccgcctacaagaacttgaacaggaaaacaaattatttaaggatgacatggagaaactgggacttgccataaaggaatctgatgccatgtctactcaagaccaacatgtgctatttgggaaatttgctcaaataatacaggaaaaagaggtagaaattgaccaattaaatgaacaagttacgaaactccagcagcaacttaaaattacaacagataacaaggttattgaagaaaaaaatgaactgataagggatcttgaaacccaaatagaatgtttgatgagtgatcaagaatgtgtgaagagaaatagagaagaagaaatagagcagctcaatgaagtgattgaaaaacttcaacaggaattggcaaatattggacagaagacatcaatgaatgctcattccctctcagaagaagcagacagtttaaaacatcaattggatgtggttatagctgaaaagctggccttggaacagcaagtagaaaccgctaatgaagaaatgaccttcatgaaaaatgtacttaaagaaaccaattttaaaatgaatcagctaacacaggaattattcagcttaaagagagaacgtgaaagtgtggaaaagattcaaagcataccagagaatagtgttaacgtggctatagatcatctgagcaaagacaaacctgaactagaagtagtccttacagaggatgctcttaaatccctagaaaatcagacatacttcaaatcttttgaagaaaatggcaaaggttccataattaatttggaaacaaggttgctacaacttgagagcactgttagtgcaaaggacttagaacttacccagtgttataaacaaataaaagacatgcaagaacaaggccagtttgaaacagaaatgcttcaaaagaagattgtaaacctacagaaaatagttgaagaaaaagtggctgctgctcttgtcagtcaaatccaacttgaggcagttcaggaatatgcaaaattctgtcaagataatcaaacaatttcatcagaacctgaaagaacaaatattcagaatttaaatcaactaagagaagatgagttggggtcagatatatcagcattaaccttgagaatatcagaattagaaagccaggttgttgaaatgcatactagtttgattttagaaaaagaacaagtagaaattgcagaaaaaaatgttttagaaaaagaaaagaagctgctagaactacagaagctattggagggcaatgagaaaaaacagagagagaaagaaaagaaaagaagccctcaagatgttgaagttctcaagacaactactgagctatttcatagcaatgaagaaagtggattttttaatgaactcgaggctcttagagctgaatcagtggctaccaaagcagaacttgccagttataaagaaaaggctgaaaaacttcaagaagagcttttggtaaaagaaacaaatatgacatctcttcagaaagacttaagccaagttagggatcacctcgcagaggcaaaagagaaattgtccattttagaaaaagaagatgagactgaggtacaagaaagcaaaaaggcctgcatgtttgagccacttcctataaaactgagtaagagcattgcatcccagacagatgggactctgaagatcagtagcagcaatcagactccacaaattcttgttaaaaatgcaggaatacaaattaatttacagagtgaatgttcctcagaagaagttactgaaataatcagtcagtttactgaaaaaattgagaagatgcaagaactacatgctgctgaaattttggacatggaatccagacatatttcagaaactgaaaccttaaagagggaacactatgttgccgttcagttactgaaagaggaatgtggtaccttgaaggcagtgatacagtgtctgagaagtaaagagggatcctcaattcctgagctagcacattctgatgcttaccagactagagaaatatgctccagtgattctggatcagactggggtcagggaatttatcttacacacagtcagggatttgacatagcatcagaaggccgaggagaagaaagtgaaagtgcaacagattcctttccaaagaaaataaagggattactgagagctgtccataatgaaggcatgcaggtgctttctctcactgagtctccctatagtgatggagaggaccattctattcagcaggtttcagaatcttggctagaagagagaaaagcttacatcaatacaatctcatctctaaaggatttaattacaaagatgcaactgcaaagagaagccgaggtttatgatagttctcaatctcatgagagcttctcagactggcgaggtgaactactgcttgcccttcaacaagttttcttagaagagcgtagtgttttactagcagcatttcggacggagctgacagctctaggtactacagatgcagttggtttactaaactgtttggaacagagaatacaagaacagggtgttgaatatcaagcagctatggaatgcctccagaaagcagatagaaggagtttgttatctgaaattcaggcactgcatgcacaaatgaatggtaggaaaattactctgaaaagagaacaagagagtgagaaaccaagccaagaactcttggaatataatatacagcagaagcagtctcaaatgctggagatgcaagtggagctcagcagtatgaaagacagagcaacggaactgcaggagcagctgagttctgagaaaatggtggttgctgaactgaagagtgagcttgcacaaactaaattggaactagaaacaacactcaaggcacagcataaacacctaaaagaattggaggctttcaggttggaagttaaagataagacagatgaagtacatttgcttaatgacacattagcaagtgaacagaaaaaatcaagagagctccagtgggctttggagaaagagaaagccaagttgggacgcagtgaagaacgggataaagaagaacttgaggatctgaagttttcacttgagagtcagaaacaaaggaatcttcagctaaatctacttttggaacaacagaaacaactactgaacgaatcccagcaaaaaatagaatcacagagaatgctatatgatgcccagttgtcagaagaacaaggtcgaaacttagagcttcaggtacttcttgaatctgagaaagttcgaattcgggaaatgagtagtaccctagatagggagcgggaattgcacgcacagctgcagagcagtgatggtactggacagtctcggccacccttgccctcagaggacctactgaaagagctgcagaaacagctagaggaaaaacacagtcgcatagtagaattgttaaatgagactgaaaaatataaactggattctttgcaaacacgacagcaaatggaaaaagataggcaggttcacaggaaaacactgcagacagaacaggaggccaacactgagggacagaaaaaaatgcatgagctccagtccaaagtggaagatcttcagcgccagctggaagagaaaagacaacaagtttataagttagaccttgaaggacagcgactacaaggaatcatgcaggaattccagaagcaagaactagaacgagaagaaaaacgagaaagtagaagaattctgtatcagaaccttaatgagccaaccacgtggagcttaaccagtgatagaactagaaattgggttcttcaacagaaaatagaaggagaaacaaaagaatcaaactacgctaaattgattgaaatgaatggaggaggaaccggctgtaatcatgaattagaaatgatcagacaaaagcttcaatgtgtagcttcaaaactacaggttctaccccagaaagcctctgagagactacagtttgaaacagcagatgatgaagatttcatttgggttcaggaaaatattgatgaaattattttacaactacagaaattaactggccagcaaggtgaagagcccagcttggtgtccccaagtacttcttgtggctcattgactgaaagactactgagacaaaatgctgagctgacagggcatatcagtcaactgactgaagagaagaatgacttaaggaacatggttatgaagctggaagagcagatcaggtggtatcgacagacaggagctggtagagataattcttccaggttttcattgaatggtggtgccaacattgaagccatcattgcctctgaaaaagaagtatggaacagagaaaaattgactctccagaaatctttgaaaagggcagaggctgaagtatacaaactgaaagctgaactaagaaatgactctttacttcaaactctgagccctgattctgaacatgtcactttaaagagaatttatggtaaatacttgagggcagaaagttttcgaaaggctctcatttaccagaagaaatacctgctgctgttactgggtgggttccaggaatgtgaagatgccaccttggccctgcttgcccggatgggggggcagccagctttcacggatctagaggtgatcaccaatcgcccaaagggcttcaccaggtttcggtcggccgtcagagtatccattgcaatttccagaatgaaatttttggttcgacggtggcatcgagtcacaggttctgtttccatcaatattaacagagatggctttggactgaatcaaggtgcagaaaagactgactcattttatcattcttctggtgggctggagttatatggagaaccaagacatactacgtatcgctcaagatcagatctggactatattaggtcccctttaccatttcagaataggtacccaggcactccagctgatttcaatcctggttctttagcatgttctcagcttcagaattacgatcctgacagagccctaacagattatatcactcggctagaggcactgcaaagacgacttggaactatacagtcaggttcaactactcaatttcatgctggcatgagaagataatcctttgaaacatcattaattgaagtgattttaaatagatttccttttgtaaatcaatggttcttttgtgcttttgtattgtgaatattcaatgggaccaatatgaacacagcttatgattgtatacaaatcccttgccagcacatgaaaacaaactggaatttgtatatataagcattgtgtatgtattcatgcacaataattattgaattacctgtatatttgtggaatgctaatttaaaacattaaattataaaccttgtgtatttatcaaatgggtgaaaagattaaacttttacgcattacaatactgctgaatgtgtagctcgaggtgtcctgcacttttcttataaggctactgaagttacatgttttgcctaatatattctactggtgatgaagacagataatatcacttgtagagacctatttttgtataatggtagaagttttgaattttatggggtattttgtcaagtactgaaataaaaatgacttcaccattttcaccaaaatatattt

SEQ ID NO: 293064 - DNA, 11416 bp, Homo sapiens
tcaagggtcccttaagccccatcccttagcccagaaaaagaaagaagacttcacaatgcaaattagtttcttgcaagagaaaattaaagtatatgaaatggaacaagataaaaaagtagaaaactcaaataaagaagaaatacaggaaaaggagacaatcattgaagaattaaacacaaaaataatagaagaagaaaagaaaactcttgagctaaaggataaattaacaactgctgataaattactaggagaattacaagaacagattgtgcaaaagaaccaagaaataaaaaacatgaaattagagctgactaattctaagcaaaaagaaagacagtcttctgaagaaataaaacagttaatggggacagtcgaagaacttcagaagagaaatcataaagacagccagttcgaaactgatatagtacaacgaatggaacaagaaacacaaagaaagttagaacaactccgggcagagctggatgagatgtatgggcagcagatagtgcaaatgaaacaagaattaataagacaacacatggcacagatggaggaaattaaaacacggcataagggagaaatggagaatgctttaaggtcatattcaaatattacagttaatgaagatcagataaagttaatgaatgtggcaataaatgaactgaatataaaattgcaagatactaactctcaaaaggaaaaactcaaggaagaactaggactaattttagaagaaaagtgtgctctacagagacagcttgaagaccttgttgaagaattgagcttttcaagggaacagattcagagagctagacagacaatagctgaacaagaaagtaaacttaatgaagcacataagtcccttagtacagtggaagatttgaaagctgagattgtttctgcatctgaatccagaaaggaactagaattaaaacatgaagcagaagttacaaattacaagataaaacttgaaatgttagaaaaagaaaagaatgctgtgttagacagaatggctgaatcacaagaagctgaattagagaggctgagaacacagcttctatttagtcacgaagaagagctttccaaactgaaggaagatttagaaattgaacatcgaataaatattgaaaaacttaaagataatttaggcattcactataaacagcagatagatggtttacagaatgaaatgagtcaaaagatagaaaccatgcagtttgaaaaggacaatttgataactaagcagaatcaattaattttggaaatttcaaagctaaaagatttacagcagtctcttgtaaattcaaagtcagaagaaatgactcttcaaatcaatgaacttcaaaaagaaattgaaatactcagacaagaagaaaaagaaaagggtacacttgaacaagaagttcaagaattacaacttaaaacagaattgttagaaaaacagatgaaggaaaaagagaatgatcttcaagaaaaatttgcacaacttgaagcagagaatagcattcttaaagatgaaaagaaaacccttgaagacatgttgaaaatacatactcctgttagccaagaagaaagattgattttcttagactccattaagtccaaatccaaagactctgtgtgggaaaaagaaatagaaatacttatagaggaaaatgaggacctcaaacaacaatgtattcagctaaatgaagagattgaaaagcaaaggaacactttttcatttgctgaaaaaaactttgaagttaactatcaagagttacaagaggagtatgcttgccttctcaaagtaaaagatgatttagaagacagtaaaaataaacaggaattagagtataaaagtaaacttaaagcacttaatgaagagcttcatttgcaaagaataaatccaactacagtgaaaatgaaaagttctgtctttgatgaagacaaaacttttgtagcagaaacattggaaatgggtgaggttgttgaaaaggatacaacagaactcatggaaaaacttgaggtaaccaagcgagagaaattagagctgtcacagagactgtctgatctttctgaacaattgaaacagaaacatggtgagattagttttctaaatgaagaagttaaatctttaaagcaagagaaagaacaagtttcattgagatgtagagagctagaaatcattattaaccacaacagggcagaaaatgtacagtcatgtgatactcaagtaagctctttattagatggagttgtgactatgacaagcaggggtgctgaaggatcagtttctaaagtaaataaaagttttggtgaagaatcaaaaataatggtggaagataaagtttcttttgaaaatatgactgttggagaagaaagtaagcaagaacagttgattttggatcacttaccatctgtaacaaaggaatcatcacttagagcaactcaaccaagtgaaaatgataaacttcagaaagaactcaatgtacttaaatcagaacagaatgatttaaggctacagatggaagcccaacgcatttgcctctctctggtttattcaactcatgtggatcaggttcgtgaatatatggaaaatgaaaaagataaagctctttgcagtcttaaagaagagcttatttttgctcaagaggaaaagatcaaggaacttcagaaaatacaccagttagaactacagactatgaaaacacaagaaacaggtgatgaaggaaagcctttacatctgctcattggaaaacttcaaaaggcagtgtctgaagaatgttcttattttttacagactttatgcagtgtccttggtgaatattatactcctgctttaaaatgtgaagtaaatgcagaagacaaagagaattctggtgattacatttctgaaaatgaagatccagaattacaagattatagatatgaagttcaagactttcaagaaaatatgcacactcttctcaacaaagtaacagaagaatacaacaaactcttggtacttcaaacacgactaagcaagatctggggacagcagacagatggtatgaaacttgaatttggagaagaaaaccttccaaaagaggaaacagagtttttatcaatccattctcagatgaccaatttggaagacattgatgtcaatcataaaagcaagttatcttctctgcaagatcttgaaaaaactaaacttgaagaacaagttcaagaattagaaagcctcatatcctctttgcagcaacagttgaaagaaactgaacaaaactatgaggcagagatccactgtttacagaagaggcttcaagctgttagtgagtccacggttccgccaagcttacctgttgattcggtggtaattacagaatctgatgcacagagaacaatgtaccctggaagttgtgtgaaaaagaatattgatggtacaatagagttttctggtgaatttggagtgaaagaggaaacaaatatcgttaagttgcttgaaaaacaataccaagaacaattagaagaagaagtagctaaggttattgtgtcaatgagtatagcatttgctcaacaaactgaactgtctagaatatctgggggaaaagaaaatactgcatcatcaaagcaagcacatgctgtgtgtcagcaagaacaacattattttaatgaaatgaaattatcacaggatcaaattggttttcagacttttgagacagtggatgtgaaatttaaagaagaatttaaaccacttagtaaagagttaggagaacatggaaaggaaattttattatcaaatagtgatccccatgatataccagaatcaaaggactgtgtgctgactatttcagaagaaatgttctccaaagataaaacatttatagttagacagtctattcatgatgagatttcagtgtcaagcatggatgcttctagacaactaatgttgaatgaagaacagttggaagatatgagacaggaacttgtacgacaataccaagaacatcaacaggcaacggaattgttaaggcaagcacatatgcggcaaatggagagacagcgagaagaccaggaacagctacaagaagagattaagagacttaatagacaattagcccagagatcctccatagataatgaaaacctggtttcagagagagagagggtgcttttagaggagctggaagcactaaagcagctgtctttagctggaagagagaagctgtgttgtgagctgcgcaacagcagtacgcaaacacagaatggaaatgaaaaccaaggagaagttgaagaacaaacatttaaagaaaaggaattagacagaaaacctgaagatgtgcctcctgagattttgtctaatgaaaggtatgcactccagaaagctaataatagacttttgaagatcctcttagaagttgtaaagacaacagcagctgttgaagaaacaattggtcgccatgtccttgggattctagatagatctagtaaaagccagtcatctgccagcctaatttggaggtcagaagcagaggcatctgtaaagtcatgtgtccatgaggaacatacaagagttacagatgaatccattccctcttattctggaagtgatatgccaagaaatgacattaacatgtggtcaaaagtaactgaggaaggaacagagctgtcacaacgacttgtgaggagtggttttgctggaactgaaatagaccctgaaaatgaagaacttatgctgaacattagctctcgactacaagcagcagttgaaaaactcctagaagccataagtgaaactagcagtcagcttgaacatgcgaaagtgacacagacagagttgatgcgtgagtcatttagacagaaacaagaagcaacagagtcccttaagtgccaagaggaacttcgagagcgccttcatgaggagtccagggccagagaacagctagctgtggagctcagtaaggctgagggcgtcattgatggctatgcagatgaaaaaactctttttgaaaggcaaattcaggaaaaaactgatataatagatcgtcttgagcaggagttgttatgtgcaagtaacaggttgcaagaattggaggcagagcaacagcagatccaagaagaaagagaattactgtccagacaaaaggaagctatgaaagcagaggcaggcccagttgaacaacaattactacaggagacagaaaaattaatgaaggaaaaactagaagtacaatgtcaagctgaaaaagtacgtgatgaccttcaaaaacaagtgaaagctctagaaatagatgtggaagaacaagtcagtaggtttatagagctggaacaagaaaaaaatactgaactaatggatttaagacagcaaaaccaagcattggaaaagcagttagaaaaaatgagaaaatttttagatgagcaagccattgacagagaacatgagagagatgtattccaacaggaaatacagaaactagaacagcaacttaaggttgttcctcgattccagcctatcagtgaacatcaaactagagaggttgaacagttagcaaatcatctgaaagaaaaaacagacaaatgcagtgagcttttgctctctaaagagcagcttcaaagggatatacaagaaaggaatgaagaaatagagaaactggagttcagagtaagagaactggagcaggcgcttcttgtgagtgcagatacttttcaaaaggtagaggaccgaaaacactttggagctgtagaagctaaaccagaattgtccctagaagtacaattgcaggctgaacgagatgccatagacagaaaggaaaaagagattacaaacttagaagagcaattagaacagtttagagaagaactggaaaataagaatgaagaagttcaacaattacatatgcaattagaaatacagaaaaaggaatctactacccgcctacaagaacttgaacaggaaaacaaattatttaaggatgacatggagaaactgggacttgccataaaggaatctgatgccatgtctactcaagaccaacatgtgctatttgggaaatttgctcaaataatacaggaaaaagaggtagaaattgaccaattaaatgaacaagttacgaaactccagcagcaacttaaaattacaacagataacaaggttattgaagaaaaaaatgaactgataagggatcttgaaacccaaatagaatgtttgatgagtgatcaagaatgtgtgaagagaaatagagaagaagaaatagagcagctcaatgaagtgattgaaaaacttcaacaggaattggcaaatattggacagaagacatcaatgaatgctcattccctctcagaagaagcagacagtttaaaacatcaattggatgtggttatagctgaaaagctggccttggaacagcaagtagaaaccgctaatgaagaaatgaccttcatgaaaaatgtacttaaagaaaccaattttaaaatgaatcagctaacacaggaattattcagcttaaagagagaacgtgaaagtgtggaaaagattcaaagcataccagagaatagtgttaacgtggctatagatcatctgagcaaagacaaacctgaactagaagtagtccttacagaggatgctcttaaatccctagaaaatcagacatacttcaaatcttttgaagaaaatggcaaaggttccataattaatttggaaacaaggttgctacaacttgagagcactgttagtgcaaaggacttagaacttacccagtgttataaacaaataaaagacatgcaagaacaaggccagtttgaaacagaaatgcttcaaaagaagattgtaaacctacagaaaatagttgaagaaaaagtggctgctgctcttgtcagtcaaatccaacttgaggcagttcaggaatatgcaaaattctgtcaagataatcaaacaatttcatcagaacctgaaagaacaaatattcagaatttaaatcaactaagagaagatgagttggggtcagatatatcagcattaaccttgagaatatcagaattagaaagccaggttgttgaaatgcatactagtttgattttagaaaaagaacaagtagaaattgcagaaaaaaatgttttagaaaaagaaaagaagctgctagaactacagaagctattggagggcaatgagaaaaaacagagagagaaagaaaagaaaagaagccctcaagatgttgaagttctcaagacaactactgagctatttcatagcaatgaagaaagtggattttttaatgaactcgaggctcttagagctgaatcagtggctaccaaagcagaacttgccagttataaagaaaaggctgaaaaacttcaagaagagcttttggtaaaagaaacaaatatgacatctcttcagaaagacttaagccaagttagggatcacctcgcagaggcaaaagagaaattgtccattttagaaaaagaagatgagactgaggtacaagaaagcaaaaaggcctgcatgtttgagccacttcctataaaactgagtaagagcattgcatcccagacagatgggactctgaagatcagtagcagcaatcagactccacaaattcttgttaaaaatgcaggaatacaaattaatttacagagtgaatgttcctcagaagaagttactgaaataatcagtcagtttactgaaaaaattgagaagatgcaagaactacatgctgctgaaattttggacatggaatccagacatatttcagaaactgaaaccttaaagagggaacactatgttgccgttcagttactgaaagaggaatgtggtaccttgaaggcagtgatacagtgtctgagaagtaaagagggatcctcaattcctgagctagcacattctgatgcttaccagactagagaaatatgctccagtgattctggatcagactggggtcagggaatttatcttacacacagtcagggatttgacatagcatcagaaggccgaggagaagaaagtgaaagtgcaacagattcctttccaaagaaaataaagggattactgagagctgtccataatgaaggcatgcaggtgctttctctcactgagtctccctatagtgatggagaggaccattctattcagcaggtttcagaatcttggctagaagagagaaaagcttacatcaatacaatctcatctctaaaggatttaattacaaagatgcaactgcaaagagaagccgaggtttatgatagttctcaatctcatgagagcttctcagactggcgaggtgaactactgcttgcccttcaacaagttttcttagaagagcgtagtgttttactagcagcatttcggacggagctgacagctctaggtactacagatgcagttggtttactaaactgtttggaacagagaatacaagaacagggtgttgaatatcaagcagctatggaatgcctccagaaagcagatagaaggagtttgttatctgaaattcaggcactgcatgcacaaatgaatggtaggaaaattactctgaaaagagaacaagagagtgagaaaccaagccaagaactcttggaatataatatacagcagaagcagtctcaaatgctggagatgcaagtggagctcagcagtatgaaagacagagcaacggaactgcaggagcagctgagttctgagaaaatggtggttgctgaactgaagagtgagcttgcacaaactaaattggaactagaaacaacactcaaggcacagcataaacacctaaaagaattggaggctttcaggttggaagttaaagataagacagatgaagtacatttgcttaatgacacattagcaagtgaacagaaaaaatcaagagagctccagtgggctttggagaaagagaaagccaagttgggacgcagtgaagaacgggataaagaagaacttgaggatctgaagttttcacttgagagtcagaaacaaaggaatcttcagctaaatctacttttggaacaacagaaacaactactgaacgaatcccagcaaaaaatagaatcacagagaatgctatatgatgcccagttgtcagaagaacaaggtcgaaacttagagcttcaggtacttcttgaatctgagaaagttcgaattcgggaaatgagtagtaccctagatagggagcgggaattgcacgcacagctgcagagcagtgatggtactggacagtctcggccacccttgccctcagaggacctactgaaagagctgcagaaacagctagaggaaaaacacagtcgcatagtagaattgttaaatgagactgaaaaatataaactggattctttgcaaacacgacagcaaatggaaaaagataggcaggttcacaggaaaacactgcagacagaacaggaggccaacactgagggacagaaaaaaatgcatgagctccagtccaaagtggaagatcttcagcgccagctggaagagaaaagacaacaagtttataagttagaccttgaaggacagcgactacaaggaatcatgcaggaattccagaagcaagaactagaacgagaagaaaaacgagaaagtagaagaattctgtatcagaaccttaatgagccaaccacgtggagcttaaccagtgatagaactagaaattgggttcttcaacagaaaatagaaggagaaacaaaagaatcaaactacgctaaattgattgaaatgaatggaggaggaaccggctgtaatcatgaattagaaatgatcagacaaaagcttcaatgtgtagcttcaaaactacaggttctaccccagaaagcctctgagagactacagtttgaaacagcagatgatgaagatttcatttgggttcaggaaaatattgatgaaattattttacaactacagaaattaactggccagcaaggtgaagagcccagcttggtgtccccaagtacttcttgtggctcattgactgaaagactactgagacaaaatgctgagctgacagggcatatcagtcaactgactgaagagaagaatgacttaaggaacatggttatgaagctggaagagcagatcaggtggtatcgacagacaggagctggtagagataattcttccaggttttcattgaatggtggtgccaacattgaagccatcattgcctctgaaaaagaagtatggaacagagaaaaattgactctccagaaatctttgaaaagggcagaggctgaagtatacaaactgaaagctgaactaagaaatgactctttacttcaaactctgagccctgattctgaacatgtcactttaaagagaatttatggtaaatacttgagggcagaaagttttcgaaaggctctcatttaccagaagaaatacctgctgctgttactgggtgggttccaggaatgtgaagatgccaccttggccctgcttgcccggatgggggggcagccagctttcacggatctagaggtgatcaccaatcgcccaaagggcttcaccaggtttcggtcggccgtcagagtatccattgcaatttccagaatgaaatttttggttcgacggtggcatcgagtcacaggttctgtttccatcaatattaacagagatggctttggactgaatcaaggtgcagaaaagactgactcattttatcattcttctggtgggctggagttatatggagaaccaagacatactacgtatcgctcaagatcagatctggactatattaggtcccctttaccatttcagaataggtacccaggcactccagctgatttcaatcctggttctttagcatgttctcagcttcagaattacgatcctgacagagccctaacagattatatcactcggctagaggcactgcaaagacgacttggaactatacagtcaggttcaactactcaatttcatgctggcatgagaagataatcctttgaaacatcattaattgaagtgattttaaatagatttccttttgtaaatcaatggttcttttgtgcttttgtattgtgaatattcaatgggaccaatatgaacacagcttatgattgtatacaaatcccttgccagcacatgaaaacaaactggaatttgtatatataagcattgtgtatgtattcatgcacaataattattgaattacctgtatatttgtggaatgctaatttaaaacattaaattataaaccttgtgtatttatcaaatgggtgaaaagattaaacttttacgcattacaatactgctgaatgtgtagctcgaggtgtcctgcacttttcttataaggctactgaagttacatgttttgcctaatatattctactggtgatgaagacagataatatcacttgtagagacctatttttgtataatggtagaagttttgaattttatggggtattttgtcaagtactgaaataaaaatgacttcaccattttcaccaaaatatattt

SEQ ID NO: 293065 - DNA, 7461 bp, Homo sapiens
  misc_feature (315)..(315): n is a, c, g, or t
  misc_feature (439)..(439): n is a, c, g, or t
  misc_feature (653)..(653): n is a, c, g, or t
tgaatagctcagttcagaagagcttttccttttgaatagagtgaagcagcaagagcaagagaaataatgttacaactgcatttctcaagactgctgctatggagatttcaaacttgaccttccctgccaggttctgctttgaaggcttacttattactacagacatcgctgatattaaaagcagttttattgctcgtctaattagatgtttatatttttattcttctcttcaaggacttaattatgctagtttaaaaggtgtttttgtttgcttgcttttatttttgttttttgattttttttggtttttgtttnggtttgggtttttttgagggggcatcaagattgatagagacctaagtttttttagatttgtagtttttttcctggactttccccttccttttattgtgcagttgtatgaattaattttataacntttatttgatagtgctaaaaaagaaactttttatactgctatggtagatcttgataaactaaaaagaactttttaatgtattagaaaattgataaagcaaattaggaatctcggcagctgtatcttctgggatggattcttatagcacctatttggcaactgtcaaagtcagtggctcgtggttagaagagcaagatgaagacatttatgaggntgaatctcgcgtgcctttaccacatccttttcctctttgtgaacatttggatgaaaataactcagtaattgttaatacttctattttccattttattcataaaagaaacgggcatatattaaagcttatttctaaaatttcactgcctacccctccttattcacttgaacatgcgaaagtgacacagacagagttgatgcgtgagtcatttagacagaaacaagaagcaacagagtcccttaagtgccaagaggaacttcgagagcgccttcatgaggagtccagggccagagaacagctagctgtggagctcagtaaggctgagggcgtcattgatggctatgcagatgaaaaaactctttttgaaaggcaaattcaggaaaaaactgatataatagatcgtcttgagcaggagttgttatgtgcaagtaacaggttgcaagaattggaggcagagcaacagcagatccaagaagaaagagaattactgtccagacaaaaggaagctatgaaagcagaggcaggcccagttgaacaacaattactacaggagacagaaaaattaatgaaggaaaaactagaagtacaatgtcaagctgaaaaagtacgtgatgaccttcaaaaacaagtgaaagctctagaaatagatgtggaagaacaagtcagtaggtttatagagctggaacaagaaaaaaatactgaactaatggatttaagacagcaaaaccaagcattggaaaagcagttagaaaaaatgagaaaatttttagatgagcaagccattgacagagaacatgagagagatgtattccaacaggaaatacagaaactagaacagcaacttaaggttgttcctcgattccagcctatcagtgaacatcaaactagagaggttgaacagttagcaaatcatctgaaagaaaaaacagacaaatgcagtgagcttttgctctctaaagagcagcttcaaagggatatacaagaaaggaatgaagaaatagagaaactggagttcagagtaagagaactggagcaggcgcttcttgtgagtgcagatacttttcaaaaggtagaggaccgaaaacactttggagctgtagaagctaaaccagaattgtccctagaagtacaattgcaggctgaacgagatgccatagacagaaaggaaaaagagattacaaacttagaagagcaattagaacagtttagagaagaactggaaaataagaatgaagaagttcaacaattacatatgcaattagaaatacagaaaaaggaatctactacccgcctacaagaacttgaacaggaaaacaaattatttaaggatgacatggagaaactgggacttgccataaaggaatctgatgccatgtctactcaagaccaacatgtgctatttgggaaatttgctcaaataatacaggaaaaagaggtagaaattgaccaattaaatgaacaagttacgaaactccagcagcaacttaaaattacaacagataacaaggttattgaagaaaaaaatgaactgataagggatcttgaaacccaaatagaatgtttgatgagtgatcaagaatgtgtgaagagaaatagagaagaagaaatagagcagctcaatgaagtgattgaaaaacttcaacaggaattggcaaatattggacagaagacatcaatgaatgctcattccctctcagaagaagcagacagtttaaaacatcaattggatgtggttatagctgaaaagctggccttggaacagcaagtagaaaccgctaatgaagaaatgaccttcatgaaaaatgtacttaaagaaaccaattttaaaatgaatcagctaacacaggaattattcagcttaaagagagaacgtgaaagtgtggaaaagattcaaagcataccagagaatagtgttaacgtggctatagatcatctgagcaaagacaaacctgaactagaagtagtccttacagaggatgctcttaaatccctagaaaatcagacatacttcaaatcttttgaagaaaatggcaaaggttccataattaatttggaaacaaggttgctacaacttgagagcactgttagtgcaaaggacttagaacttacccagtgttataaacaaataaaagacatgcaagaacaaggccagtttgaaacagaaatgcttcaaaagaagattgtaaacctacagaaaatagttgaagaaaaagtggctgctgctcttgtcagtcaaatccaacttgaggcagttcaggaatatgcaaaattctgtcaagataatcaaacaatttcatcagaacctgaaagaacaaatattcagaatttaaatcaactaagagaagatgagttggggtcagatatatcagcattaaccttgagaatatcagaattagaaagccaggttgttgaaatgcatactagtttgattttagaaaaagaacaagtagaaattgcagaaaaaaatgttttagaaaaagaaaagaagctgctagaactacagaagctattggagggcaatgagaaaaaacagagagagaaagaaaagaaaagaagccctcaagatgttgaagttctcaagacaactactgagctatttcatagcaatgaagaaagtggattttttaatgaactcgaggctcttagagctgaatcagtggctaccaaagcagaacttgccagttataaagaaaaggctgaaaaacttcaagaagagcttttggtaaaagaaacaaatatgacatctcttcagaaagacttaagccaagttagggatcacctcgcagaggcaaaagagaaattgtccattttagaaaaagaagatgagactgaggtacaagaaagcaaaaaggcctgcatgtttgagccacttcctataaaactgagtaagagcattgcatcccagacagatgggactctgaagatcagtagcagcaatcagactccacaaattcttgttaaaaatgcaggaatacaaattaatttacagagtgaatgttcctcagaagaagttactgaaataatcagtcagtttactgaaaaaattgagaagatgcaagaactacatgctgctgaaattttggacatggaatccagacatatttcagaaactgaaaccttaaagagggaacactatgttgccgttcagttactgaaagaggaatgtggtaccttgaaggcagtgatacagtgtctgagaagtaaagagggatcctcaattcctgagctagcacattctgatgcttaccagactagagaaatatgctccagtgattctggatcagactggggtcagggaatttatcttacacacagtcagggatttgacatagcatcagaaggccgaggagaagaaagtgaaagtgcaacagattcctttccaaagaaaataaagggattactgagagctgtccataatgaaggcatgcaggtgctttctctcactgagtctccctatagtgatggagaggaccattctattcagcaggtttcagaatcttggctagaagagagaaaagcttacatcaatacaatctcatctctaaaggatttaattacaaagatgcaactgcaaagagaagccgaggtttatgatagttctcaatctcatgagagcttctcagactggcgaggtgaactactgcttgcccttcaacaagttttcttagaagagcgtagtgttttactagcagcatttcggacggagctgacagctctaggtactacagatgcagttggtttactaaactgtttggaacagagaatacaagaacagggtgttgaatatcaagcagctatggaatgcctccagaaagcagatagaaggagtttgttatctgaaattcaggcactgcatgcacaaatgaatggtaggaaaattactctgaaaagagaacaagagagtgagaaaccaagccaagaactcttggaatataatatacagcagaagcagtctcaaatgctggagatgcaagtggagctcagcagtatgaaagacagagcaacggaactgcaggagcagctgagttctgagaaaatggtggttgctgaactgaagagtgagcttgcacaaactaaattggaactagaaacaacactcaaggcacagcataaacacctaaaagaattggaggctttcaggttggaagttaaagataagacagatgaagtacatttgcttaatgacacattagcaagtgaacagaaaaaatcaagagagctccagtgggctttggagaaagagaaagccaagttgggacgcagtgaagaacgggataaagaagaacttgaggatctgaagttttcacttgagagtcagaaacaaaggaatcttcagctaaatctacttttggaacaacagaaacaactactgaacgaatcccagcaaaaaatagaatcacagagaatgctatatgatgcccagttgtcagaagaacaaggtcgaaacttagagcttcaggtacttcttgaatctgagaaagttcgaattcgggaaatgagtagtaccctagatagggagcgggaattgcacgcacagctgcagagcagtgatggtactggacagtctcggccacccttgccctcagaggacctactgaaagagctgcagaaacagctagaggaaaaacacagtcgcatagtagaattgttaaatgagactgaaaaatataaactggattctttgcaaacacgacagcaaatggaaaaagataggcaggttcacaggaaaacactgcagacagaacaggaggccaacactgagggacagaaaaaaatgcatgagctccagtccaaagtggaagatcttcagcgccagctggaagagaaaagacaacaagtttataagttagaccttgaaggacagcgactacaaggaatcatgcaggaattccagaagcaagaactagaacgagaagaaaaacgagaaagtagaagaattctgtatcagaaccttaatgagccaaccacgtggagcttaaccagtgatagaactagaaattgggttcttcaacagaaaatagaaggagaaacaaaagaatcaaactacgctaaattgattgaaatgaatggaggaggaaccggctgtaatcatgaattagaaatgatcagacaaaagcttcaatgtgtagcttcaaaactacaggttctaccccagaaagcctctgagagactacagtttgaaacagcagatgatgaagatttcatttgggttcaggaaaatattgatgaaattattttacaactacagaaattaactggccagcaaggtgaagagcccagcttggtgtccccaagtacttcttgtggctcattgactgaaagactactgagacaaaatgctgagctgacagggcatatcagtcaactgactgaagagaagaatgacttaaggaacatggttatgaagctggaagagcagatcaggtggtatcgacagacaggagctggtagagataattcttccaggttttcattgaatggtggtgccaacattgaagccatcattgcctctgaaaaagaagtatggaacagagaaaaattgactctccagaaatctttgaaaagggcagaggctgaagtatacaaactgaaagctgaactaagaaatgactctttacttcaaactctgagccctgattctgaacatgtcactttaaagagaatttatggtaaatacttgagggcagaaagttttcgaaaggctctcatttaccagaagaaatacctgctgctgttactgggtgggttccaggaatgtgaagatgccaccttggccctgcttgcccggatgggggggcagccagctttcacggatctagaggtgatcaccaatcgcccaaagggcttcaccaggtttcggtcggccgtcagagtatccattgcaatttccagaatgaaatttttggttcgacggtggcatcgagtcacaggttctgtttccatcaatattaacagagatggctttggactgaatcaaggtgcagaaaagactgactcattttatcattcttctggtgggctggagttatatggagaaccaagacatactacgtatcgctcaagatcagatctggactatattaggtcccctttaccatttcagaataggtacccaggcactccagctgatttcaatcctggttctttagcatgttctcagcttcagaattacgatcctgacagagccctaacagattatatcactcggctagaggcactgcaaagacgacttggaactatacagtcaggttcaactactcaatttcatgctggcatgagaagataatcctttgaaacatcattaattgaagtgattttaaatagatttccttttgtaaatcaatggttcttttgtgcttttgtattgtgaatattcaatgggaccaatatgaacacagcttatgattgtatacaaatcccttgccagcacatgaaaacaaactggaatttgtatatataagcattgtgtatgtattcatgcacaataattattgaattacctgtatatttgtggaatgctaatttaaaacattaaattataaaccttgtgtatttatcaaatgggtgaaaagattaaacttttacgcattacaatactgctgaatgtgtagctcgaggtgtcctgcacttttcttataaggctactgaagttacatgttttgcctaatatattctactggtgatgaagacagataatatcacttgtagagacctatttttgtataatggtagaagttttgaattttatggggtattttgtcaagtactgaaataaaaatgacttcaccattttcaccaaaatatattt

SEQ ID NO: 293066 - DNA, 12298 bp, Homo sapiens
gaagatggcggcggcggcggcggtgacggcgcttcccgtgcggctgaggacgatccgccagtgagcgcggagactgcttccacttcgggcgggggagcgccggaccgaatcggctctctaggccgtggagcttgccgtcccacctccgtccaaatcgacctttcctttctatccccaaccacccctcaacccctgttttcccctgccttccttgcagaggccatggaggacgaggagagacagaagaagctggaggccggcaaagccaagcttgcccagtttcgacaaagaaaagctcagtcggatgggcagagtccttccaagaagcagaaaaaaaagagaaaaacgtcaagcagtaaacatgatgtgtcagcacaccatgatttgaatattgatcaatcacagtgtaatgaaatgtacataaatagttctcagagagtagaatcaactgtgattcctgaatctacaataatgagaactctacatagtggagaaataaccagtcatgagcagggcttctctgtggaactggaaagtgaaatttcaaccacagcagatgactgcagttcagaggtaaatggttgcagttttgtgatgagaacaggaaagcctacaaatttattaagggaagaagaatttggtgttgatgattcttattctgaacaaggagcacaagacagtccgactcatctagagatgatggaaagtgagttggctgggaagcagcatgagattgaagagctaaacagagagctggaagaaatgagggttacctatgggactgaaggactgcagcagttacaagaatttgaagctgccattaaacaaagagatggcattataacccagctcactgctaatttacaacaagcaagaagagaaaaggatgagacaatgagagaatttttagagttgacagaacagagtcaaaaattacagattcaatttcagcaattacaggctagtgaaactctgagaaacagcactcatagtagcacagctgcagacttactacaagccaaacaacagatcctcactcatcaacagcagcttgaagaacaagaccacttattagaagattatcagaaaaagaaagaagacttcacaatgcaaattagtttcttgcaagagaaaattaaagtatatgaaatggaacaagataaaaaagtagaaaactcaaataaagaagaaatacaggaaaaggagacaatcattgaagaattaaacacaaaaataatagaagaagaaaagaaaactcttgagctaaaggataaattaacaactgctgataaattactaggagaattacaagaacagattgtgcaaaagaaccaagaaataaaaaacatgaaattagagctgactaattctaagcaaaaagaaagacagtcttctgaagaaataaaacagttaatggggacagtcgaagaacttcagaagagaaatcataaagacagccagttcgaaactgatatagtacaacgaatggaacaagaaacacaaagaaagttagaacaactccgggcagagctggatgagatgtatgggcagcagatagtgcaaatgaaacaagaattaataagacaacacatggcacagatggaggaaattaaaacacggcataagggagaaatggagaatgctttaaggtcatattcaaatattacagttaatgaagatcagataaagttaatgaatgtggcaataaatgaactgaatataaaattgcaagatactaactctcaaaaggaaaaactcaaggaagaactaggactaattttagaagaaaagtgtgctctacagagacagcttgaagaccttgttgaagaattgagcttttcaagggaacagattcagagagctagacagacaatagctgaacaagaaagtaaacttaatgaagcacataagtcccttagtacagtggaagatttgaaagctgagattgtttctgcatctgaatccagaaaggaactagaattaaaacatgaagcagaagttacaaattacaagataaaacttgaaatgttagaaaaagaaaagaatgctgtgttagacagaatggctgaatcacaagaagctgaattagagaggctgagaacacagcttctatttagtcacgaagaagagctttccaaactgaaggaagatttagaaattgaacatcgaataaatattgaaaaacttaaagataatttaggcattcactataaacagcagatagatggtttacagaatgaaatgagtcaaaagatagaaaccatgcagtttgaaaaggacaatttgataactaagcagaatcaattaattttggaaatttcaaagctaaaagatttacagcagtctcttgtaaattcaaagtcagaagaaatgactcttcaaatcaatgaacttcaaaaagaaattgaaatactcagacaagaagaaaaagaaaagggtacacttgaacaagaagttcaagaattacaacttaaaacagaattgttagaaaaacagatgaaggaaaaagagaatgatcttcaagaaaaatttgcacaacttgaagcagagaatagcattcttaaagatgaaaagaaaacccttgaagacatgttgaaaatacatactcctgttagccaagaagaaagattgattttcttagactccattaagtccaaatccaaagactctgtgtgggaaaaagaaatagaaatacttatagaggaaaatgaggacctcaaacaacaatgtattcagctaaatgaagagattgaaaagcaaaggaacactttttcatttgctgaaaaaaactttgaagttaactatcaagagttacaagaggagtatgcttgccttctcaaagtaaaagatgatttagaagacagtaaaaataaacaggaattagagtataaaagtaaacttaaagcacttaatgaagagcttcatttgcaaagaataaatccaactacagtgaaaatgaaaagttctgtctttgatgaagacaaaacttttgtagcagaaacattggaaatgggtgaggttgttgaaaaggatacaacagaactcatggaaaaacttgaggtaaccaagcgagagaaattagagctgtcacagagactgtctgatctttctgaacaattgaaacagaaacatggtgagattagttttctaaatgaagaagttaaatctttaaagcaagagaaagaacaagtttcattgagatgtagagagctagaaatcattattaaccacaacagggcagaaaatgtacagtcatgtgatactcaagtaagctctttattagatggagttgtgactatgacaagcaggggtgctgaaggatcagtttctaaagtaaataaaagttttggtgaagaatcaaaaataatggtggaagataaagtttcttttgaaaatatgactgttggagaagaaagtaagcaagaacagttgattttggatcacttaccatctgtaacaaaggaatcatcacttagagcaactcaaccaagtgaaaatgataaacttcagaaagaactcaatgtacttaaatcagaacagaatgatttaaggctacagatggaagcccaacgcatttgcctctctctggtttattcaactcatgtggatcaggttcgtgaatatatggaaaatgaaaaagataaagctctttgcagtcttaaagaagagcttatttttgctcaagaggaaaagatcaaggaacttcagaaaatacaccagttagaactacagactatgaaaacacaagaaacaggtgatgaaggaaagcctttacatctgctcattggaaaacttcaaaaggcagtgtctgaagaatgttcttattttttacagactttatgcagtgtccttggtgaatattatactcctgctttaaaatgtgaagtaaatgcagaagacaaagagaattctggtgattacatttctgaaaatgaagatccagaattacaagattatagatatgaagttcaagactttcaagaaaatatgcacactcttctcaacaaagtaacagaagaatacaacaaactcttggtacttcaaacacgactaagcaagatctggggacagcagacagatggtatgaaacttgaatttggagaagaaaaccttccaaaagaggaaacagagtttttatcaatccattctcagatgaccaatttggaagacattgatgtcaatcataaaagcaagttatcttctctgcaagatcttgaaaaaactaaacttgaagaacaagttcaagaattagaaagcctcatatcctctttgcagcaacagttgaaagaaactgaacaaaactatgaggcagagatccactgtttacagaagaggcttcaagctgttagtgagtccacggttccgccaagcttacctgttgattcggtggtaattacagaatctgatgcacagagaacaatgtaccctggaagttgtgtgaaaaagaatattgatggtacaatagagttttctggtgaatttggagtgaaagaggaaacaaatatcgttaagttgcttgaaaaacaataccaagaacaattagaagaagaagtagctaaggttattgtgtcaatgagtatagcatttgctcaacaaactgaactgtctagaatatctgggggaaaagaaaatactgcatcatcaaagcaagcacatgctgtgtgtcagcaagaacaacattattttaatgaaatgaaattatcacaggatcaaattggttttcagacttttgagacagtggatgtgaaatttaaagaagaatttaaaccacttagtaaagagttaggagaacatggaaaggaaattttattatcaaatagtgatccccatgatataccagaatcaaaggactgtgtgctgactatttcagaagaaatgttctccaaagataaaacatttatagttagacagtctattcatgatgagatttcagtgtcaagcatggatgcttctagacaactaatgttgaatgaagaacagttggaagatatgagacaggaacttgtacgacaataccaagaacatcaacaggcaacggaattgttaaggcaagcacatatgcggcaaatggagagacagcgagaagaccaggaacagctacaagaagagattaagagacttaatagacaattagcccagagatcctccatagataatgaaaacctggtttcagagagagagagggtgcttttagaggagctggaagcactaaagcagctgtctttagctggaagagagaagctgtgttgtgagctgcgcaacagcagtacgcaaacacagaatggaaatgaaaaccaaggagaagttgaagaacaaacatttaaagaaaaggaattagacagaaaacctgaagatgtgcctcctgagattttgtctaatgaaaggtatgcactccagaaagctaataatagacttttgaagatcctcttagaagttgtaaagacaacagcagctgttgaagaaacaattggtcgccatgtccttgggattctagatagatctagtaaaagccagtcatctgccagcctaatttggaggtcagaagcagaggcatctgtaaagtcatgtgtccatgaggaacatacaagagttacagatgaatccattccctcttattctggaagtgatatgccaagaaatgacattaacatgtggtcaaaagtaactgaggaaggaacagagctgtcacaacgacttgtgaggagtggttttgctggaactgaaatagaccctgaaaatgaagaacttatgctgaacattagctctcgactacaagcagcagttgaaaaactcctagaagccataagtgaaactagcagtcagcttgaacatgcgaaagtgacacagacagagttgatgcgtgagtcatttagacagaaacaagaagcaacagagtcccttaagtgccaagaggaacttcgagagcgccttcatgaggagtccagggccagagaacagctagctgtggagctcagtaaggctgagggcgtcattgatggctatgcagatgaaaaaactctttttgaaaggcaaattcaggaaaaaactgatataatagatcgtcttgagcaggagttgttatgtgcaagtaacaggttgcaagaattggaggcagagcaacagcagatccaagaagaaagagaattactgtccagacaaaaggaagctatgaaagcagaggcaggcccagttgaacaacaattactacaggagacagaaaaattaatgaaggaaaaactagaagtacaatgtcaagctgaaaaagtacgtgatgaccttcaaaaacaagtgaaagctctagaaatagatgtggaagaacaagtcagtaggtttatagagctggaacaagaaaaaaatactgaactaatggatttaagacagcaaaaccaagcattggaaaagcagttagaaaaaatgagaaaatttttagatgagcaagccattgacagagaacatgagagagatgtattccaacaggaaatacagaaactagaacagcaacttaaggttgttcctcgattccagcctatcagtgaacatcaaactagagaggttgaacagttagcaaatcatctgaaagaaaaaacagacaaatgcagtgagcttttgctctctaaagagcagcttcaaagggatatacaagaaaggaatgaagaaatagagaaactggagttcagagtaagagaactggagcaggcgcttcttggtagaggaccgaaaacactttggagctgtagaagctaaaccagaattgtccctagaagtacaattgcaggctgaacgagatgccatagacagaaaggaaaaagagattacaaacttagaagagcaattagaacagtttagagaagaactggaaaataagaatgaagaagttcaacaattacatatgcaattagaaatacagaaaaaggaatctactacccgcctacaagaacttgaacaggaaaacaaattatttaaggatgacatggagaaactgggacttgccataaaggaatctgatgccatgtctactcaagaccaacatgtgctatttgggaaatttgctcaaataatacaggaaaaagaggtagaaattgaccaattaaatgaacaagttacgaaactccagcagcaacttaaaattacaacagataacaaggttattgaagaaaaaaatgaactgataagggatcttgaaacccaaatagaatgtttgatgagtgatcaagaatgtgtgaagagaaatagagaagaagaaatagagcagctcaatgaagtgattgaaaaacttcaacaggaattggcaaatattggacagaagacatcaatgaatgctcattccctctcagaagaagcagacagtttaaaacatcaattggatgtggttatagctgaaaagctggccttggaacagcaagtagaaaccgctaatgaagaaatgaccttcatgaaaaatgtacttaaagaaaccaattttaaaatgaatcagctaacacaggaattattcagcttaaagagagaacgtgaaagtgtggaaaagattcaaagcataccagagaatagtgttaacgtggctatagatcatctgagcaaagacaaacctgaactagaagtagtccttacagaggatgctcttaaatccctagaaaatcagacatacttcaaatcttttgaagaaaatggcaaaggttccataattaatttggaaacaaggttgctacaacttgagagcactgttagtgcaaaggacttagaacttacccagtgttataaacaaataaaagacatgcaagaacaaggccagtttgaaacagaaatgcttcaaaagaagattgtaaacctacagaaaatagttgaagaaaaagtggctgctgctcttgtcagtcaaatccaacttgaggcagttcaggaatatgcaaaattctgtcaagataatcaaacaatttcatcagaacctgaaagaacaaatattcagaatttaaatcaactaagagaagatgagttggggtcagatatatcagcattaaccttgagaatatcagaattagaaagccaggttgttgaaatgcatactagtttgattttagaaaaagaacaagtagaaattgcagaaaaaaatgttttagaaaaagaaaagaagctgctagaactacagaagctattggagggcaatgagaaaaaacagagagagaaagaaaagaaaagaagccctcaagatgttgaagttctcaagacaactactgagctatttcatagcaatgaagaaagtggattttttaatgaactcgaggctcttagagctgaatcagtggctaccaaagcagaacttgccagttataaagaaaaggctgaaaaacttcaagaagagcttttggtaaaagaaacaaatatgacatctcttcagaaagacttaagccaagttagggatcacctcgcagaggcaaaagagaaattgtccattttagaaaaagaagatgagactgaggtacaagaaagcaaaaaggcctgcatgtttgagccacttcctataaaactgagtaagagcattgcatcccagacagatgggactctgaagatcagtagcagcaatcagactccacaaattcttgttaaaaatgcaggaatacaaattaatttacagagtgaatgttcctcagaagaagttactgaaataatcagtcagtttactgaaaaaattgagaagatgcaagaactacatgctgctgaaattttggacatggaatccagacatatttcagaaactgaaaccttaaagagggaacactatgttgccgttcagttactgaaagaggaatgtggtaccttgaaggcagtgatacagtgtctgagaagtaaagagggatcctcaattcctgagctagcacattctgatgcttaccagactagagaaatatgctccagtgattctggatcagactggggtcagggaatttatcttacacacagtcagggatttgacatagcatcagaaggccgaggagaagaaagtgaaagtgcaacagattcctttccaaagaaaataaagggattactgagagctgtccataatgaaggcatgcaggtgctttctctcactgagtctccctatagtgatggagaggaccattctattcagcaggtttcagaatcttggctagaagagagaaaagcttacatcaatacaatctcatctctaaaggatttaattacaaagatgcaactgcaaagagaagccgaggtttatgatagttctcaatctcatgagagcttctcagactggcgaggtgaactactgcttgcccttcaacaagttttcttagaagagcgtagtgttttactagcagcatttcggacggagctgacagctctaggtactacagatgcagttggtttactaaactgtttggaacagagaatacaagaacagggtgttgaatatcaagcagctatggaatgcctccagaaagcagatagaaggagtttgttatctgaaattcaggcactgcatgcacaaatgaatggtaggaaaattactctgaaaagagaacaagagagtgagaaaccaagccaagaactcttggaatataatatacagcagaagcagtctcaaatgctggagatgcaagtggagctcagcagtatgaaagacagagcaacggaactgcaggagcagctgagttctgagaaaatggtggttgctgaactgaagagtgagcttgcacaaactaaattggaactagaaacaacactcaaggcacagcataaacacctaaaagaattggaggctttcaggttggaagttaaagataagacagatgaagtacatttgcttaatgacacattagcaagtgaacagaaaaaatcaagagagctccagtgggctttggagaaagagaaagccaagttgggacgcagtgaagaacgggataaagaagaacttgaggatctgaagttttcacttgagagtcagaaacaaaggaatcttcagctaaatctacttttggaacaacagaaacaactactgaacgaatcccagcaaaaaatagaatcacagagaatgctatatgatgcccagttgtcagaagaacaaggtcgaaacttagagcttcaggtacttcttgaatctgagaaagttcgaattcgggaaatgagtagtaccctagatagggagcgggaattgcacgcacagctgcagagcagtgatggtactggacagtctcggccacccttgccctcagaggacctactgaaagagctgcagaaacagctagaggaaaaacacagtcgcatagtagaattgttaaatgagactgaaaaatataaactggattctttgcaaacacgacagcaaatggaaaaagataggcaggttcacaggaaaacactgcagacagaacaggaggccaacactgagggacagaaaaaaatgcatgagctccagtccaaagtggaagatcttcagcgccagctggaagagaaaagacaacaagtttataagttagaccttgaaggacagcgactacaaggaatcatgcaggaattccagaagcaagaactagaacgagaagaaaaacgagaaagtagaagaattctgtatcagaaccttaatgagccaaccacgtggagcttaaccagtgatagaactagaaattgggttcttcaacagaaaatagaaggagaaacaaaagaatcaaactacgctaaattgattgaaatgaatggaggaggaaccggctgtaatcatgaattagaaatgatcagacaaaagcttcaatgtgtagcttcaaaactacaggttctaccccagaaagcctctgagagactacagtttgaaacagcagatgatgaagatttcatttgggttcaggaaaatattgatgaaattattttacaactacagaaattaactggccagcaaggtgaagagcccagcttggtgtccccaagtacttcttgtggctcattgactgaaagactactgagacaaaatgctgagctgacagggcatatcagtcaactgactgaagagaagaatgacttaaggaacatggttatgaagctggaagagcagatcaggtggtatcgacagacaggagctggtagagataattcttccaggttttcattgaatggtggtgccaacattgaagccatcattgcctctgaaaaagaagtatggaacagagaaaaattgactctccagaaatctttgaaaagggcagaggctgaagtatacaaactgaaagctgaactaagaaatgactctttacttcaaactctgagccctgattctgaacatgtcactttaaagagaatttatggtaaatacttgagggcagaaagttttcgaaaggctctcatttaccagaagaaatacctgctgctgttactgggtgggttccaggaatgtgaagatgccaccttggccctgcttgcccggatgggggggcagccagctttcacggatctagaggtgatcaccaatcgcccaaagggcttcaccaggtttcggtcggccgtcagagtatccattgcaatttccagaatgaaatttttggttcgacggtggcatcgagtcacaggttctgtttccatcaatattaacagagatggctttggactgaatcaaggtgcagaaaagactgactcattttatcattcttctggtgggctggagttatatggagaaccaagacatactacgtatcgctcaagatcagatctggactatattaggtcccctttaccatttcagaataggtacccaggcactccagctgatttcaatcctggttctttagcatgttctcagcttcagaattacgatcctgacagagccctaacagattatatcactcggctagaggcactgcaaagacgacttggaactatacagtcaggtgctctgagtttaaccacatcttggcagcaccacagtgcgagacccacagctcccctttctttgaaattctttcacactcattaggataatcaaagcttccagtttagtgcatgagctaattattaagttagccaaagcttaaactcttgtaaccagcagagaaactgactttaaataatttaagtgaaaatatgatttatcaccccagatcccactcctcccaaaaatgatttcctactatgttcattcagcggactgatgacacaaaatgcacaatgagcaccagtgtgcaaggtactctgagtctacagagcctaactggagaacgtattcctaagtagcgcatggcagaaagtggtaaggccgtgccgcagcactccagcctgggcagcagagcgagaccctgtctca

SEQ ID NO: 293067 - DNA, 9076 bp, Homo sapiens
tatgaatgttactcttttgcttgatatgatttctttagaatttatagatttctttctgatcagcatttctgaacgtccatccttgtcctgtgatgttttttcaaaggtatttgagattacagagataacatcagaaataggatccaagctaggaagtggttgattaaagtataagataaattttattattataaggaagcagaaaaaattatagttttgtgcaatgaagtttattatcttcctgatataagaagatttcatgccagagagatagatttagacttgtttcttttgcagattgataagggtatggagagaatgttttcttaattatttttgtgtgccattttgaccgccttgcatctaggagaattatgtttaatctttagaagcagaaatctaaatttaaattccttaaaatacacaattttgttgttaacagactttatgcagtgtccttggtgaatattatactcctgctttaaaatgtgaagtaaatgcagaagacaaagagaattctggtgattacatttctgaaaatgaagatccagaattacaagattatagatatgaagttcaagactttcaagaaaatatgcacactcttctcaacaaagtaacagaagaatacaacaaactcttggtacttcaaacacgactaagcaagatctggggacagcagacagatggtatgaaacttgaatttggagaagaaaaccttccaaaagaggaaacagagtttttatcaatccattctcagatgaccaatttggaagacattgatgtcaatcataaaagcaagttatcttctctgcaagatcttgaaaaaactaaacttgaagaacaagttcaagaattagaaagcctcatatcctctttgcagcaacagttgaaagaaactgaacaaaactatgaggcagagatccactgtttacagaagaggcttcaagctgttagtgagtccacggttccgccaagcttacctgttgattcggtggtaattacagaatctgatgcacagagaacaatgtaccctggaagttgtgtgaaaaagaatattgatggtacaatagagttttctggtgaatttggagtgaaagaggaaacaaatatcgttaagttgcttgaaaaacaataccaagaacaattagaagaagaagtagctaaggttattgtgtcaatgagtatagcatttgctcaacaaactgaactgtctagaatatctgggggaaaagaaaatactgcatcatcaaagcaagcacatgctgtgtgtcagcaagaacaacattattttaatgaaatgaaattatcacaggatcaaattggttttcagacttttgagacagtggatgtgaaatttaaagaagaatttaaaccacttagtaaagagttaggagaacatggaaaggaaattttattatcaaatagtgatccccatgatataccagaatcaaaggactgtgtgctgactatttcagaagaaatgttctccaaagataaaacatttatagttagacagtctattcatgatgagatttcagtgtcaagcatggatgcttctagacaactaatgttgaatgaagaacagttggaagatatgagacaggaacttgtacgacaataccaagaacatcaacaggcaacggaattgttaaggcaagcacatatgcggcaaatggagagacagcgagaagaccaggaacagctacaagaagagattaagagacttaatagacaattagcccagagatcctccatagataatgaaaacctggtttcagagagagagagggtgcttttagaggagctggaagcactaaagcagctgtctttagctggaagagagaagctgtgttgtgagctgcgcaacagcagtacgcaaacacagaatggaaatgaaaaccaaggagaagttgaagaacaaacatttaaagaaaaggaattagacagaaaacctgaagatgtgcctcctgagattttgtctaatgaaaggtatgcactccagaaagctaataatagacttttgaagatcctcttagaagttgtaaagacaacagcagctgttgaagaaacaattggtcgccatgtccttgggattctagatagatctagtaaaagccagtcatctgccagcctaatttggaggtcagaagcagaggcatctgtaaagtcatgtgtccatgaggaacatacaagagttacagatgaatccattccctcttattctggaagtgatatgccaagaaatgacattaacatgtggtcaaaagtaactgaggaaggaacagagctgtcacaacgacttgtgaggagtggttttgctggaactgaaatagaccctgaaaatgaagaacttatgctgaacattagctctcgactacaagcagcagttgaaaaactcctagaagccataagtgaaactagcagtcagcttgaacatgcgaaagtgacacagacagagttgatgcgtgagtcatttagacagaaacaagaagcaacagagtcccttaagtgccaagaggaacttcgagagcgccttcatgaggagtccagggccagagaacagctagctgtggagctcagtaaggctgagggcgtcattgatggctatgcagatgaaaaaactctttttgaaaggcaaattcaggaaaaaactgatataatagatcgtcttgagcaggagttgttatgtgcaagtaacaggttgcaagaattggaggcagagcaacagcagatccaagaagaaagagaattactgtccagacaaaaggaagctatgaaagcagaggcaggcccagttgaacaacaattactacaggagacagaaaaattaatgaaggaaaaactagaagtacaatgtcaagctgaaaaagtacgtgatgaccttcaaaaacaagtgaaagctctagaaatagatgtggaagaacaagtcagtaggtttatagagctggaacaagaaaaaaatactgaactaatggatttaagacagcaaaaccaagcattggaaaagcagttagaaaaaatgagaaaatttttagatgagcaagccattgacagagaacatgagagagatgtattccaacaggaaatacagaaactagaacagcaacttaaggttgttcctcgattccagcctatcagtgaacatcaaactagagaggttgaacagttagcaaatcatctgaaagaaaaaacagacaaatgcagtgagcttttgctctctaaagagcagcttcaaagggatatacaagaaaggaatgaagaaatagagaaactggagttcagagtaagagaactggagcaggcgcttcttgtgagtgcagatacttttcaaaaggtagaggaccgaaaacactttggagctgtagaagctaaaccagaattgtccctagaagtacaattgcaggctgaacgagatgccatagacagaaaggaaaaagagattacaaacttagaagagcaattagaacagtttagagaagaactggaaaataagaatgaagaagttcaacaattacatatgcaattagaaatacagaaaaaggaatctactacccgcctacaagaacttgaacaggaaaacaaattatttaaggatgacatggagaaactgggacttgccataaaggaatctgatgccatgtctactcaagaccaacatgtgctatttgggaaatttgctcaaataatacaggaaaaagaggtagaaattgaccaattaaatgaacaagttacgaaactccagcagcaacttaaaattacaacagataacaaggttattgaagaaaaaaatgaactgataagggatcttgaaacccaaatagaatgtttgatgagtgatcaagaatgtgtgaagagaaatagagaagaagaaatagagcagctcaatgaagtgattgaaaaacttcaacaggaattggcaaatattggacagaagacatcaatgaatgctcattccctctcagaagaagcagacagtttaaaacatcaattggatgtggttatagctgaaaagctggccttggaacagcaagtagaaaccgctaatgaagaaatgaccttcatgaaaaatgtacttaaagaaaccaattttaaaatgaatcagctaacacaggaattattcagcttaaagagagaacgtgaaagtgtggaaaagattcaaagcataccagagaatagtgttaacgtggctatagatcatctgagcaaagacaaacctgaactagaagtagtccttacagaggatgctcttaaatccctagaaaatcagacatacttcaaatcttttgaagaaaatggcaaaggttccataattaatttggaaacaaggttgctacaacttgagagcactgttagtgcaaaggacttagaacttacccagtgttataaacaaataaaagacatgcaagaacaaggccagtttgaaacagaaatgcttcaaaagaagattgtaaacctacagaaaatagttgaagaaaaagtggctgctgctcttgtcagtcaaatccaacttgaggcagttcaggaatatgcaaaattctgtcaagataatcaaacaatttcatcagaacctgaaagaacaaatattcagaatttaaatcaactaagagaagatgagttggggtcagatatatcagcattaaccttgagaatatcagaattagaaagccaggttgttgaaatgcatactagtttgattttagaaaaagaacaagtagaaattgcagaaaaaaatgttttagaaaaagaaaagaagctgctagaactacagaagctattggagggcaatgagaaaaaacagagagagaaagaaaagaaaagaagccctcaagatgttgaagttctcaagacaactactgagctatttcatagcaatgaagaaagtggattttttaatgaactcgaggctcttagagctgaatcagtggctaccaaagcagaacttgccagttataaagaaaaggctgaaaaacttcaagaagagcttttggtaaaagaaacaaatatgacatctcttcagaaagacttaagccaagttagggatcacctcgcagaggcaaaagagaaattgtccattttagaaaaagaagatgagactgaggtacaagaaagcaaaaaggcctgcatgtttgagccacttcctataaaactgagtaagagcattgcatcccagacagatgggactctgaagatcagtagcagcaatcagactccacaaattcttgttaaaaatgcaggaatacaaattaatttacagagtgaatgttcctcagaagaagttactgaaataatcagtcagtttactgaaaaaattgagaagatgcaagaactacatgctgctgaaattttggacatggaatccagacatatttcagaaactgaaaccttaaagagggaacactatgttgccgttcagttactgaaagaggaatgtggtaccttgaaggcagtgatacagtgtctgagaagtaaagagggatcctcaattcctgagctagcacattctgatgcttaccagactagagaaatatgctccagtgattctggatcagactggggtcagggaatttatcttacacacagtcagggatttgacatagcatcagaaggccgaggagaagaaagtgaaagtgcaacagattcctttccaaagaaaataaagggattactgagagctgtccataatgaaggcatgcaggtgctttctctcactgagtctccctatagtgatggagaggaccattctattcagcaggtttcagaatcttggctagaagagagaaaagcttacatcaatacaatctcatctctaaaggatttaattacaaagatgcaactgcaaagagaagccgaggtttatgatagttctcaatctcatgagagcttctcagactggcgaggtgaactactgcttgcccttcaacaagttttcttagaagagcgtagtgttttactagcagcatttcggacggagctgacagctctaggtactacagatgcagttggtttactaaactgtttggaacagagaatacaagaacagggtgttgaatatcaagcagctatggaatgcctccagaaagcagatagaaggagtttgttatctgaaattcaggcactgcatgcacaaatgaatggtaggaaaattactctgaaaagagaacaagagagtgagaaaccaagccaagaactcttggaatataatatacagcagaagcagtctcaaatgctggagatgcaagtggagctcagcagtatgaaagacagagcaacggaactgcaggagcagctgagttctgagaaaatggtggttgctgaactgaagagtgagcttgcacaaactaaattggaactagaaacaacactcaaggcacagcataaacacctaaaagaattggaggctttcaggttggaagttaaagataagacagatgaagtacatttgcttaatgacacattagcaagtgaacagaaaaaatcaagagagctccagtgggctttggagaaagagaaagccaagttgggacgcagtgaagaacgggataaagaagaacttgaggatctgaagttttcacttgagagtcagaaacaaaggaatcttcagctaaatctacttttggaacaacagaaacaactactgaacgaatcccagcaaaaaatagaatcacagagaatgctatatgatgcccagttgtcagaagaacaaggtcgaaacttagagcttcaggtacttcttgaatctgagaaagttcgaattcgggaaatgagtagtaccctagatagggagcgggaattgcacgcacagctgcagagcagtgatggtactggacagtctcggccacccttgccctcagaggacctactgaaagagctgcagaaacagctagaggaaaaacacagtcgcatagtagaattgttaaatgagactgaaaaatataaactggattctttgcaaacacgacagcaaatggaaaaagataggcaggttcacaggaaaacactgcagacagaacaggaggccaacactgagggacagaaaaaaatgcatgagctccagtccaaagtggaagatcttcagcgccagctggaagagaaaagacaacaagtttataagttagaccttgaaggacagcgactacaaggaatcatgcaggaattccagaagcaagaactagaacgagaagaaaaacgagaaagtagaagaattctgtatcagaaccttaatgagccaaccacgtggagcttaaccagtgatagaactagaaattgggttcttcaacagaaaatagaaggagaaacaaaagaatcaaactacgctaaattgattgaaatgaatggaggaggaaccggctgtaatcatgaattagaaatgatcagacaaaagcttcaatgtgtagcttcaaaactacaggttctaccccagaaagcctctgagagactacagtttgaaacagcagatgatgaagatttcatttgggttcaggaaaatattgatgaaattattttacaactacagaaattaactggccagcaaggtgaagagcccagcttggtgtccccaagtacttcttgtggctcattgactgaaagactactgagacaaaatgctgagctgacagggcatatcagtcaactgactgaagagaagaatgacttaaggaacatggttatgaagctggaagagcagatcaggtggtatcgacagacaggagctggtagagataattcttccaggttttcattgaatggtggtgccaacattgaagccatcattgcctctgaaaaagaagtatggaacagagaaaaattgactctccagaaatctttgaaaagggcagaggctgaagtatacaaactgaaagctgaactaagaaatgactctttacttcaaactctgagccctgattctgaacatgtcactttaaagagaatttatggtaaatacttgagggcagaaagttttcgaaaggctctcatttaccagaagaaatacctgctgctgttactgggtgggttccaggaatgtgaagatgccaccttggccctgcttgcccggatgggggggcagccagctttcacggatctagaggtgatcaccaatcgcccaaagggcttcaccaggtttcggtcggccgtcagagtatccattgcaatttccagaatgaaatttttggttcgacggtggcatcgagtcacaggttctgtttccatcaatattaacagagatggctttggactgaatcaaggtgcagaaaagactgactcattttatcattcttctggtgggctggagttatatggagaaccaagacatactacgtatcgctcaagatcagatctggactatattaggtcccctttaccatttcagaataggtacccaggcactccagctgatttcaatcctggttctttagcatgttctcagcttcagaattacgatcctgacagagccctaacagattatatcactcggctagaggcactgcaaagacgacttggaactatacagtcaggttcaactactcaatttcatgctggcatgagaagataatcctttgaaacatcattaattgaagtgattttaaatagatttccttttgtaaatcaatggttcttttgtgcttttgtattgtgaatattcaatgggaccaatatgaacacagcttatgattgtatacaaatcccttgccagcacatgaaaacaaactggaatttgtatatataagcattgtgtatgtattcatgcacaataattattgaattacctgtatatttgtggaatgctaatttaaaacattaaattataaaccttgtgtatttatcaaatgggtgaaaagattaaacttttacgcattacaatactgctgaatgtgtagctcgaggtgtcctgcacttttcttataaggctactgaagttacatgttttgcctaatatattctactggtgatgaagacagataatatcacttgtagagacctatttttgtataatggtagaagttttgaattttatggggtattttgtcaagtactgaaataaaaatgacttcaccattttcaccaaaatatattt

SEQ ID NO: 293068 - DNA, 9144 bp, Homo sapiens
gcaaagttgataatctgtagtgaccaatgattgtactgaacgactagattagataactcggtagatcatgactgttcctcgtgtgaaattttgtttcctcccatattgattttggatcacttaccatctgtaacaaaggaatcatcacttagagcaactcaaccaagtgaaaatgataaacttcagaaagaactcaatgtacttaaatcagaacagaatgatttaaggctacagatggaagcccaacgcatttgcctctctctggtttattcaactcatgtggatcaggttcgtgaatatatggaaaatgaaaaagataaagctctttgcagtcttaaagaagagcttatttttgctcaagaggaaaagatcaaggaacttcagaaaatacaccagttagaactacagactatgaaaacacaagaaacaggtgatgaaggaaagcctttacatctgctcattggaaaacttcaaaaggcagtgtctgaagaatgttcttattttttacagactttatgcagtgtccttggtgaatattatactcctgctttaaaatgtgaagtaaatgcagaagacaaagagaattctggtgattacatttctgaaaatgaagatccagaattacaagattatagatatgaagttcaagactttcaagaaaatatgcacactcttctcaacaaagtaacagaagaatacaacaaactcttggtacttcaaacacgactaagcaagatctggggacagcagacagatggtatgaaacttgaatttggagaagaaaaccttccaaaagaggaaacagagtttttatcaatccattctcagatgaccaatttggaagacattgatgtcaatcataaaagcaagttatcttctctgcaagatcttgaaaaaactaaacttgaagaacaagttcaagaattagaaagcctcatatcctctttgcagcaacagttgaaagaaactgaacaaaactatgaggcagagatccactgtttacagaagaggcttcaagctgttagtgagtccacggttccgccaagcttacctgttgattcggtggtaattacagaatctgatgcacagagaacaatgtaccctggaagttgtgtgaaaaagaatattgatggtacaatagagttttctggtgaatttggagtgaaagaggaaacaaatatcgttaagttgcttgaaaaacaataccaagaacaattagaagaagaagtagctaaggttattgtgtcaatgagtatagcatttgctcaacaaactgaactgtctagaatatctgggggaaaagaaaatactgcatcatcaaagcaagcacatgctgtgtgtcagcaagaacaacattattttaatgaaatgaaattatcacaggatcaaattggttttcagacttttgagacagtggatgtgaaatttaaagaagaatttaaaccacttagtaaagagttaggagaacatggaaaggaaattttattatcaaatagtgatccccatgatataccagaatcaaaggactgtgtgctgactatttcagaagaaatgttctccaaagataaaacatttatagttagacagtctattcatgatgagatttcagtgtcaagcatggatgcttctagacaactaatgttgaatgaagaacagttggaagatatgagacaggaacttgtacgacaataccaagaacatcaacaggcaacggaattgttaaggcaagcacatatgcggcaaatggagagacagcgagaagaccaggaacagctacaagaagagattaagagacttaatagacaattagcccagagatcctccatagataatgaaaacctggtttcagagagagagagggtgcttttagaggagctggaagcactaaagcagctgtctttagctggaagagagaagctgtgttgtgagctgcgcaacagcagtacgcaaacacagaatggaaatgaaaaccaaggagaagttgaagaacaaacatttaaagaaaaggaattagacagaaaacctgaagatgtgcctcctgagattttgtctaatgaaaggtatgcactccagaaagctaataatagacttttgaagatcctcttagaagttgtaaagacaacagcagctgttgaagaaacaattggtcgccatgtccttgggattctagatagatctagtaaaagccagtcatctgccagcctaatttggaggtcagaagcagaggcatctgtaaagtcatgtgtccatgaggaacatacaagagttacagatgaatccattccctcttattctggaagtgatatgccaagaaatgacattaacatgtggtcaaaagtaactgaggaaggaacagagctgtcacaacgacttgtgaggagtggttttgctggaactgaaatagaccctgaaaatgaagaacttatgctgaacattagctctcgactacaagcagcagttgaaaaactcctagaagccataagtgaaactagcagtcagcttgaacatgcgaaagtgacacagacagagttgatgcgtgagtcatttagacagaaacaagaagcaacagagtcccttaagtgccaagaggaacttcgagagcgccttcatgaggagtccagggccagagaacagctagctgtggagctcagtaaggctgagggcgtcattgatggctatgcagatgaaaaaactctttttgaaaggcaaattcaggaaaaaactgatataatagatcgtcttgagcaggagttgttatgtgcaagtaacaggttgcaagaattggaggcagagcaacagcagatccaagaagaaagagaattactgtccagacaaaaggaagctatgaaagcagaggcaggcccagttgaacaacaattactacaggagacagaaaaattaatgaaggaaaaactagaagtacaatgtcaagctgaaaaagtacgtgatgaccttcaaaaacaagtgaaagctctagaaatagatgtggaagaacaagtcagtaggtttatagagctggaacaagaaaaaaatactgaactaatggatttaagacagcaaaaccaagcattggaaaagcagttagaaaaaatgagaaaatttttagatgagcaagccattgacagagaacatgagagagatgtattccaacaggaaatacagaaactagaacagcaacttaaggttgttcctcgattccagcctatcagtgaacatcaaactagagaggttgaacagttagcaaatcatctgaaagaaaaaacagacaaatgcagtgagcttttgctctctaaagagcagcttcaaagggatatacaagaaaggaatgaagaaatagagaaactggagttcagagtaagagaactggagcaggcgcttcttgtgagtgcagatacttttcaaaaggtagaggaccgaaaacactttggagctgtagaagctaaaccagaattgtccctagaagtacaattgcaggctgaacgagatgccatagacagaaaggaaaaagagattacaaacttagaagagcaattagaacagtttagagaagaactggaaaataagaatgaagaagttcaacaattacatatgcaattagaaatacagaaaaaggaatctactacccgcctacaagaacttgaacaggaaaacaaattatttaaggatgacatggagaaactgggacttgccataaaggaatctgatgccatgtctactcaagaccaacatgtgctatttgggaaatttgctcaaataatacaggaaaaagaggtagaaattgaccaattaaatgaacaagttacgaaactccagcagcaacttaaaattacaacagataacaaggttattgaagaaaaaaatgaactgataagggatcttgaaacccaaatagaatgtttgatgagtgatcaagaatgtgtgaagagaaatagagaagaagaaatagagcagctcaatgaagtgattgaaaaacttcaacaggaattggcaaatattggacagaagacatcaatgaatgctcattccctctcagaagaagcagacagtttaaaacatcaattggatgtggttatagctgaaaagctggccttggaacagcaagtagaaaccgctaatgaagaaatgaccttcatgaaaaatgtacttaaagaaaccaattttaaaatgaatcagctaacacaggaattattcagcttaaagagagaacgtgaaagtgtggaaaagattcaaagcataccagagaatagtgttaacgtggctatagatcatctgagcaaagacaaacctgaactagaagtagtccttacagaggatgctcttaaatccctagaaaatcagacatacttcaaatcttttgaagaaaatggcaaaggttccataattaatttggaaacaaggttgctacaacttgagagcactgttagtgcaaaggacttagaacttacccagtgttataaacaaataaaagacatgcaagaacaaggccagtttgaaacagaaatgcttcaaaagaagattgtaaacctacagaaaatagttgaagaaaaagtggctgctgctcttgtcagtcaaatccaacttgaggcagttcaggaatatgcaaaattctgtcaagataatcaaacaatttcatcagaacctgaaagaacaaatattcagaatttaaatcaactaagagaagatgagttggggtcagatatatcagcattaaccttgagaatatcagaattagaaagccaggttgttgaaatgcatactagtttgattttagaaaaagaacaagtagaaattgcagaaaaaaatgttttagaaaaagaaaagaagctgctagaactacagaagctattggagggcaatgagaaaaaacagagagagaaagaaaagaaaagaagccctcaagatgttgaagttctcaagacaactactgagctatttcatagcaatgaagaaagtggattttttaatgaactcgaggctcttagagctgaatcagtggctaccaaagcagaacttgccagttataaagaaaaggctgaaaaacttcaagaagagcttttggtaaaagaaacaaatatgacatctcttcagaaagacttaagccaagttagggatcacctcgcagaggcaaaagagaaattgtccattttagaaaaagaagatgagactgaggtacaagaaagcaaaaaggcctgcatgtttgagccacttcctataaaactgagtaagagcattgcatcccagacagatgggactctgaagatcagtagcagcaatcagactccacaaattcttgttaaaaatgcaggaatacaaattaatttacagagtgaatgttcctcagaagaagttactgaaataatcagtcagtttactgaaaaaattgagaagatgcaagaactacatgctgctgaaattttggacatggaatccagacatatttcagaaactgaaaccttaaagagggaacactatgttgccgttcagttactgaaagaggaatgtggtaccttgaaggcagtgatacagtgtctgagaagtaaagagggatcctcaattcctgagctagcacattctgatgcttaccagactagagaaatatgctccagtgattctggatcagactggggtcagggaatttatcttacacacagtcagggatttgacatagcatcagaaggccgaggagaagaaagtgaaagtgcaacagattcctttccaaagaaaataaagggattactgagagctgtccataatgaaggcatgcaggtgctttctctcactgagtctccctatagtgatggagaggaccattctattcagcaggtttcagaatcttggctagaagagagaaaagcttacatcaatacaatctcatctctaaaggatttaattacaaagatgcaactgcaaagagaagccgaggtttatgatagttctcaatctcatgagagcttctcagactggcgaggtgaactactgcttgcccttcaacaagttttcttagaagagcgtagtgttttactagcagcatttcggacggagctgacagctctaggtactacagatgcagttggtttactaaactgtttggaacagagaatacaagaacagggtgttgaatatcaagcagctatggaatgcctccagaaagcagatagaaggagtttgttatctgaaattcaggcactgcatgcacaaatgaatggtaggaaaattactctgaaaagagaacaagagagtgagaaaccaagccaagaactcttggaatataatatacagcagaagcagtctcaaatgctggagatgcaagtggagctcagcagtatgaaagacagagcaacggaactgcaggagcagctgagttctgagaaaatggtggttgctgaactgaagagtgagcttgcacaaactaaattggaactagaaacaacactcaaggcacagcataaacacctaaaagaattggaggctttcaggttggaagttaaagataagacagatgaagtacatttgcttaatgacacattagcaagtgaacagaaaaaatcaagagagctccagtgggctttggagaaagagaaagccaagttgggacgcagtgaagaacgggataaagaagaacttgaggatctgaagttttcacttgagagtcagaaacaaaggaatcttcagctaaatctacttttggaacaacagaaacaactactgaacgaatcccagcaaaaaatagaatcacagagaatgctatatgatgcccagttgtcagaagaacaaggtcgaaacttagagcttcaggtacttcttgaatctgagaaagttcgaattcgggaaatgagtagtaccctagatagggagcgggaattgcacgcacagctgcagagcagtgatggtactggacagtctcggccacccttgccctcagaggacctactgaaagagctgcagaaacagctagaggaaaaacacagtcgcatagtagaattgttaaatgagactgaaaaatataaactggattctttgcaaacacgacagcaaatggaaaaagataggcaggttcacaggaaaacactgcagacagaacaggaggccaacactgagggacagaaaaaaatgcatgagctccagtccaaagtggaagatcttcagcgccagctggaagagaaaagacaacaagtttataagttagaccttgaaggacagcgactacaaggaatcatgcaggaattccagaagcaagaactagaacgagaagaaaaacgagaaagtagaagaattctgtatcagaaccttaatgagccaaccacgtggagcttaaccagtgatagaactagaaattgggttcttcaacagaaaatagaaggagaaacaaaagaatcaaactacgctaaattgattgaaatgaatggaggaggaaccggctgtaatcatgaattagaaatgatcagacaaaagcttcaatgtgtagcttcaaaactacaggttctaccccagaaagcctctgagagactacagtttgaaacagcagatgatgaagatttcatttgggttcaggaaaatattgatgaaattattttacaactacagaaattaactggccagcaaggtgaagagcccagcttggtgtccccaagtacttcttgtggctcattgactgaaagactactgagacaaaatgctgagctgacagggcatatcagtcaactgactgaagagaagaatgacttaaggaacatggttatgaagctggaagagcagatcaggtggtatcgacagacaggagctggtagagataattcttccaggttttcattgaatggtggtgccaacattgaagccatcattgcctctgaaaaagaagtatggaacagagaaaaattgactctccagaaatctttgaaaagggcagaggctgaagtatacaaactgaaagctgaactaagaaatgactctttacttcaaactctgagccctgattctgaacatgtcactttaaagagaatttatggtaaatacttgagggcagaaagttttcgaaaggctctcatttaccagaagaaatacctgctgctgttactgggtgggttccaggaatgtgaagatgccaccttggccctgcttgcccggatgggggggcagccagctttcacggatctagaggtgatcaccaatcgcccaaagggcttcaccaggtttcggtcggccgtcagagtatccattgcaatttccagaatgaaatttttggttcgacggtggcatcgagtcacaggttctgtttccatcaatattaacagagatggctttggactgaatcaaggtgcagaaaagactgactcattttatcattcttctggtgggctggagttatatggagaaccaagacatactacgtatcgctcaagatcagatctggactatattaggtcccctttaccatttcagaataggtacccaggcactccagctgatttcaatcctggttctttagcatgttctcagcttcagaattacgatcctgacagagccctaacagattatatcactcggctagaggcactgcaaagacgacttggaactatacagtcaggttcaactactcaatttcatgctggcatgagaagataatcctttgaaacatcattaattgaagtgattttaaatagatttccttttgtaaatcaatggttcttttgtgcttttgtattgtgaatattcaatgggaccaatatgaacacagcttatgattgtatacaaatcccttgccagcacatgaaaacaaactggaatttgtatatataagcattgtgtatgtattcatgcacaataattattgaattacctgtatatttgtggaatgctaatttaaaacattaaattataaaccttgtgtatttatcaaatgggtgaaaagattaaacttttacgcattacaatactgctgaatgtgtagctcgaggtgtcctgcacttttcttataaggctactgaagttacatgttttgcctaatatattctactggtgatgaagacagataatatcacttgtagagacctatttttgtataatggtagaagttttgaattttatggggtattttgtcaagtactgaaataaaaatgacttcaccattttcaccaaaatatattt

SEQ ID NO: 293069 - DNA, 12466 bp, Homo sapiens
gaagatggcggcggcggcggcggtgacggcgcttcccgtgcggctgaggacgatccgccagtgagcgcggagactgcttccacttcgggcgggggagcgccggaccgaatcggctctctaggccgtggagcttgccgtcccacctccgtccaaatcgacctttcctttctatccccaaccacccctcaacccctgttttcccctgccttccttgcagaggccatggaggacgaggagagacagaagaagctggaggccggcaaagccaagcttgcccagtttcgacaaagaaaagctcagtcggatgggcagagtccttccaagaagcagaaaaaaaagagaaaaacgtcaagcagtaaacatgatgtgtcagcacaccatgatttgaatattgatcaatcacagtgtaatgaaatgtacataaatagttctcagagagtagaatcaactgtgattcctgaatctacaataatgagaactctacatagtggagaaataaccagtcatgagcagggcttctctgtggaactggaaagtgaaatttcaaccacagcagatgactgcagttcagaggtaaatggttgcagttttgtgatgagaacaggaaagcctacaaatttattaagggaagaagaatttggtgttgatgattcttattctgaacaaggagcacaagacagtccgactcatctagagatgatggaaagtgagttggctgggaagcagcatgagattgaagagctaaacagagagctggaagaaatgagggttacctatgggactgaaggactgcagcagttacaagaatttgaagctgccattaaacaaagagatggcattataacccagctcactgctaatttacaacaagcaagaagagaaaaggatgagacaatgagagaatttttagagttgacagaacagagtcaaaaattacagattcaatttcagcaattacaggctagtgaaactctgagaaacagcactcatagtagcacagctgcagacttactacaagccaaacaacagatcctcactcatcaacagcagcttgaagaacaagaccacttattagaagattatcagaaaaagaaagaagacttcacaatgcaaattagtttcttgcaagagaaaattaaagtatatgaaatggaacaagataaaaaagtagaaaactcaaataaagaagaaatacaggaaaaggagacaatcattgaagaattaaacacaaaaataatagaagaagaaaagaaaactcttgagctaaaggataaattaacaactgctgataaattactaggagaattacaagaacagattgtgcaaaagaaccaagaaataaaaaacatgaaattagagctgactaattctaagcaaaaagaaagacagtcttctgaagaaataaaacagttaatggggacagtcgaagaacttcagaagagaaatcataaagacagccagttcgaaactgatatagtacaacgaatggaacaagaaacacaaagaaagttagaacaactccgggcagagctggatgagatgtatgggcagcagatagtgcaaatgaaacaagaattaataagacaacacatggcacagatggaggaaattaaaacacggcataagggagaaatggagaatgctttaaggtcatattcaaatattacagttaatgaagatcagataaagttaatgaatgtggcaataaatgaactgaatataaaattgcaagatactaactctcaaaaggaaaaactcaaggaagaactaggactaattttagaagaaaagtgtgctctacagagacagcttgaagaccttgttgaagaattgagcttttcaagggaacagattcagagagctagacagacaatagctgaacaagaaagtaaacttaatgaagcacataagtcccttagtacagtggaagatttgaaagctgagattgtttctgcatctgaatccagaaaggaactagaattaaaacatgaagcagaagttacaaattacaagataaaacttgaaatgttagaaaaagaaaagaatgctgtgttagacagaatggctgaatcacaagaagctgaattagagaggctgagaacacagcttctatttagtcacgaagaagagctttccaaactgaaggaagatttagaaattgaacatcgaataaatattgaaaaacttaaagataatttaggcattcactataaacagcagatagatggtttacagaatgaaatgagtcaaaagatagaaaccatgcagtttgaaaaggacaatttgataactaagcagaatcaattaattttggaaatttcaaagctaaaagatttacagcagtctcttgtaaattcaaagtcagaagaaatgactcttcaaatcaatgaacttcaaaaagaaattgaaatactcagacaagaagaaaaagaaaagggtacacttgaacaagaagttcaagaattacaacttaaaacagaattgttagaaaaacagatgaaggaaaaagagaatgatcttcaagaaaaatttgcacaacttgaagcagagaatagcattcttaaagatgaaaagaaaacccttgaagacatgttgaaaatacatactcctgttagccaagaagaaagattgattttcttagactccattaagtccaaatccaaagactctgtgtgggaaaaagaaatagaaatacttatagaggaaaatgaggacctcaaacaacaatgtattcagctaaatgaagagattgaaaagcaaaggaacactttttcatttgctgaaaaaaactttgaagttaactatcaagagttacaagaggagtatgcttgccttctcaaagtaaaagatgatttagaagacagtaaaaataaacaggaattagagtataaaagtaaacttaaagcacttaatgaagagcttcatttgcaaagaataaatccaactacagtgaaaatgaaaagttctgtctttgatgaagacaaaacttttgtagcagaaacattggaaatgggtgaggttgttgaaaaggatacaacagaactcatggaaaaacttgaggtaaccaagcgagagaaattagagctgtcacagagactgtctgatctttctgaacaattgaaacagaaacatggtgagattagttttctaaatgaagaagttaaatctttaaagcaagagaaagaacaagtttcattgagatgtagagagctagaaatcattattaaccacaacagggcagaaaatgtacagtcatgtgatactcaagtaagctctttattagatggagttgtgactatgacaagcaggggtgctgaaggatcagtttctaaagtaaataaaagttttggtgaagaatcaaaaataatggtggaagataaagtttcttttgaaaatatgactgttggagaagaaagtaagcaagaacagttgattttggatcacttaccatctgtaacaaaggaatcatcacttagagcaactcaaccaagtgaaaatgataaacttcagaaagaactcaatgtacttaaatcagaacagaatgatttaaggctacagatggaagcccaacgcatttgcctctctctggtttattcaactcatgtggatcaggttcgtgaatatatggaaaatgaaaaagataaagctctttgcagtcttaaagaagagcttatttttgctcaagaggaaaagatcaaggaacttcagaaaatacaccagttagaactacagactatgaaaacacaagaaacaggtgatgaaggaaagcctttacatctgctcattggaaaacttcaaaaggcagtgtctgaagaatgttcttattttttacagactttatgcagtgtccttggtgaatattatactcctgctttaaaatgtgaagtaaatgcagaagacaaagagaattctggtgattacatttctgaaaatgaagatccagaattacaagattatagatatgaagttcaagactttcaagaaaatatgcacactcttctcaacaaagtaacagaagaatacaacaaactcttggtacttcaaacacgactaagcaagatctggggacagcagacagatggtatgaaacttgaatttggagaagaaaaccttccaaaagaggaaacagagtttttatcaatccattctcagatgaccaatttggaagacattgatgtcaatcataaaagcaagttatcttctctgcaagatcttgaaaaaactaaacttgaagaacaagttcaagaattagaaagcctcatatcctctttgcagcaacagttgaaagaaactgaacaaaactatgaggcagagatccactgtttacagaagaggcttcaagctgttagtgagtccacggttccgccaagcttacctgttgattcggtggtaattacagaatctgatgcacagagaacaatgtaccctggaagttgtgtgaaaaagaatattgatggtacaatagagttttctggtgaatttggagtgaaagaggaaacaaatatcgttaagttgcttgaaaaacaataccaagaacaattagaagaagaagtagctaaggttattgtgtcaatgagtatagcatttgctcaacaaactgaactgtctagaatatctgggggaaaagaaaatactgcatcatcaaagcaagcacatgctgtgtgtcagcaagaacaacattattttaatgaaatgaaattatcacaggatcaaattggttttcagacttttgagacagtggatgtgaaatttaaagaagaatttaaaccacttagtaaagagttaggagaacatggaaaggaaattttattatcaaatagtgatccccatgatataccagaatcaaaggactgtgtgctgactatttcagaagaaatgttctccaaagataaaacatttatagttagacagtctattcatgatgagatttcagtgtcaagcatggatgcttctagacaactaatgttgaatgaagaacagttggaagatatgagacaggaacttgtacgacaataccaagaacatcaacaggcaacggaattgttaaggcaagcacatatgcggcaaatggagagacagcgagaagaccaggaacagctacaagaagagattaagagacttaatagacaattagcccagagatcctccatagataatgaaaacctggtttcagagagagagagggtgcttttagaggagctggaagcactaaagcagctgtctttagctggaagagagaagctgtgttgtgagctgcgcaacagcagtacgcaaacacagaatggaaatgaaaaccaaggagaagttgaagaacaaacatttaaagaaaaggaattagacagaaaacctgaagatgtgcctcctgagattttgtctaatgaaaggtatgcactccagaaagctaataatagacttttgaagatcctcttagaagttgtaaagacaacagcagctgttgaagaaacaattggtcgccatgtccttgggattctagatagatctagtaaaagccagtcatctgccagcctaatttggaggtcagaagcagaggcatctgtaaagtcatgtgtccatgaggaacatacaagagttacagatgaatccattccctcttattctggaagtgatatgccaagaaatgacattaacatgtggtcaaaagtaactgaggaaggaacagagctgtcacaacgacttgtgaggagtggttttgctggaactgaaatagaccctgaaaatgaagaacttatgctgaacattagctctcgactacaagcagcagttgaaaaactcctagaagccataagtgaaactagcagtcagcttgaacatgcgaaagtgacacagacagagttgatgcgtgagtcatttagacagaaacaagaagcaacagagtcccttaagtgccaagaggaacttcgagagcgccttcatgaggagtccagggccagagaacagctagctgtggagctcagtaaggctgagggcgtcattgatggctatgcagatgaaaaaactctttttgaaaggcaaattcaggaaaaaactgatataatagatcgtcttgagcaggagttgttatgtgcaagtaacaggttgcaagaattggaggcagagcaacagcagatccaagaagaaagagaattactgtccagacaaaaggaagctatgaaagcagaggcaggcccagttgaacaacaattactacaggagacagaaaaattaatgaaggaaaaactagaagtacaatgtcaagctgaaaaagtacgtgatgaccttcaaaaacaagtgaaagctctagaaatagatgtggaagaacaagtcagtaggtttatagagctggaacaagaaaaaaatactgaactaatggatttaagacagcaaaaccaagcattggaaaagcagttagaaaaaatgagaaaatttttagatgagcaagccattgacagagaacatgagagagatgtattccaacaggaaatacagaaactagaacagcaacttaaggttgttcctcgattccagcctatcagtgaacatcaaactagagaggttgaacagttagcaaatcatctgaaagaaaaaacagacaaatgcagtgagcttttgctctctaaagagcagcttcaaagggatatacaagaaaggaatgaagaaatagagaaactggagttcagagtaagagaactggagcaggcgcttcttgtgagtgcagatacttttcaaaaggtagaggaccgaaaacactttggagctgtagaagctaaaccagaattgtccctagaagtacaattgcaggctgaacgagatgccatagacagaaaggaaaaagagattacaaacttagaagagcaattagaacagtttagagaagaactggaaaataagaatgaagaagttcaacaattacatatgcaattagaaatacagaaaaaggaatctactacccgcctacaagaacttgaacaggaaaacaaattatttaaggatgacatggagaaactgggacttgccataaaggaatctgatgccatgtctactcaagaccaacatgtgctatttgggaaatttgctcaaataatacaggaaaaagaggtagaaattgaccaattaaatgaacaagttacgaaactccagcagcaacttaaaattacaacagataacaaggttattgaagaaaaaaatgaactgataagggatcttgaaacccaaatagaatgtttgatgagtgatcaagaatgtgtgaagagaaatagagaagaagaaatagagcagctcaatgaagtgattgaaaaacttcaacaggaattggcaaatattggacagaagacatcaatgaatgctcattccctctcagaagaagcagacagtttaaaacatcaattggatgtggttatagctgaaaagctggccttggaacagcaagtagaaaccgctaatgaagaaatgaccttcatgaaaaatgtacttaaagaaaccaattttaaaatgaatcagctaacacaggaattattcagcttaaagagagaacgtgaaagtgtggaaaagattcaaagcataccagagaatagtgttaacgtggctatagatcatctgagcaaagacaaacctgaactagaagtagtccttacagaggatgctcttaaatccctagaaaatcagacatacttcaaatcttttgaagaaaatggcaaaggttccataattaatttggaaacaaggttgctacaacttgagagcactgttagtgcaaaggacttagaacttacccagtgttataaacaaataaaagacatgcaagaacaaggccagtttgaaacagaaatgcttcaaaagaagattgtaaacctacagaaaatagttgaagaaaaagtggctgctgctcttgtcagtcaaatccaacttgaggcagttcaggaatatgcaaaattctgtcaagataatcaaacaatttcatcagaacctgaaagaacaaatattcagaatttaaatcaactaagagaagatgagttggggtcagatatatcagcattaaccttgagaatatcagaattagaaagccaggttgttgaaatgcatactagtttgattttagaaaaagaacaagtagaaattgcagaaaaaaatgttttagaaaaagaaaagaagctgctagaactacagaagctattggagggcaatgagaaaaaacagagagagaaagaaaagaaaagaagccctcaagatgttgaagttctcaagacaactactgagctatttcatagcaatgaagaaagtggattttttaatgaactcgaggctcttagagctgaatcagtggctaccaaagcagaacttgccagttataaagaaaaggctgaaaaacttcaagaagagcttttggtaaaagaaacaaatatgacatctcttcagaaagacttaagccaagttagggatcacctcgcagaggcaaaagagaaattgtccattttagaaaaagaagatgagactgaggtacaagaaagcaaaaaggcctgcatgtttgagccacttcctataaaactgagtaagagcattgcatcccagacagatgggactctgaagatcagtagcagcaatcagactccacaaattcttgttaaaaatgcaggaatacaaattaatttacagagtgaatgttcctcagaagaagttactgaaataatcagtcagtttactgaaaaaattgagaagatgcaagaactacatgctgctgaaattttggacatggaatccagacatatttcagaaactgaaaccttaaagagggaacactatgttgccgttcagttactgaaagaggaatgtggtaccttgaaggcagtgatacagtgtctgagaagtaaagagggatcctcaattcctgagctagcacattctgatgcttaccagactagagaaatatgctccagtgattctggatcagactggggtcagggaatttatcttacacacagtcagggatttgacatagcatcagaaggccgaggagaagaaagtgaaagtgcaacagattcctttccaaagaaaataaagggattactgagagctgtccataatgaaggcatgcaggtgctttctctcactgagtctccctatagtgatggagaggaccattctattcagcaggtttcagaatcttggctagaagagagaaaagcttacatcaatacaatctcatctctaaaggatttaattacaaagatgcaactgcaaagagaagccgaggtttatgatagttctcaatctcatgagagcttctcagactggcgaggtgaactactgcttgcccttcaacaagttttcttagaagagcgtagtgttttactagcagcatttcggacggagctgacagctctaggtactacagatgcagttggtttactaaactgtttggaacagagaatacaagaacagggtgttgaatatcaagcagctatggaatgcctccagaaagcagatagaaggagtttgttatctgaaattcaggcactgcatgcacaaatgaatggtaggaaaattactctgaaaagagaacaagagagtgagaaaccaagccaagaactcttggaatataatatacagcagaagcagtctcaaatgctggagatgcaagtggagctcagcagtatgaaagacagagcaacggaactgcaggagcagctgagttctgagaaaatggtggttgctgaactgaagagtgagcttgcacaaactaaattggaactagaaacaacactcaaggcacagcataaacacctaaaagaattggaggctttcaggttggaagttaaagataagacagatgaagtacatttgcttaatgacacattagcaagtgaacagaaaaaatcaagagagctccagtgggctttggagaaagagaaagccaagttgggacgcagtgaagaacgggataaagaagaacttgaggatctgaagttttcacttgagagtcagaaacaaaggaatcttcagctaaatctacttttggaacaacagaaacaactactgaacgaatcccagcaaaaaatagaatcacagagaatgctatatgatgcccagttgtcagaagaacaaggtcgaaacttagagcttcaggtacttcttgaatctgagaaagttcgaattcgggaaatgagtagtaccctagatagggagcgggaattgcacgcacagctgcagagcagtgatggtactggacagtctcggccacccttgccctcagaggacctactgaaagagctgcagaaacagctagaggaaaaacacagtcgcatagtagaattgttaaatgagactgaaaaatataaactggattctttgcaaacacgacagcaaatggaaaaagataggcaggttcacaggaaaacactgcagacagaacaggaggccaacactgagggacagaaaaaaatgcatgagctccagtccaaagtggaagatcttcagcgccagctggaagagaaaagacaacaagtttataagttagaccttgaaggacagcgactacaaggaatcatgcaggaattccagaagcaagaactagaacgagaagaaaaacgagaaagtagaagaattctgtatcagaaccttaatgagccaaccacgtggagcttaaccagtgatagaactagaaattgggttcttcaacagaaaatagaaggagaaacaaaagaatcaaactacgctaaattgattgaaatgaatggaggaggaaccggctgtaatcatgaattagaaatgatcagacaaaagcttcaatgtgtagcttcaaaactacaggttctaccccagaaagcctctgagagactacagtttgaaacagcagatgatgaagatttcatttgggttcaggaaaatattgatgaaattattttacaactacagaaattaactggccagcaaggtgaagagcccagcttggtgtccccaagtacttcttgtggctcattgactgaaagactactgagacaaaatgctgagctgacagggcatatcagtcaactgactgaagagaagaatgacttaaggaacatggttatgaagctggaagagcagatcaggtggtatcgacagacaggagctggtagagataattcttccaggttttcattgaatggtggtgccaacattgaagccatcattgcctctgaaaaagaagtatggaacagagaaaaattgactctccagaaatctttgaaaagggcagaggctgaagtatacaaactgaaagctgaactaagaaatgactctttacttcaaactctgagccctgattctgaacatgtcactttaaagagaatttatggtaaatacttgagggcagaaagttttcgaaaggctctcatttaccagaagaaatacctgctgctgttactgggtgggttccaggaatgtgaagatgccaccttggccctgcttgcccggatgggggggcagccagctttcacggatctagaggtgatcaccaatcgcccaaagggcttcaccaggtttcggtcggccgtcagagtatccattgcaatttccagaatgaaatttttggttcgacggtggcatcgagtcacaggttctgtttccatcaatattaacagagatggctttggactgaatcaaggtgcagaaaagactgactcattttatcattcttctggtgggctggagttatatggagaaccaagacatactacgtatcgctcaagatcagatctggactatattaggtcccctttaccatttcagaataggtacccaggcactccagctgatttcaatcctggttctttagcatgttctcagcttcagaattacgatcctgacagagccctaacagattatatcactcggctagaggcactgcaaagacgacttggaactatacagtcaggttcaactactcaatttcatgctggcatgagaagataatcctttgaaacatcattaattgaagtgattttaaatagatttccttttgtaaatcaatggttcttttgtgcttttgtattgtgaatattcaatgggaccaatatgaacacagcttatgattgtatacaaatcccttgccagcacatgaaaacaaactggaatttgtatatataagcattgtgtatgtattcatgcacaataattattgaattacctgtatatttgtggaatgctaatttaaaacattaaattataaaccttgtgtatttatcaaatgggtgaaaagattaaacttttacgcattacaatactgctgaatgtgtagctcgaggtgtcctgcacttttcttataaggctactgaagttacatgttttgcctaatatattctactggtgatgaagacagataatatcacttgtagagacctatttttgtataatggtagaagttttgagggggagggggtgttttttcttttttttttgttttttttttttttcctaatacaaagaccccccc

SEQ ID NO: 293070 - DNA, 10682 bp, Homo sapiens
gaagatggcggcggcggcggcggtgacggcgcttcccgtgcggctgaggacgatccgccagtgagcgcggagactgcttccacttcgggcgggggagcgccggaccgaatcggctctctaggccgtggagcttgccgtcccacctccgtccaaatcgacctttcctttctatccccaaccacccctcaacccctgttttcccctgccttccttgcagaggccatggaggacgaggagagacagaagaagctggaggccggcaaagccaagcttgcccagtttcgacaaagaaaagctcagtcggatgggcagagtccttccaagaagcagaaaaaaaagagaaaaacgtcaagcagtaaacatgatgtgtcagcacaccatgatttgaatattgatcaatcacagtgtaatgaaatgtacataaatagttctcagagagtagaatcaactgtgattcctgaatctacaataatgagaactctacatagtggagaaataaccagtcatgagcagggcttctctgtggaactggaaagtgaaatttcaaccacagcagatgactgcagttcagaggtaaatggttgcagttttgtgatgagaacaggaaagcctacaaatttattaagggaagaagaatttggtgttgatgattcttattctgaacaaggagcacaagacagtccgactcatctagagatgatggaaagtgagttggctgggaagcagcatgagattgaagagctaaacagagagctggaagaaatgagggttacctatgggactgaaggactgcagcagttacaagaatttgaagctgccattaaacaaagagatggcattataacccagctcactgctaatttacaacaagcaagaagagaaaaggatgagacaatgagagaatttttagagttgacagaacagagtcaaaaattacagattcaatttcagcaattacaggctagtgaaactctgagaaacagcactcatagtagcacagctgcagacttactacaagccaaacaacagatcctcactcatcaacagcagcttgaagaacaagaccacttattagaagattatcagaaaaagaaagaagacttcacaatgcaaattagtttcttgcaagagaaaattaaagtatatgaaatggaacaagataaaaaagtagaaaactcaaataaagaagaaatacaggaaaaggagacaatcattgaagaattaaacacaaaaataatagaagaagaaaagaaaactcttgagctaaaggataaattaacaactgctgataaattactaggagaattacaagaacagattgtgcaaaagaaccaagaaataaaaaacatgaaattagagctgactaattctaagcaaaaagaaagacagtcttctgaagaaataaaacagttaatggggacagtcgaagaacttcagaagagaaatcataaagacagccagttcgaaactgatatagtacaacgaatggaacaagaaacacaaagaaagttagaacaactccgggcagagctggatgagatgtatgggcagcagatagtgcaaatgaaacaagaattaataagacaacacatggcacagatggaggaaattaaaacacggcataagggagaaatggagaatgctttaaggtcatattcaaatattacagttaatgaagatcagataaagttaatgaatgtggcaataaatgaactgaatataaaattgcaagatactaactctcaaaaggaaaaactcaaggaagaactaggactaattttagaagaaaagtgtgctctacagagacagcttgaagaccttgttgaagaattgagcttttcaagggaacagattcagagagctagacagacaatagctgaacaagaaagtaaacttaatgaagcacataagtcccttagtacagtggaagatttgaaagctgagattgtttctgcatctgaatccagaaaggaactagaattaaaacatgaagcagaagttacaaattacaagataaaacttgaaatgttagaaaaagaaaagaatgctgtgttagacagaatggctgaatcacaagaagctgaattagagaggctgagaacacagcttctatttagtcacgaagaagagctttccaaactgaaggaagatttagaaattgaacatcgaataaatattgaaaaacttaaagataatttaggcattcactataaacagcagatagatggtttacagaatgaaatgagtcaaaagatagaaaccatgcagtttgaaaaggacaatttgataactaagcagaatcaattaattttggaaatttcaaagctaaaagatttacagcagtctcttgtaaattcaaagtcagaagaaatgactcttcaaatcaatgaacttcaaaaagaaattgaaatactcagacaagaagaaaaagaaaagggtacacttgaacaagaagttcaagaattacaacttaaaacagaattgttagaaaaacagatgaaggaaaaagagaatgatcttcaagaaaaatttgcacaacttgaagcagagaatagcattcttaaagatgaaaagaaaacccttgaagacatgttgaaaatacatactcctgttagccaagaagaaagattgattttcttagactccattaagtccaaatccaaagactctgtgtgggaaaaagaaatagaaatacttatagaggaaaatgaggacctcaaacaacaatgtattcagctaaatgaagagattgaaaagcaaaggaacactttttcatttgctgaaaaaaactttgaagttaactatcaagagttacaagaggagtatgcttgccttctcaaagtaaaagatgatttagaagacagtaaaaataaacaggaattagagtataaaagtaaacttaaagcacttaatgaagagcttcatttgcaaagaataaatccaactacagtgaaaatgaaaagttctgtctttgatgaagacaaaacttttgtagcagaaacattggaaatgggtgaggttgttgaaaaggatacaacagaactcatggaaaaacttgaggtaaccaagcgagagaaattagagctgtcacagagactgtctgatctttctgaacaattgaaacagaaacatggtgagattagttttctaaatgaagaagttaaatctttaaagcaagagaaagaacaagtttcattgagatgtagagagctagaaatcattattaaccacaacagggcagaaaatgtacagtcatgtgatactcaagtaagctctttattagatggagttgtgactatgacaagcaggggtgctgaaggatcagtttctaaagtaaataaaagttttggtgaagaatcaaaaataatggtggaagataaagtttcttttgaaaatatgactgttggagaagaaagtaagcaagaacagttgattttggatcacttaccatctgtaacaaaggaatcatcacttagagcaactcaaccaagtgaaaatgataaacttcagaaagaactcaatgtacttaaatcagaacagaatgatttaaggctacagatggaagcccaacgcatttgcctctctctggtttattcaactcatgtggatcaggttcgtgaatatatggaaaatgaaaaagataaagctctttgcagtcttaaagaagagcttatttttgctcaagaggaaaagatcaaggaacttcagaaaatacaccagttagaactacagactatgaaaacacaagaaacaggtgatgaaggaaagcctttacatctgctcattggaaaacttcaaaaggcagtgtctgaagaatgttcttattttttacagactttatgcagtgtccttggtgaatattatactcctgctttaaaatgtgaagtaaatgcagaagacaaagagaattctggtgattacatttctgaaaatgaagatccagaattacaagattatagatatgaagttcaagactttcaagaaaatatgcacactcttctcaacaaagtaacagaagaatacaacaaactcttggtacttcaaacacgactaagcaagatctggggacagcagacagatggtatgaaacttgaatttggagaagaaaaccttccaaaagaggaaacagagtttttatcaatccattctcagatgaccaatttggaagacattgatgtcaatcataaaagcaagttatcttctctgcaagatcttgaaaaaactaaacttgaagaacaagttcaagaattagaaagcctcatatcctctttgcagcaacagttgaaagaaactgaacaaaactatgaggcagagatccactgtttacagaagaggcttcaagctgttagtgagtccacggttccgccaagcttacctgttgattcggtggtaattacagaatctgatgcacagagaacaatgtaccctggaagttgtgtgaaaaagaatattgatggtacaatagagttttctggtgaatttggagtgaaagaggaaacaaatatcgttaagttgcttgaaaaacaataccaagaacaattagaagaagaagtagctaaggttattgtgtcaatgagtatagcatttgctcaacaaactgaactgtctagaatatctgggggaaaagaaaatactgcatcatcaaagcaagcacatgctgtgtgtcagcaagaacaacattattttaatgaaatgaaattatcacaggatcaaattggttttcagacttttgagacagtggatgtgaaatttaaagaagaatttaaaccacttagtaaagagttaggagaacatggaaaggaaattttattatcaaatagtgatccccatgatataccagaatcaaaggactgtgtgctgactatttcagaagaaatgttctccaaagataaaacatttatagttagacagtctattcatgatgagatttcagtgtcaagcatggatgcttctagacaactaatgttgaatgaagaacagttggaagatatgagacaggaacttgtacgacaataccaagaacatcaacaggcaacggaattgttaaggcaagcacatatgcggcaaatggagagacagcgagaagaccaggaacagctacaagaagagattaagagacttaatagacaattagcccagagatcctccatagataatgaaaacctggtttcagagagagagagggtgcttttagaggagctggaagcactaaagcagctgtctttagctggaagagagaagctgtgttgtgagctgcgcaacagcagtacgcaaacacagaatggaaatgaaaaccaaggagaagttgaagaacaaacatttaaagaaaaggaattagacagaaaacctgaagatgtgcctcctgagattttgtctaatgaaaggtatgcactccagaaagctaataatagacttttgaagatcctcttagaagttgtaaagacaacagcagctgttgaagaaacaattggtcgccatgtccttgggattctagatagatctagtaaaagccagtcatctgccagcctaatttggaggtcagaagcagaggcatctgtaaagtcatgtgtccatgaggaacatacaagagttacagatgaatccattccctcttattctggaagtgatatgccaagaaatgacattaacatgtggtcaaaagtaactgaggaaggaacagagctgtcacaacgacttgtgaggagtggttttgctggaactgaaatagaccctgaaaatgaagaacttatgctgaacattagctctcgactacaagcagcagttgaaaaactcctagaagccataagtgaaactagcagtcagcttgaacatgcgaaagtgacacagacagagttgatgcgtgagtcatttagacagaaacaagaagcaacagagtcccttaagtgccaagaggaacttcgagagcgccttcatgaggagtccagggccagagaacagctagctgtggagctcagtaaggctgagggcgtcattgatggctatgcagatgaaaaaactctttttgaaaggcaaattcaggaaaaaactgatataatagatcgtcttgagcaggagttgttatgtgcaagtaacaggttgcaagaattggaggcagagcaacagcagatccaagaagaaagagaattactgtccagacaaaaggaagctatgaaagcagaggcaggcccagttgaacaacaattactacaggagacagaaaaattaatgaaggaaaaactagaagtacaatgtcaagctgaaaaagtacgtgatgaccttcaaaaacaagtgaaagctctagaaatagatgtggaagaacaagtcagtaggtttatagagctggaacaagaaaaaaatactgaactaatggatttaagacagcaaaaccaagcattggaaaagcagttagaaaaaatgagaaaatttttagatgagcaagccattgacagagaacatgagagagatgtattccaacaggaaatacagaaactagaacagcaacttaaggttgttcctcgattccagcctatcagtgaacatcaaactagagaggttgaacagttagcaaatcatctgaaagaaaaaacagacaaatgcagtgagcttttgctctctaaagagcagcttcaaagggatatacaagaaaggaatgaagaaatagagaaactggagttcagagtaagagaactggagcaggcgcttcttgtgagtgcagatacttttcaaaaggtagaggaccgaaaacactttggagctgtagaagctaaaccagaattgtccctagaagtacaattgcaggctgaacgagatgccatagacagaaaggaaaaagagattacaaacttagaagagcaattagaacagtttagagaagaactggaaaataagaatgaagaagttcaacaattacatatgcaattagaaatacagaaaaaggaatctactacccgcctacaagaacttgaacaggaaaacaaattatttaaggatgacatggagaaactgggacttgccataaaggaatctgatgccatgtctactcaagaccaacatgtgctatttgggaaatttgctcaaataatacaggaaaaagaggtagaaattgaccaattaaatgaacaagttacgaaactccagcagcaacttaaaattacaacagataacaaggttattgaagaaaaaaatgaactgataagggatcttgaaacccaaatagaatgtttgatgagtgatcaagaatgtgtgaagagaaatagagaagaagaaatagagcagctcaatgaagtgattgaaaaacttcaacaggaattggcaaatattggacagaagacatcaatgaatgctcattccctctcagaagaagcagacagtttaaaacatcaattggatgtggttatagctgaaaagctggccttggaacagcaagtagaaaccgctaatgaagaaatgaccttcatgaaaaatgtacttaaagaaaccaattttaaaatgaatcagctaacacaggaattattcagcttaaagagagaacgtgaaagtgtggaaaagattcaaagcataccagagaatagtgttaacgtggctatagatcatctgagcaaagacaaacctgaactagaagtagtccttacagaggatgctcttaaatccctagaaaatcagacatacttcaaatcttttgaagaaaatggcaaaggttccataattaatttggaaacaaggttgctacaacttgagagcactgttagtgcaaaggacttagaacttacccagtgttataaacaaataaaagacatgcaagaacaaggccagtttgaaacagaaatgcttcaaaagaagattgtaaacctacagaaaatagttgaagaaaaagtggctgctgctcttgtcagtcaaatccaacttgaggcagttcaggaatatgcaaaattctgtcaagataatcaaacaatttcatcagaacctgaaagaacaaatattcagaatttaaatcaactaagagaagatgagttggggtcagatatatcagcattaaccttgagaatatcagaattagaaagccaggttgttgaaatgcatactagtttgattttagaaaaagaacaagtagaaattgcagaaaaaaatgttttagaaaaagaaaagaagctgctagaactacagaagctattggagggcaatgagaaaaaacagagagagaaagaaaagaaaagaagccctcaagatgttgaagttctcaagacaactactgagctatttcatagcaatgaagaaagtggattttttaatgaactcgaggctcttagagctgaatcagtggctaccaaagcagaacttgccagttataaagaaaaggctgaaaaacttcaagaagagcttttggtaaaagaaacaaatatgacatctcttcagaaagacttaagccaagttagggatcacctcgcagaggcaaaagagaaattgtccattttagaaaaagaagatgagactgaggtacaagaaagcaaaaaggcctgcatgtttgagccacttcctataaaactgagtaagagcattgcatcccagacagatgggactctgaagatcagtagcagcaatcagactccacaaattcttgttaaaaatgcaggaatacaaattaatttacagagtgaatgttcctcagaagaagttactgaaataatcagtcagtttactgaaaaaattgagaagatgcaagaactacatgctgctgaaattttggacatggaatccagacatatttcagaaactgaaaccttaaagagggaacactatgttgccgttcagttactgaaagaggaatgtggtaccttgaaggcagtgatacagtgtctgagaagtaaagagggatcctcaattcctgagctagcacattctgatgcttaccagactagagaaatatgctccagtgattctggatcagactggggtcagggaatttatcttacacacagtcagggatttgacatagcatcagaaggccgaggagaagaaagtgaaagtgcaacagattcctttccaaagaaaataaagggattactgagagctgtccataatgaaggcatgcaggtgctttctctcactgagtctccctatagtgatggagaggaccattctattcagcaggtttcagaatcttggctagaagagagaaaagcttacatcaatacaatctcatctctaaaggatttaattacaaagatgcaactgcaaagagaagccgaggtttatgatagttctcaatctcatgagagcttctcagactggcgaggtgaactactgcttgcccttcaacaagttttcttagaagagcgtagtgttttactagcagcatttcggacggagctgacagctctaggtactacagatgcagttggtttactaaactgtttggaacagagaatacaagaacagggtgttgaatatcaagcagctatggaatgcctccagaaagcagatagaaggagtttgttatctgaaattcaggcactgcatgcacaaatgaatggtaggaaaattactctgaaaagagaacaagagagtgagaaaccaagccaaggtatgttgtatgacaagctcatatggttacacaaacaggtgaaaagatttcactttgttttctttcttattattattaagttaaaacatattttcttggtcacattttcttctcattctcataatgttaaggatacaatctatattaattactctaggggttagaggattgtctaattggtttaaacagctacgttgactttaaaataaactgccattcccctgataaggttaagcccattggattcattctttttctttattttagagctgtatgttaagaaaacagtctttccaatcataaaacagaaaatactctttagaggaaaatccacaatgcatgtaactaattattttttaatccttttttaaaaaaattgtgagccataacatacagaaaattacaaattgcaaatatgcagtatgacgcatttttaaatgagtatctatggaaacatcacccatgtgaatatagccagtatcccaacagccccttctcccaagcacatgctcctctgagtaacttagaggtaatcattgttctgatttttctttagttttactatctatttatatattcctaaaacatttaagtttcaagtttttttctgtttttgaactttatcaatctgtatgtattttttatcttgtttctttcacctctctgtaacattcttccaacattcttccaagttactgcatttttcaagttactgcattcttccaaattagtagtagaacattcttccaagttactgcatttatctctagttcattcattcttgttactctataactctatgaccctgtgtagggccaggcacggtggcttacacctgtaatcccagcactttgggaggctgacgtgggtggatcacgaggtcagaagttcaagatgagcctagccaaaatggtgaaacccagtctctactaaaaatacaaaaattagccaggcgtggtggcgggtgcctgtaaggccagccactcaggagactgaagcagagaattacttgaacccagaaggtggaggttgcagtgagctgaaatcacaccactgcactctagcctgagcgacagagcaagactccatctcaaaaaaaaaa

SEQ ID NO: 293071 - DNA, 12458 bp, Homo sapiens
gaagatggcggcggcggcggcggtgacggcgcttcccgtgcggctgaggacgatccgccagtgagcgcggagactgcttccacttcgggcgggggagcgccggaccgaatcggctctctaggccgtggagcttgccgtcccacctccgtccaaatcgacctttcctttctatccccaaccacccctcaacccctgttttcccctgccttccttgcagaggccatggaggacgaggagagacagaagaagctggaggccggcaaagccaagcttgcccagtttcgacaaagaaaagctcagtcggatgggcagagtccttccaagaagcagaaaaaaaagagaaaaacgtcaagcagtaaacatgatgtgtcagcacaccatgatttgaatattgatcaatcacagtgtaatgaaatgtacataaatagttctcagagagtagaatcaactgtgattcctgaatctacaataatgagaactctacatagtggagaaataaccagtcatgagcagggcttctctgtggaactggaaagtgaaatttcaaccacagcagatgactgcagttcagaggtaaatggttgcagttttgtgatgagaacaggaaagcctacaaatttattaagggaagaagaatttggtgttgatgattcttattctgaacaaggagcacaagacagtccgactcatctagagatgatggaaagtgagttggctgggaagcagcatgagattgaagagctaaacagagagctggaagaaatgagggttacctatgggactgaaggactgcagcagttacaagaatttgaagctgccattaaacaaagagatggcattataacccagctcactgctaatttacaacaagcaagaagagaaaaggatgagacaatgagagaatttttagagttgacagaacagagtcaaaaattacagattcaatttcagcaattacaggctagtgaaactctgagaaacagcactcatagtagcacagctgcagacttactacaagccaaacaacagatcctcactcatcaacagcagcttgaagaacaagaccacttattagaagattatcagaaaaagaaagaagacttcacaatgcaaattagtttcttgcaagagaaaattaaagtatatgaaatggaacaagataaaaaagtagaaaactcaaataaagaagaaatacaggaaaaggagacaatcattgaagaattaaacacaaaaataatagaagaagaaaagaaaactcttgagctaaaggataaattaacaactgctgataaattactaggagaattacaagaacagattgtgcaaaagaaccaagaaataaaaaacatgaaattagagctgactaattctaagcaaaaagaaagacagtcttctgaagaaataaaacagttaatggggacagtcgaagaacttcagaagagaaatcataaagacagccagttcgaaactgatatagtacaacgaatggaacaagaaacacaaagaaagttagaacaactccgggcagagctggatgagatgtatgggcagcagatagtgcaaatgaaacaagaattaataagacaacacatggcacagatggaggaaattaaaacacggcataagggagaaatggagaatgctttaaggtcatattcaaatattacagttaatgaagatcagataaagttaatgaatgtggcaataaatgaactgaatataaaattgcaagatactaactctcaaaaggaaaaactcaaggaagaactaggactaattttagaagaaaagtgtgctctacagagacagcttgaagaccttgttgaagaattgagcttttcaagggaacagattcagagagctagacagacaatagctgaacaagaaagtaaacttaatgaagcacataagtcccttagtacagtggaagatttgaaagctgagattgtttctgcatctgaatccagaaaggaactagaattaaaacatgaagcagaagttacaaattacaagataaaacttgaaatgttagaaaaagaaaagaatgctgtgttagacagaatggctgaatcacaagaagctgaattagagaggctgagaacacagcttctatttagtcacgaagaagagctttccaaactgaaggaagatttagaaattgaacatcgaataaatattgaaaaacttaaagataatttaggcattcactataaacagcagatagatggtttacagaatgaaatgagtcaaaagatagaaaccatgcagtttgaaaaggacaatttgataactaagcagaatcaattaattttggaaatttcaaagctaaaagatttacagcagtctcttgtaaattcaaagtcagaagaaatgactcttcaaatcaatgaacttcaaaaagaaattgaaatactcagacaagaagaaaaagaaaagggtacacttgaacaagaagttcaagaattacaacttaaaacagaattgttagaaaaacagatgaaggaaaaagagaatgatcttcaagaaaaatttgcacaacttgaagcagagaatagcattcttaaagatgaaaagaaaacccttgaagacatgttgaaaatacatactcctgttagccaagaagaaagattgattttcttagactccattaagtccaaatccaaagactctgtgtgggaaaaagaaatagaaatacttatagaggaaaatgaggacctcaaacaacaatgtattcagctaaatgaagagattgaaaagcaaaggaacactttttcatttgctgaaaaaaactttgaagttaactatcaagagttacaagaggagtatgcttgccttctcaaagtaaaagatgatttagaagacagtaaaaataaacaggaattagagtataaaagtaaacttaaagcacttaatgaagagcttcatttgcaaagaataaatccaactacagtgaaaatgaaaagttctgtctttgatgaagacaaaacttttgtagcagaaacattggaaatgggtgaggttgttgaaaaggatacaacagaactcatggaaaaacttgaggtaaccaagcgagagaaattagagctgtcacagagactgtctgatctttctgaacaattgaaacagaaacatggtgagattagttttctaaatgaagaagttaaatctttaaagcaagagaaagaacaagtttcattgagatgtagagagctagaaatcattattaaccacaacagggcagaaaatgtacagtcatgtgatactcaagtaagctctttattagatggagttgtgactatgacaagcaggggtgctgaaggatcagtttctaaagtaaataaaagttttggtgaagaatcaaaaataatggtggaagataaagtttcttttgaaaatatgactgttggagaagaaagtaagcaagaacagttgattttggatcacttaccatctgtaacaaaggaatcatcacttagagcaactcaaccaagtgaaaatgataaacttcagaaagaactcaatgtacttaaatcagaacagaatgatttaaggctacagatggaagcccaacgcatttgcctctctctggtttattcaactcatgtggatcaggttcgtgaatatatggaaaatgaaaaagataaagctctttgcagtcttaaagaagagcttatttttgctcaagaggaaaagatcaaggaacttcagaaaatacaccagttagaactacagactatgaaaacacaagaaacaggtgatgaaggaaagcctttacatctgctcattggaaaacttcaaaaggcagtgtctgaagaatgttcttattttttacagactttatgcagtgtccttggtgaatattatactcctgctttaaaatgtgaagtaaatgcagaagacaaagagaattctggtgattacatttctgaaaatgaagatccagaattacaagattatagatatgaagttcaagactttcaagaaaatatgcacactcttctcaacaaagtaacagaagaatacaacaaactcttggtacttcaaacacgactaagcaagatctggggacagcagacagatggtatgaaacttgaatttggagaagaaaaccttccaaaagaggaaacagagtttttatcaatccattctcagatgaccaatttggaagacattgatgtcaatcataaaagcaagttatcttctctgcaagatcttgaaaaaactaaacttgaagaacaagttcaagaattagaaagcctcatatcctctttgcagcaacagttgaaagaaactgaacaaaactatgaggcagagatccactgtttacagaagaggcttcaagctgttagtgagtccacggttccgccaagcttacctgttgattcggtggtaattacagaatctgatgcacagagaacaatgtaccctggaagttgtgtgaaaaagaatattgatggtacaatagagttttctggtgaatttggagtgaaagaggaaacaaatatcgttaagttgcttgaaaaacaataccaagaacaattagaagaagaagtagctaaggttattgtgtcaatgagtatagcatttgctcaacaaactgaactgtctagaatatctgggggaaaagaaaatactgcatcatcaaagcaagcacatgctgtgtgtcagcaagaacaacattattttaatgaaatgaaattatcacaggatcaaattggttttcagacttttgagacagtggatgtgaaatttaaagaagaatttaaaccacttagtaaagagttaggagaacatggaaaggaaattttattatcaaatagtgatccccatgatataccagaatcaaaggactgtgtgctgactatttcagaagaaatgttctccaaagataaaacatttatagttagacagtctattcatgatgagatttcagtgtcaagcatggatgcttctagacaactaatgttgaatgaagaacagttggaagatatgagacaggaacttgtacgacaataccaagaacatcaacaggcaacggaattgttaaggcaagcacatatgcggcaaatggagagacagcgagaagaccaggaacagctacaagaagagattaagagacttaatagacaattagcccagagatcctccatagataatgaaaacctggtttcagagagagagagggtgcttttagaggagctggaagcactaaagcagctgtctttagctggaagagagaagctgtgttgtgagctgcgcaacagcagtacgcaaacacagaatggaaatgaaaaccaaggagaagttgaagaacaaacatttaaagaaaaggaattagacagaaaacctgaagatgtgcctcctgagattttgtctaatgaaaggtatgcactccagaaagctaataatagacttttgaagatcctcttagaagttgtaaagacaacagcagctgttgaagaaacaattggtcgccatgtccttgggattctagatagatctagtaaaagccagtcatctgccagcctaatttggaggtcagaagcagaggcatctgtaaagtcatgtgtccatgaggaacatacaagagttacagatgaatccattccctcttattctggaagtgatatgccaagaaatgacattaacatgtggtcaaaagtaactgaggaaggaacagagctgtcacaacgacttgtgaggagtggttttgctggaactgaaatagaccctgaaaatgaagaacttatgctgaacattagctctcgactacaagcagcagttgaaaaactcctagaagccataagtgaaactagcagtcagcttgaacatgcgaaagtgacacagacagagttgatgcgtgagtcatttagacagaaacaagaagcaacagagtcccttaagtgccaagaggaacttcgagagcgccttcatgaggagtccagggccagagaacagctagctgtggagctcagtaaggctgagggcgtcattgatggctatgcagatgaaaaaactctttttgaaaggcaaattcaggaaaaaactgatataatagatcgtcttgagcaggagttgttatgtgcaagtaacaggttgcaagaattggaggcagagcaacagcagatccaagaagaaagagaattactgtccagacaaaaggaagctatgaaagcagaggcaggcccagttgaacaacaattactacaggagacagaaaaattaatgaaggaaaaactagaagtacaatgtcaagctgaaaaagtacgtgatgaccttcaaaaacaagtgaaagctctagaaatagatgtggaagaacaagtcagtaggtttatagagctggaacaagaaaaaaatactgaactaatggatttaagacagcaaaaccaagcattggaaaagcagttagaaaaaatgagaaaatttttagatgagcaagccattgacagagaacatgagagagatgtattccaacaggaaatacagaaactagaacagcaacttaaggttgttcctcgattccagcctatcagtgaacatcaaactagagaggttgaacagttagcaaatcatctgaaagaaaaaacagacaaatgcagtgagcttttgctctctaaagagcagcttcaaagggatatacaagaaaggaatgaagaaatagagaaactggagttcagagtaagagaactggagcaggcgcttcttgtgagtgcagatacttttcaaaaggtagaggaccgaaaacactttggagctgtagaagctaaaccagaattgtccctagaagtacaattgcaggctgaacgagatgccatagacagaaaggaaaaagagattacaaacttagaagagcaattagaacagtttagagaagaactggaaaataagaatgaagaagttcaacaattacatatgcaattagaaatacagaaaaaggaatctactacccgcctacaagaacttgaacaggaaaacaaattatttaaggatgacatggagaaactgggacttgccataaaggaatctgatgccatgtctactcaagaccaacatgtgctatttgggaaatttgctcaaataatacaggaaaaagaggtagaaattgaccaattaaatgaacaagttacgaaactccagcagcaacttaaaattacaacagataacaaggttattgaagaaaaaaatgaactgataagggatcttgaaacccaaatagaatgtttgatgagtgatcaagaatgtgtgaagagaaatagagaagaagaaatagagcagctcaatgaagtgattgaaaaacttcaacaggaattggcaaatattggacagaagacatcaatgaatgctcattccctctcagaagaagcagacagtttaaaacatcaattggatgtggttatagctgaaaagctggccttggaacagcaagtagaaaccgctaatgaagaaatgaccttcatgaaaaatgtacttaaagaaaccaattttaaaatgaatcagctaacacaggaattattcagcttaaagagagaacgtgaaagtgtggaaaagattcaaagcataccagagaatagtgttaacgtggctatagatcatctgagcaaagacaaacctgaactagaagtagtccttacagaggatgctcttaaatccctagaaaatcagacatacttcaaatcttttgaagaaaatggcaaaggttccataattaatttggaaacaaggttgctacaacttgagagcactgttagtgcaaaggacttagaacttacccagtgttataaacaaataaaagacatgcaagaacaaggccagtttgaaacagaaatgcttcaaaagaagattgtaaacctacagaaaatagttgaagaaaaagtggctgctgctcttgtcagtcaaatccaacttgaggcagttcaggaatatgcaaaattctgtcaagataatcaaacaatttcatcagaacctgaaagaacaaatattcagaatttaaatcaactaagagaagatgagttggggtcagatatatcagcattaaccttgagaatatcagaattagaaagccaggttgttgaaatgcatactagtttgattttagaaaaagaacaagtagaaattgcagaaaaaaatgttttagaaaaagaaaagaagctgctagaactacagaagctattggagggcaatgagaaaaaacagagagagaaagaaaagaaaagaagccctcaagatgttgaagttctcaagacaactactgagctatttcatagcaatgaagaaagtggattttttaatgaactcgaggctcttagagctgaatcagtggctaccaaagcagaacttgccagttataaagaaaaggctgaaaaacttcaagaagagcttttggtaaaagaaacaaatatgacatctcttcagaaagacttaagccaagttagggatcacctcgcagaggcaaaagagaaattgtccattttagaaaaagaagatgagactgaggtacaagaaagcaaaaaggcctgcatgtttgagccacttcctataaaactgagtaagagcattgcatcccagacagatgggactctgaagatcagtagcagcaatcagactccacaaattcttgttaaaaatgcaggaatacaaattaatttacagagtgaatgttcctcagaagaagttactgaaataatcagtcagtttactgaaaaaattgagaagatgcaagaactacatgctgctgaaattttggacatggaatccagacatatttcagaaactgaaaccttaaagagggaacactatgttgccgttcagttactgaaagaggaatgtggtaccttgaaggcagtgatacagtgtctgagaagtaaagagggatcctcaattcctgagctagcacattctgatgcttaccagactagagaaatatgctccagtgattctggatcagactggggtcagggaatttatcttacacacagtcagggatttgacatagcatcagaaggccgaggagaagaaagtgaaagtgcaacagattcctttccaaagaaaataaagggattactgagagctgtccataatgaaggcatgcaggtgctttctctcactgagtctccctatagtgatggagaggaccattctattcagcaggtttcagaatcttggctagaagagagaaaagcttacatcaatacaatctcatctctaaaggatttaattacaaagatgcaactgcaaagagaagccgaggtttatgatagttctcaatctcatgagagcttctcagactggcgaggtgaactactgcttgcccttcaacaagttttcttagaagagcgtagtgttttactagcagcatttcggacggagctgacagctctaggtactacagatgcagttggtttactaaactgtttggaacagagaatacaagaacagggtgttgaatatcaagcagctatggaatgcctccagaaagcagatagaaggagtttgttatctgaaattcaggcactgcatgcacaaatgaatggtaggaaaattactctgaaaagagaacaagagagtgagaaaccaagccaagaactcttggaatataatatacagcagaagcagtctcaaatgctggagatgcaagtggagctcagcagtatgaaagacagagcaacggaactgcaggagcagctgagttctgagaaaatggtggttgctgaactgaagagtgagcttgcacaaactaaattggaactagaaacaacactcaaggcacagcataaacacctaaaagaattggaggctttcaggttggaagttaaagataagacagatgaagtacatttgcttaatgacacattagcaagtgaacagaaaaaatcaagagagctccagtgggctttggagaaagagaaagccaagttgggacgcagtgaagaacgggataaagaagaacttgaggatctgaagttttcacttgagagtcagaaacaaaggaatcttcagctaaatctacttttggaacaacagaaacaactactgaacgaatcccagcaaaaaatagaatcacagagaatgctatatgatgcccagttgtcagaagaacaaggtcgaaacttagagcttcaggtacttcttgaatctgagaaagttcgaattcgggaaatgagtagtaccctagatagggagcgggaattgcacgcacagctgcagagcagtgatggtactggacagtctcggccacccttgccctcagaggacctactgaaagagctgcagaaacagctagaggaaaaacacagtcgcatagtagaattgttaaatgagactgaaaaatataaactggattctttgcaaacacgacagcaaatggaaaaagataggcaggttcacaggaaaacactgcagacagaacaggaggccaacactgagggacagaaaaaaatgcatgagctccagtccaaagtggaagatcttcagcgccagctggaagagaaaagacaacaagtttataagttagaccttgaaggacagcgactacaaggaatcatgcaggaattccagaagcaagaactagaacgagaagaaaaacgagaaagtagaagaattctgtatcagaaccttaatgagccaaccacgtggagcttaaccagtgatagaactagaaattgggttcttcaacagaaaatagaaggagaaacaaaagaatcaaactacgctaaattgattgaaatgaatggaggaggaaccggctgtaatcatgaattagaaatgatcagacaaaagcttcaatgtgtagcttcaaaactacaggttctaccccagaaagcctctgagagactacagtttgaaacagcagatgatgaagatttcatttgggttcaggaaaatattgatgaaattattttacaactacagaaattaactggccagcaaggtgaagagcccagcttggtgtccccaagtacttcttgtggctcattgactgaaagactactgagacaaaatgctgagctgacagggcatatcagtcaactgactgaagagaagaatgacttaaggaacatggttatgaagctggaagagcagatcaggtggtatcgacagacaggagctggtagagataattcttccaggttttcattgaatggtggtgccaacattgaagccatcattgcctctgaaaaagaagtatggaacagagaaaaattgactctccagaaatctttgaaaagggcagaggctgaagtatacaaactgaaagctgaactaagaaatgactctttacttcaaactctgagccctgattctgaacatgtcactttaaagagaatttatggtaaatacttgagggcagaaagttttcgaaaggctctcatttaccagaagaaatacctgctgctgttactgggtgggttccaggaatgtgaagatgccaccttggccctgcttgcccggatgggggggcagccagctttcacggatctagaggtgatcaccaatcgcccaaagggcttcaccaggtttcggtcggccgtcagagtatccattgcaatttccagaatgaaatttttggttcgacggtggcatcgagtcacaggttctgtttccatcaatattaacagagatggctttggactgaatcaaggtgcagaaaagactgactcattttatcattcttctggtgggctggagttatatggagaaccaagacatactacgtatcgctcaagatcagatctggactatattaggtcccctttaccatttcagaataggtacccaggcactccagctgatttcaatcctggttctttagcatgttctcagcttcagaattacgatcctgacagagccctaacagattatatcactcggctagaggcactgcaaagacgacttggaactatacagtcaggttcaactactcaatttcatgctggcatgagaagataatcctttgaaacatcattaattgaagtgattttaaatagatttccttttgtaaatcaatggttcttttgtgcttttgtattgtgaatattcaatgggaccaatatgaacacagcttatgattgtatacaaatcccttgccagcacatgaaaacaaactggaatttgtatatataagcattgtgtatgtattcatgcacaataattattgacttctcccccacctccatagtgctagtatttggcattagcttctgggccttgtgtatgccttccctgggcttcaacactcctcttctgccctcctttgagctctgttggggtggaggatcagaggtcttgctcgtttattttccggctcattttagtctcatggtcagctttataaagtgggggggttgtggattcatgtaattgctctggtagtgacctagctttgtcctatggtcctctccctgcattacattgggggtttcagcaagcgcttgattattaatcgatgtacctaatgtaag

SEQ ID NO: 293072 - DNA, 3349 bp, Homo sapiens
  misc_feature (268)..(268): n is a, c, g, or t
tagtagcagtatatgagagttacgttgcttcacatctttgccaacagttagtatagtcagacttctgttgccaatctgatgggtgtgcagtggattcttattgtggttttaattggctgttctctagttcctgaagggtttagtcctttttcatatggtaattggctagttggatttttatttttgtgatatgcttgtttaggtactttttgataacagtatgctggtcttgaactcctggccttaagcagtcctccctcccacctcngcctcccaaagtgctgggattacaggtgtgagccaccatgcctggactgcattaccaactcttgggactataatttttcatgtttcctttgaagtaatctccttaactacaaatcagttcttatcaacaaatatttataaaccaaatatgagttgcttgattatgtttcaaatattaatcatgttctgtgtagaactcttggaatataatatacagcagaagcagtctcaaatgctggagatgcaagtggagctcagcagtatgaaagacagagcaacggaactgcaggagcagctgagttctgagaaaatggtggttgctgaactgaagagtgagcttgcacaaactaaattggaactagaaacaacactcaaggcacagcataaacacctaaaagaattggaggctttcaggttggaagttaaagataagacagatgaagtacatttgcttaatgacacattagcaagtgaacagaaaaaatcaagagagctccagtgggctttggagaaagagaaagccaagttgggacgcagtgaagaacgggataaagaagaacttgaggatctgaagttttcacttgagagtcagaaacaaaggaatcttcagctaaatctacttttggaacaacagaaacaactactgaacgaatcccagcaaaaaatagaatcacagagaatgctatatgatgcccagttgtcagaagaacaaggtcgaaacttagagcttcaggtacttcttgaatctgagaaagttcgaattcgggaaatgagtagtaccctagatagggagcgggaattgcacgcacagctgcagagcagtgatggtactggacagtctcggccacccttgccctcagaggacctactgaaagagctgcagaaacagctagaggaaaaacacagtcgcatagtagaattgttaaatgagactgaaaaatataaactggattctttgcaaacacgacagcaaatggaaaaagataggcaggttcacaggaaaacactgcagacagaacaggaggccaacactgagggacagaaaaaaatgcatgagctccagtccaaagtggaagatcttcagcgccagctggaagagaaaagacaacaagtttataagttagaccttgaaggacagcgactacaaggaatcatgcaggaattccagaagcaagaactagaacgagaagaaaaacgagaaagtagaagaattctgtatcagaaccttaatgagccaaccacgtggagcttaaccagtgatagaactagaaattgggttcttcaacagaaaatagaaggagaaacaaaagaatcaaactacgctaaattgattgaaatgaatggaggaggaaccggctgtaatcatgaattagaaatgatcagacaaaagcttcaatgtgtagcttcaaaactacaggttctaccccagaaagcctctgagagactacagtttgaaacagcagatgatgaagatttcatttgggttcaggaaaatattgatgaaattattttacaactacagaaattaactggccagcaaggtgaagagcccagcttggtgtccccaagtacttcttgtggctcattgactgaaagactactgagacaaaatgctgagctgacagggcatatcagtcaactgactgaagagaagaatgacttaaggaacatggttatgaagctggaagagcagatcaggtggtatcgacagacaggagctggtagagataattcttccaggttttcattgaatggtggtgccaacattgaagccatcattgcctctgaaaaagaagtatggaacagagaaaaattgactctccagaaatctttgaaaagggcagaggctgaagtatacaaactgaaagctgaactaagaaatgactctttacttcaaactctgagccctgattctgaacatgtcactttaaagagaatttatggtaaatacttgagggcagaaagttttcgaaaggctctcatttaccagaagaaatacctgctgctgttactgggtgggttccaggaatgtgaagatgccaccttggccctgcttgcccggatgggggggcagccagctttcacggatctagaggtgatcaccaatcgcccaaagggcttcaccaggtttcggtcggccgtcagagtatccattgcaatttccagaatgaaatttttggttcgacggtggcatcgagtcacaggttctgtttccatcaatattaacagagatggctttggactgaatcaaggtgcagaaaagactgactcattttatcattcttctggtgggctggagttatatggagaaccaagacatactacgtatcgctcaagatcagatctggactatattaggtcccctttaccatttcagaataggtacccaggcactccagctgatttcaatcctggttctttagcatgttctcagcttcagaattacgatcctgacagagccctaacagattatatcactcggctagaggcactgcaaagacgacttggaactatacagtcaggttcaactactcaatttcatgctggcatgagaagataatcctttgaaacatcattaattgaagtgattttaaatagatttccttttgtaaatcaatggttcttttgtgcttttgtattgtgaatattcaatgggaccaatatgaacacagcttatgattgtatacaaatcccttgccagcacatgaaaacaaactggaatttgtatatataagcattgtgtatgtattcatgcacaataattattgaattacctgtatatttgtggaatgctaatttaaaacattaaattataaaccttgtgtatttatcaaatgggtgaaaagattaaacttttacgcattacaatactgctgaatgtgtagctcgaggtgtcctgcacttttcttataaggctactgaagttacatgttttgcctaatatattctactggtgatgaagacagataatatcacttgtagagacctatttttgtataatggtagaagttttgaattttatggggtattttgtcaagtactgaaataaaaatgacttcaccattttcaccaaaatatattt

SEQ ID NO: 293073 - DNA, 12275 bp, Homo sapiens
gaagatggcggcggcggcggcggtgacggcgcttcccgtgcggctgaggacgatccgccagtgagcgcggagactgcttccacttcgggcgggggagcgccggaccgaatcggctctctaggccgtggagcttgccgtcccacctccgtccaaatcgacctttcctttctatccccaaccacccctcaacccctgttttcccctgccttccttgcagaggccatggaggacgaggagagacagaagaagctggaggccggcaaagccaagcttgcccagtttcgacaaagaaaagctcagtcggatgggcagagtccttccaagaagcagaaaaaaaagagaaaaacgtcaagcagtaaacatgatgtgtcagcacaccatgatttgaatattgatcaatcacagtgtaatgaaatgtacataaatagttctcagagagtagaatcaactgtgattcctgaatctacaataatgagaactctacatagtggagaaataaccagtcatgagcagggcttctctgtggaactggaaagtgaaatttcaaccacagcagatgactgcagttcagaggtaaatggttgcagttttgtgatgagaacaggaaagcctacaaatttattaagggaagaagaatttggtgttgatgattcttattctgaacaaggagcacaagacagtccgactcatctagagatgatggaaagtgagttggctgggaagcagcatgagattgaagagctaaacagagagctggaagaaatgagggttacctatgggactgaaggactgcagcagttacaagaatttgaagctgccattaaacaaagagatggcattataacccagctcactgctaatttacaacaagcaagaagagaaaaggatgagacaatgagagaatttttagagttgacagaacagagtcaaaaattacagattcaatttcagcaattacaggctagtgaaactctgagaaacagcactcatagtagcacagctgcagacttactacaagccaaacaacagatcctcactcatcaacagcagcttgaagaacaagaccacttattagaagattatcagaaaaagaaagaagacttcacaatgcaaattagtttcttgcaagagaaaattaaagtatatgaaatggaacaagataaaaaagtagaaaactcaaataaagaagaaatacaggaaaaggagacaatcattgaagaattaaacacaaaaataatagaagaagaaaagaaaactcttgagctaaaggataaattaacaactgctgataaattactaggagaattacaagaacagattgtgcaaaagaaccaagaaataaaaaacatgaaattagagctgactaattctaagcaaaaagaaagacagtcttctgaagaaataaaacagttaatggggacagtcgaagaacttcagaagagaaatcataaagacagccagttcgaaactgatatagtacaacgaatggaacaagaaacacaaagaaagttagaacaactccgggcagagctggatgagatgtatgggcagcagatagtgcaaatgaaacaagaattaataagacaacacatggcacagatggaggaaattaaaacacggcataagggagaaatggagaatgctttaaggtcatattcaaatattacagttaatgaagatcagataaagttaatgaatgtggcaataaatgaactgaatataaaattgcaagatactaactctcaaaaggaaaaactcaaggaagaactaggactaattttagaagaaaagtgtgctctacagagacagcttgaagaccttgttgaagaattgagcttttcaagggaacagattcagagagctagacagacaatagctgaacaagaaagtaaacttaatgaagcacataagtcccttagtacagtggaagatttgaaagctgagattgtttctgcatctgaatccagaaaggaactagaattaaaacatgaagcagaagttacaaattacaagataaaacttgaaatgttagaaaaagaaaagaatgctgtgttagacagaatggctgaatcacaagaagctgaattagagaggctgagaacacagcttctatttagtcacgaagaagagctttccaaactgaaggaagatttagaaattgaacatcgaataaatattgaaaaacttaaagataatttaggcattcactataaacagcagatagatggtttacagaatgaaatgagtcaaaagatagaaaccatgcagtttgaaaaggacaatttgataactaagcagaatcaattaattttggaaatttcaaagctaaaagatttacagcagtctcttgtaaattcaaagtcagaagaaatgactcttcaaatcaatgaacttcaaaaagaaattgaaatactcagacaagaagaaaaagaaaagggtacacttgaacaagaagttcaagaattacaacttaaaacagaattgttagaaaaacagatgaaggaaaaagagaatgatcttcaagaaaaatttgcacaacttgaagcagagaatagcattcttaaagatgaaaagaaaacccttgaagacatgttgaaaatacatactcctgttagccaagaagaaagattgattttcttagactccattaagtccaaatccaaagactctgtgtgggaaaaagaaatagaaatacttatagaggaaaatgaggacctcaaacaacaatgtattcagctaaatgaagagattgaaaagcaaaggaacactttttcatttgctgaaaaaaactttgaagttaactatcaagagttacaagaggagtatgcttgccttctcaaagtaaaagatgatttagaagacagtaaaaataaacaggaattagagtataaaagtaaacttaaagcacttaatgaagagcttcatttgcaaagaataaatccaactacagtgaaaatgaaaagttctgtctttgatgaagacaaaacttttgtagcagaaacattggaaatgggtgaggttgttgaaaaggatacaacagaactcatggaaaaacttgaggtaaccaagcgagagaaattagagctgtcacagagactgtctgatctttctgaacaattgaaacagaaacatggtgagattagttttctaaatgaagaagttaaatctttaaagcaagagaaagaacaagtttcattgagatgtagagagctagaaatcattattaaccacaacagggcagaaaatgtacagtcatgtgatactcaagtaagctctttattagatggagttgtgactatgacaagcaggggtgctgaaggatcagtttctaaagtaaataaaagttttggtgaagaatcaaaaataatggtggaagataaagtttcttttgaaaatatgactgttggagaagaaagtaagcaagaacagttgattttggatcacttaccatctgtaacaaaggaatcatcacttagagcaactcaaccaagtgaaaatgataaacttcagaaagaactcaatgtacttaaatcagaacagaatgatttaaggctacagatggaagcccaacgcatttgcctctctctggtttattcaactcatgtggatcaggttcgtgaatatatggaaaatgaaaaagataaagctctttgcagtcttaaagaagagcttatttttgctcaagaggaaaagatcaaggaacttcagaaaatacaccagttagaactacagactatgaaaacacaagaaacaggtgatgaaggaaagcctttacatctgctcattggaaaacttcaaaaggcagtgtctgaagaatgttcttattttttacagactttatgcagtgtccttggtgaatattatactcctgctttaaaatgtgaagtaaatgcagaagacaaagagaattctggtgattacatttctgaaaatgaagatccagaattacaagattatagatatgaagttcaagactttcaagaaaatatgcacactcttctcaacaaagtaacagaagaatacaacaaactcttggtacttcaaacacgactaagcaagatctggggacagcagacagatggtatgaaacttgaatttggagaagaaaaccttccaaaagaggaaacagagtttttatcaatccattctcagatgaccaatttggaagacattgatgtcaatcataaaagcaagttatcttctctgcaagatcttgaaaaaactaaacttgaagaacaagttcaagaattagaaagcctcatatcctctttgcagcaacagttgaaagaaactgaacaaaactatgaggcagagatccactgtttacagaagaggcttcaagctgttagtgagtccacggttccgccaagcttacctgttgattcggtggtaattacagaatctgatgcacagagaacaatgtaccctggaagttgtgtgaaaaagaatattgatggtacaatagagttttctggtgaatttggagtgaaagaggaaacaaatatcgttaagttgcttgaaaaacaataccaagaacaattagaagaagaagtagctaaggttattgtgtcaatgagtatagcatttgctcaacaaactgaactgtctagaatatctgggggaaaagaaaatactgcatcatcaaagcaagcacatgctgtgtgtcagcaagaacaacattattttaatgaaatgaaattatcacaggatcaaattggttttcagacttttgagacagtggatgtgaaatttaaagaagaatttaaaccacttagtaaagagttaggagaacatggaaaggaaattttattatcaaatagtgatccccatgatataccagaatcaaaggactgtgtgctgactatttcagaagaaatgttctccaaagataaaacatttatagttagacagtctattcatgatgagatttcagtgtcaagcatggatgcttctagacaactaatgttgaatgaagaacagttggaagatatgagacaggaacttgtacgacaataccaagaacatcaacaggcaacggaattgttaaggcaagcacatatgcggcaaatggagagacagcgagaagaccaggaacagctacaagaagagattaagagacttaatagacaattagcccagagatcctccatagataatgaaaacctggtttcagagagagagagggtgcttttagaggagctggaagcactaaagcagctgtctttagctggaagagagaagctgtgttgtgagctgcgcaacagcagtacgcaaacacagaatggaaatgaaaaccaaggagaagttgaagaacaaacatttaaagaaaaggaattagacagaaaacctgaagatgtgcctcctgagattttgtctaatgaaaggtatgcactccagaaagctaataatagacttttgaagatcctcttagaagttgtaaagacaacagcagctgttgaagaaacaattggtcgccatgtccttgggattctagatagatctagtaaaagccagtcatctgccagcctaatttggaggtcagaagcagaggcatctgtaaagtcatgtgtccatgaggaacatacaagagttacagatgaatccattccctcttattctggaagtgatatgccaagaaatgacattaacatgtggtcaaaagtaactgaggaaggaacagagctgtcacaacgacttgtgaggagtggttttgctggaactgaaatagaccctgaaaatgaagaacttatgctgaacattagctctcgactacaagcagcagttgaaaaactcctagaagccataagtgaaactagcagtcagcttgaacatgcgaaagtgacacagacagagttgatgcgtgagtcatttagacagaaacaagaagcaacagagtcccttaagtgccaagaggaacttcgagagcgccttcatgaggagtccagggccagagaacagctagctgtggagctcagtaaggctgagggcgtcattgatggctatgcagatgaaaaaactctttttgaaaggcaaattcaggaaaaaactgatataatagatcgtcttgagcaggagttgttatgtgcaagtaacaggttgcaagaattggaggcagagcaacagcagatccaagaagaaagagaattactgtccagacaaaaggaagctatgaaagcagaggcaggcccagttgaacaacaattactacaggagacagaaaaattaatgaaggaaaaactagaagtacaatgtcaagctgaaaaagtacgtgatgaccttcaaaaacaagtgaaagctctagaaatagatgtggaagaacaagtcagtaggtttatagagctggaacaagaaaaaaatactgaactaatggatttaagacagcaaaaccaagcattggaaaagcagttagaaaaaatgagaaaatttttagatgagcaagccattgacagagaacatgagagagatgtattccaacaggaaatacagaaactagaacagcaacttaaggttgttcctcgattccagcctatcagtgaacatcaaactagagaggttgaacagttagcaaatcatctgaaagaaaaaacagacaaatgcagtgagcttttgctctctaaagagcagcttcaaagggatatacaagaaaggaatgaagaaatagagaaactggagttcagagtaagagaactggagcaggcgcttcttgtgagtgcagatacttttcaaaaggtagaggaccgaaaacactttggagctgtagaagctaaaccagaattgtccctagaagtacaattgcaggctgaacgagatgccatagacagaaaggaaaaagagattacaaacttagaagagcaattagaacagtttagagaagaactggaaaataagaatgaagaagttcaacaattacatatgcaattagaaatacagaaaaaggaatctactacccgcctacaagaacttgaacaggaaaacaaattatttaaggatgacatggagaaactgggacttgccataaaggaatctgatgccatgtctactcaagaccaacatgtgctatttgggaaatttgctcaaataatacaggaaaaagaggtagaaattgaccaattaaatgaacaagttacgaaactccagcagcaacttaaaattacaacagataacaaggttattgaagaaaaaaatgaactgataagggatcttgaaacccaaatagaatgtttgatgagtgatcaagaatgtgtgaagagaaatagagaagaagaaatagagcagctcaatgaagtgattgaaaaacttcaacaggaattggcaaatattggacagaagacatcaatgaatgctcattccctctcagaagaagcagacagtttaaaacatcaattggatgtggttatagctgaaaagctggccttggaacagcaagtagaaaccgctaatgaagaaatgaccttcatgaaaaatgtacttaaagaaaccaattttaaaatgaatcagctaacacaggaattattcagcttaaagagagaacgtgaaagtgtggaaaagattcaaagcataccagagaatagtgttaacgtggctatagatcatctgagcaaagacaaacctgaactagaagtagtccttacagaggatgctcttaaatccctagaaaatcagacatacttcaaatcttttgaagaaaatggcaaaggttccataattaatttggaaacaaggttgctacaacttgagagcactgttagtgcaaaggacttagaacttacccagtgttataaacaaataaaagacatgcaagaacaaggccagtttgaaacagaaatgcttcaaaagaagattgtaaacctacagaaaatagttgaagaaaaagtggctgctgctcttgtcagtcaaatccaacttgaggcagttcaggaatatgcaaaattctgtcaagataatcaaacaatttcatcagaacctgaaagaacaaatattcagaatttaaatcaactaagagaagatgagttggggtcagatatatcagcattaaccttgagaatatcagaattagaaagccaggttgttgaaatgcatactagtttgattttagaaaaagaacaagtagaaattgcagaaaaaaatgttttagaaaaagaaaagaagctgctagaactacagaagctattggagggcaatgagaaaaaacagagagagaaagaaaagaaaagaagccctcaagatgttgaagttctcaagacaactactgagctatttcatagcaatgaagaaagtggattttttaatgaactcgaggctcttagagctgaatcagtggctaccaaagcagaacttgccagttataaagaaaaggctgaaaaacttcaagaagagcttttggtaaaagaaacaaatatgacatctcttcagaaagacttaagccaagttagggatcacctcgcagaggcaaaagagaaattgtccattttagaaaaagaagatgagactgaggtacaagaaagcaaaaaggcctgcatgtttgagccacttcctataaaactgagtaagagcattgcatcccagacagatgggactctgaagatcagtagcagcaatcagactccacaaattcttgttaaaaatgcaggaatacaaattaatttacagagtgaatgttcctcagaagaagttactgaaataatcagtcagtttactgaaaaaattgagaagatgcaagaactacatgctgctgaaattttggacatggaatccagacatatttcagaaactgaaaccttaaagagggaacactatgttgccgttcagttactgaaagaggaatgtggtaccttgaaggcagtgatacagtgtctgagaagtaaagagggatcctcaattcctgagctagcacattctgatgcttaccagactagagaaatatgctccagtgattctggatcagactggggtcagggaatttatcttacacacagtcagggatttgacatagcatcagaaggccgaggagaagaaagtgaaagtgcaacagattcctttccaaagaaaataaagggattactgagagctgtccataatgaaggcatgcaggtgctttctctcactgagtctccctatagtgatggagaggaccattctattcagcaggtttcagaatcttggctagaagagagaaaagcttacatcaatacaatctcatctctaaaggatttaattacaaagatgcaactgcaaagagaagccgaggtttatgatagttctcaatctcatgagagcttctcagactggcgaggtgaactactgcttgcccttcaacaagttttcttagaagagcgtagtgttttactagcagcatttcggacggagctgacagctctaggtactacagatgcagttggtttactaaactgtttggaacagagaatacaagaacagggtgttgaatatcaagcagctatggaatgcctccagaaagcagatagaaggagtttgttatctgaaattcaggcactgcatgcacaaatgaatggtaggaaaattactctgaaaagagaacaagagagtgagaaaccaagccaagaactcttggaatataatatacagcagaagcagtctcaaatgctggagatgcaagtggagctcagcagtatgaaagacagagcaacggaactgcaggagcagctgagttctgagaaaatggtggttgctgaactgaagagtgagcttgcacaaactaaattggaactagaaacaacactcaaggcacagcataaacacctaaaagaattggaggctttcaggttggaagttaaagataagacagatgaagtacatttgcttaatgacacattagcaagtgaacagaaaaaatcaagagagctccagtgggctttggagaaagagaaagccaagttgggacgcagtgaagaacgggataaagaagaacttgaggatctgaagttttcacttgagagtcagaaacaaaggaatcttcagctaaatctacttttggaacaacagaaacaactactgaacgaatcccagcaaaaaatagaatcacagagaatgctatatgatgcccagttgtcagaagaacaaggtcgaaacttagagcttcaggtacttcttgaatctgagaaagttcgaattcgggaaatgagtagtaccctagatagggagcgggaattgcacgcacagctgcagagcagtgatggtactggacagtctcggccacccttgccctcagaggacctactgaaagagctgcagaaacagctagaggaaaaacacagtcgcatagtagaattgttaaatgagactgaaaaatataaactggattctttgcaaacacgacagcaaatggaaaaagataggcaggttcacaggaaaacactgcagacagaacaggaggccaacactgagggacagaaaaaaatgcatgagctccagtccaaagtggaagatcttcagcgccagctggaagagaaaagacaacaagtttataagttagaccttgaaggacagcgactacaaggaatcatgcaggaattccagaagcaagaactagaacgagaagaaaaacgagaaagtagaagaattctgtatcagaaccttaatgagccaaccacgtggagcttaaccagtgatagaactagaaattgggttcttcaacagaaaatagaaggagaaacaaaagaatcaaactacgctaaattgattgaaatgaatggaggaggaaccggctgtaatcatgaattagaaatgatcagacaaaagcttcaatgtgtagcttcaaaactacaggttctaccccagaaagcctctgagagactacagtttgaaacagcagatgatgaagatttcatttgggttcaggaaaatattgatgaaattattttacaactacagaaattaactggccagcaaggtgaagagcccagcttggtgtccccaagtacttcttgtggctcattgactgaaagactactgagacaaaatgctgagctgacagggcatatcagtcaactgactgaagagaagaatgacttaaggaacatggttatgaagctggaagagcagatcaggtggtatcgacagacaggagctggtagagataattcttccaggttttcattgaatggtggtgccaacattgaagccatcattgcctctgaaaaagaagtatggaacagagaaaaattgactctccagaaatctttgaaaagggcagaggctgaagtatacaaactgaaagctgaactaagaaatgactctttacttcaaactctgagccctgattctgaacatgtcactttaaagagaatttatggtaaatacttgagggcagaaagttttcgaaaggctctcatttaccagaagaaatacctgctgctgttactgggtgggttccaggaatgtgaagatgccaccttggccctgcttgcccggatgggggggcagccagctttcacggatctagaggtgatcaccaatcgcccaaagggcttcaccaggtttcggtcggccgtcagagtatccattgcaatttccagaatgaaatttttggttcgacggtggcatcgagtcacaggttctgtttccatcaatattaacagagatggctttggactgaatcaaggtgcagaaaagactgactcattttatcattcttctggtgggctggagttatatggagaaccaagacatactacgtatcgctcaagatcagatctggactatattaggtcccctttaccatttcagaataggtaagaatatgagaaaacctgcctggaattgttaaatgtattaatatttaacagagataaatggacatttttagggctttgacttctttgcattgagatagacatctttgttatatataatttacataatatgaccaagtgcggtggctcacacctataatcccagcactttgggaggctgaggcgggcagatcatgaggtcaggagttcaagaccagctagttggagactagcctggccaacatggtgaaaccctgtctctactaaaaatacaaaaaattagccaggcgtggtggcaggcgcctgtggtcccagctacttgggaggctgaggcaggagaatggtgtgaacccgggaggcggagctggcagtgagctgagattgtgccactgcactctggcctgggcaacggagcgagactctgtctcaaaaaaaaatacaaaaaaattagccaggcatggtggtgggtgcctgtaatcccagctactcaggaggctgaggcaggag

SEQ ID NO: 293074 - DNA, 1082 bp, Homo sapiens
ggtatagcaaacaagctgaccattttttatttagtgtatgctatggttagatattgggaaaagtattgactaaaattgatactctgatcattatgaaaagcttaacagtcttcatgacaagatacatttatacatacccaatttattgagacctctgccacaagcattgtattggacattcttatgttgacttagtagcatctttgaattcattggagagttgtctctttctcatcccaagctccaaagctgaagcttggaggagatacattatgtgtgtacaagtgacccacctttttggggaagggagtggaggcaggttggtaacttatatgcatatttctggataacttgattcatgtacatatttttaatcctttaggtacccaggcactccagctgatttcaatcctggttctttagcatgttctcagcttcagaattacgatcctgacagagccctaacagattatatcactcggctagaggcactgcaaagacgacttggaactatacagtcaggttcaactactcaatttcatgctggcatgagaagataatcctttgaaacatcattaattgaagtgattttaaatagatttccttttgtaaatcaatggttcttttgtgcttttgtattgtgaatattcaatgggaccaatatgaacacagcttatgattgtatacaaatcccttgccagcacatgaaaacaaactggaatttgtatatataagcattgtgtatgtattcatgcacaataattattgaattacctgtatatttgtggaatgctaatttaaaacattaaattataaaccttgtgtatttatcaaatgggtgaaaagattaaacttttacgcattacaatactgctgaatgtgtagctcgaggtgtcctgcacttttcttataaggctactgaagttacatgttttgcctaatatattctactggtgatgaagacagataatatcacttgtagagacctatttttgtataatggtagaagttttgaattttatggggtattttgtcaagtactgaaataaaaatgacttcaccattttcaccaaaatatattt

SEQ ID NO: 293075 - DNA, 6885 bp, Homo sapiens
gaagatggcggcggcggcggcggtgacggcgcttcccgtgcggctgaggacgatccgccagtgagcgcggagactgcttccacttcgggcgggggagcgccggaccgaatcggctctctaggccgtggagcttgccgtcccacctccgtccaaatcgacctttcctttctatccccaaccacccctcaacccctgttttcccctgccttccttgcagaggccatggaggacgaggagagacagaagaagctggaggccggcaaagccaagcttgcccagtttcgacaaagaaaagctcagtcggatgggcagagtccttccaagaagcagaaaaaaaagagaaaaacgtcaagcagtaaacatgatgtgtcagcacaccatgatttgaatattgatcaatcacagtgtaatgaaatgtacataaatagttctcagagagtagaatcaactgtgattcctgaatctacaataatgagaactctacatagtggagaaataaccagtcatgagcagggcttctctgtggaactggaaagtgaaatttcaaccacagcagatgactgcagttcagaggtaaatggttgcagttttgtgatgagaacaggaaagcctacaaatttattaagggaagaagaatttggtgttgatgattcttattctgaacaaggagcacaagacagtccgactcatctagagatgatggaaagtgagttggctgggaagcagcatgagattgaagagctaaacagagagctggaagaaatgagggttacctatgggactgaaggactgcagcagttacaagaatttgaagctgccattaaacaaagagatggcattataacccagctcactgctaatttacaacaagcaagaagagaaaaggatgagacaatgagagaatttttagagttgacagaacagagtcaaaaattacagattcaatttcagcaattacaggctagtgaaactctgagaaacagcactcatagtagcacagctgcagacttactacaagccaaacaacagatcctcactcatcaacagcagcttgaagaacaagaccacttattagaagattatcagaaaaagaaagaagacttcacaatgcaaattagtttcttgcaagagaaaattaaagtatatgaaatggaacaagataaaaaagtagaaaactcaaataaagaagaaatacaggaaaaggagacaatcattgaagaattaaacacaaaaataatagaagaagaaaagaaaactcttgagctaaaggataaattaacaactgctgataaattactaggagaattacaagaacagattgtgcaaaagaaccaagaaataaaaaacatgaaattagagctgactaattctaagcaaaaagaaagacagtcttctgaagaaataaaacagttaatggggacagtcgaagaacttcagaagagaaatcataaagacagccagttcgaaactgatatagtacaacgaatggaacaagaaacacaaagaaagttagaacaactccgggcagagctggatgagatgtatgggcagcagatagtgcaaatgaaacaagaattaataagacaacacatggcacagatggaggaaattaaaacacggcataagggagaaatggagaatgctttaaggtcatattcaaatattacagttaatgaagatcagataaagttaatgaatgtggcaataaatgaactgaatataaaattgcaagatactaactctcaaaaggaaaaactcaaggaagaactaggactaattttagaagaaaagtgtgctctacagagacagcttgaagaccttgttgaagaattgagcttttcaagggaacagattcagagagctagacagacaatagctgaacaagaaagtaaacttaatgaagcacataagtcccttagtacagtggaagatttgaaagctgagattgtttctgcatctgaatccagaaaggaactagaattaaaacatgaagcagaagttacaaattacaagataaaacttgaaatgttagaaaaagaaaagaatgctgtgttagacagaatggctgaatcacaagaagctgaattagagaggctgagaacacagcttctatttagtcacgaagaagagctttccaaactgaaggaagatttagaaattgaacatcgaataaatattgaaaaacttaaagataatttaggcattcactataaacagcagatagatggtttacagaatgaaatgagtcaaaagatagaaaccatgcagtttgaaaaggacaatttgataactaagcagaatcaattaattttggaaatttcaaagctaaaagatttacagcagtctcttgtaaattcaaagtcagaagaaatgactcttcaaatcaatgaacttcaaaaagaaattgaaatactcagacaagaagaaaaagaaaagggtacacttgaacaagaagttcaagaattacaacttaaaacagaattgttagaaaaacagatgaaggaaaaagagaatgatcttcaagaaaaatttgcacaacttgaagcagagaatagcattcttaaagatgaaaagaaaacccttgaagacatgttgaaaatacatactcctgttagccaagaagaaagattgattttcttagactccattaagtccaaatccaaagactctgtgtgggaaaaagaaatagaaatacttatagaggaaaatgaggacctcaaacaacaatgtattcagctaaatgaagagattgaaaagcaaaggaacactttttcatttgctgaaaaaaactttgaagttaactatcaagagttacaagaggagtatgcttgccttctcaaagtaaaagatgatttagaagacagtaaaaataaacaggaattagagtataaaagtaaacttaaagcacttaatgaagagcttcatttgcaaagaataaatccaactacagtgaaaatgaaaagttctgtctttgatgaagacaaaacttttgtagcagaaacattggaaatgggtgaggttgttgaaaaggatacaacagaactcatggaaaaacttgaggtaaccaagcgagagaaattagagctgtcacagagactgtctgatctttctgaacaattgaaacagaaacatggtgagattagttttctaaatgaagaagttaaatctttaaagcaagagaaagaacaagtttcattgagatgtagagagctagaaatcattattaaccacaacagggcagaaaatgtacagtcatgtgatactcaagtaagctctttattagatggagttgtgactatgacaagcaggggtgctgaaggatcagtttctaaagtaaataaaagttttggtgaagaatcaaaaataatggtggaagataaagtttcttttgaaaatatgactgttggagaagaaagtaagcaagaacagttgattttggatcacttaccatctgtaacaaaggaatcatcacttagagcaactcaaccaagtgaaaatgataaacttcagaaagaactcaatgtacttaaatcagaacagaatgatttaaggctacagatggaagcccaacgcatttgcctctctctggtttattcaactcatgtggatcaggttcgtgaatatatggaaaatgaaaaagataaagctctttgcagtcttaaagaagagcttatttttgctcaagaggaaaagatcaaggaacttcagaaaatacaccagttagaactacagactatgaaaacacaagaaacaggtgatgaaggaaagcctttacatctgctcattggaaaacttcaaaaggcagtgtctgaagaatgttcttattttttacagactttatgcagtgtccttggtgaatattatactcctgctttaaaatgtgaagtaaatgcagaagacaaagagaattctggtgattacatttctgaaaatgaagatccagaattacaagattatagatatgaagttcaagactttcaagaaaatatgcacactcttctcaacaaagtaacagaagaatacaacaaactcttggtacttcaaacacgactaagcaagatctggggacagcagacagatggtatgaaacttgaatttggagaagaaaaccttccaaaagaggaaacagagtttttatcaatccattctcagatgaccaatttggaagacattgatgtcaatcataaaagcaagttatcttctctgcaagatcttgaaaaaactaaacttgaagaacaagttcaagaattagaaagcctcatatcctctttgcagcaacagttgaaagaaactgaacaaaactatgaggcagagatccactgtttacagaagaggcttcaagctgttagtgagtccacggttccgccaagcttacctgttgattcggtggtaattacagaatctgatgcacagagaacaatgtaccctggaagttgtgtgaaaaagaatattgatggtacaatagagttttctggtgaatttggagtgaaagaggaaacaaatatcgttaagttgcttgaaaaacaataccaagaacaattagaagaagaagtagctaaggttattgtgtcaatgagtatagcatttgctcaacaaactgaactgtctagaatatctgggggaaaagaaaatactgcatcatcaaagcaagcacatgctgtgtgtcagcaagaacaacattattttaatgaaatgaaattatcacaggatcaaattggttttcagacttttgagacagtggatgtgaaatttaaagaagaatttaaaccacttagtaaagagttaggagaacatggaaaggaaattttattatcaaatagtgatccccatgatataccagaatcaaaggactgtgtgctgactatttcagaagaaatgttctccaaagataaaacatttatagttagacagtctattcatgatgagatttcagtgtcaagcatggatgcttctagacaactaatgttgaatgaagaacagttggaagatatgagacaggaacttgtacgacaataccaagaacatcaacaggcaacggaattgttaaggcaagcacatatgcggcaaatggagagacagcgagaagaccaggaacagctacaagaagagattaagagacttaatagacaattagcccagagatcctccatagataatgaaaacctggtttcagagagagagagggtgcttttagaggagctggaagcactaaagcagctgtctttagctggaagagagaagctgtgttgtgagctgcgcaacagcagtacgcaaacacagaatggaaatgaaaaccaaggagaagttgaagaacaaacatttaaagaaaaggaattagacagaaaacctgaagatgtgcctcctgagattttgtctaatgaaaggtatgcactccagaaagctaataatagacttttgaagatcctcttagaagttgtaaagacaacagcagctgttgaagaaacaattggtcgccatgtccttgggattctagatagatctagtaaaagccagtcatctgccagcctaatttggaggtcagaagcagaggcatctgtaaagtcatgtgtccatgaggaacatacaagagttacagatgaatccattccctcttattctggaagtgatatgccaagaaatgacattaacatgtggtcaaaagtaactgaggaaggaacagagctgtcacaacgacttgtgaggagtggttttgctggaactgaaatagaccctgaaaatgaagaacttatgctgaacattagctctcgactacaagcagcagttgaaaaactcctagaagccataagtgaaactagcagtcagcttgaacatgcgaaagtgacacagacagagttgatgcgtgagtcatttagacagaaacaagaagcaacagagtcccttaagtgccaagaggaacttcgagagcgccttcatgaggagtccagggccagagaacagctagctgtggagctcagtaaggctgagggcgtcattgatggctatgcagatgaaaaaactctttttgaaaggcaaattcaggaaaaaactgatataatagatcgtcttgagcaggagttgttatgtgcaagtaacaggttgcaagaattggaggcagagcaacagcagatccaagaagaaagagaattactgtccagacaaaaggaagctatgaaagcagaggcaggcccagttgaacaacaattactacaggagacagaaaaattaatgaaggaaaaactagaagtacaatgtcaagctgaaaaagtacgtgatgaccttcaaaaacaagtgaaagctctagaaatagatgtggaagaacaagtcagtaggtttatagagctggaacaagaaaaaaatactgaactaatggatttaagacagcaaaaccaagcattggaaaagcagttagaaaaaatgagaaaatttttagatgagcaagccattgacagagaacatgagagagatgtattccaacaggaaatacagaaactagaacagcaacttaaggttgttcctcgattccagcctatcagtgaacatcaaactagagaggttgaacagcagcaaatgattgaaaaaattgacatgacaggtcgagagggtagaaccaaagtccaagctcgaattgcccagcttagtgacattcatgcagtaaaggagctgaaccttcaagaatacagacagcacccttgtgctcaggataatggtggctgttcacatatttgtcttgtaaagggggatggtactacaaggtgttcttgccccatgcacctggttctacttcaagatgagctatcatgtggagaacctccaacatgttctcctcagcagttgacttgtttcacgggggaaattgactgtatcctgtgcttgacgtaagggaat

SEQ ID NO: 293076 - DNA, 5619 bp, Homo sapiens
gaagatggcggcggcggcggcggtgacggcgcttcccgtgcggctgaggacgatccgccagtgagcgcggagactgcttccacttcgggcgggggagcgccggaccgaatcggctctctaggccgtggagcttgccgtcccacctccgtccaaatcgacctttcctttctatccccaaccacccctcaacccctgttttcccctgccttccttgcagaggccatggaggacgaggagagacagaagaagctggaggccggcaaagccaagcttgcccagtttcgacaaagaaaagctcagtcggatgggcagagtccttccaagaagcagaaaaaaaagagaaaaacgtcaagcagtaaacatgatgtgtcagcacaccatgatttgaatattgatcaatcacagtgtaatgaaatgtacataaatagttctcagagagtagaatcaactgtgattcctgaatctacaataatgagaactctacatagtggagaaataaccagtcatgagcagggcttctctgtggaactggaaagtgaaatttcaaccacagcagatgactgcagttcagaggtaaatggttgcagttttgtgatgagaacaggaaagcctacaaatttattaagggaagaagaatttggtgttgatgattcttattctgaacaaggagcacaagacagtccgactcatctagagatgatggaaagtgagttggctgggaagcagcatgagattgaagagctaaacagagagctggaagaaatgagggttacctatgggactgaaggactgcagcagttacaagaatttgaagctgccattaaacaaagagatggcattataacccagctcactgctaatttacaacaagcaagaagagaaaaggatgagacaatgagagaatttttagagttgacagaacagagtcaaaaattacagattcaatttcagcaattacaggctagtgaaactctgagaaacagcactcatagtagcacagctgcagacttactacaagccaaacaacagatcctcactcatcaacagcagcttgaagaacaagaccacttattagaagattatcagaaaaagaaagaagacttcacaatgcaaattagtttcttgcaagagaaaattaaagtatatgaaatggaacaagataaaaaagtagaaaactcaaataaagaagaaatacaggaaaaggagacaatcattgaagaattaaacacaaaaataatagaagaagaaaagaaaactcttgagctaaaggataaattaacaactgctgataaattactaggagaattacaagaacagattgtgcaaaagaaccaagaaataaaaaacatgaaattagagctgactaattctaagcaaaaagaaagacagtcttctgaagaaataaaacagttaatggggacagtcgaagaacttcagaagagaaatcataaagacagccagttcgaaactgatatagtacaacgaatggaacaagaaacacaaagaaagttagaacaactccgggcagagctggatgagatgtatgggcagcagatagtgcaaatgaaacaagaattaataagacaacacatggcacagatggaggaaattaaaacacggcataagggagaaatggagaatgctttaaggtcatattcaaatattacagttaatgaagatcagataaagttaatgaatgtggcaataaatgaactgaatataaaattgcaagatactaactctcaaaaggaaaaactcaaggaagaactaggactaattttagaagaaaagtgtgctctacagagacagcttgaagaccttgttgaagaattgagcttttcaagggaacagattcagagagctagacagacaatagctgaacaagaaagtaaacttaatgaagcacataagtcccttagtacagtggaagatttgaaagctgagattgtttctgcatctgaatccagaaaggaactagaattaaaacatgaagcagaagttacaaattacaagataaaacttgaaatgttagaaaaagaaaagaatgctgtgttagacagaatggctgaatcacaagaagctgaattagagaggctgagaacacagcttctatttagtcacgaagaagagctttccaaactgaaggaagatttagaaattgaacatcgaataaatattgaaaaacttaaagataatttaggcattcactataaacagcagatagatggtttacagaatgaaatgagtcaaaagatagaaaccatgcagtttgaaaaggacaatttgataactaagcagaatcaattaattttggaaatttcaaagctaaaagatttacagcagtctcttgtaaattcaaagtcagaagaaatgactcttcaaatcaatgaacttcaaaaagaaattgaaatactcagacaagaagaaaaagaaaagggtacacttgaacaagaagttcaagaattacaacttaaaacagaattgttagaaaaacagatgaaggaaaaagagaatgatcttcaagaaaaatttgcacaacttgaagcagagaatagcattcttaaagatgaaaagaaaacccttgaagacatgttgaaaatacatactcctgttagccaagaagaaagattgattttcttagactccattaagtccaaatccaaagactctgtgtgggaaaaagaaatagaaatacttatagaggaaaatgaggacctcaaacaacaatgtattcagctaaatgaagagattgaaaagcaaaggaacactttttcatttgctgaaaaaaactttgaagttaactatcaagagttacaagaggagtatgcttgccttctcaaagtaaaagatgatttagaagacagtaaaaataaacaggaattagagtataaaagtaaacttaaagcacttaatgaagagcttcatttgcaaagaataaatccaactacagtgaaaatgaaaagttctgtctttgatgaagacaaaacttttgtagcagaaacattggaaatgggtgaggttgttgaaaaggatacaacagaactcatggaaaaacttgaggtaaccaagcgagagaaattagagctgtcacagagactgtctgatctttctgaacaattgaaacagaaacatggtgagattagttttctaaatgaagaagttaaatctttaaagcaagagaaagaacaagtttcattgagatgtagagagctagaaatcattattaaccacaacagggcagaaaatgtacagtcatgtgatactcaagtaagctctttattagatggagttgtgactatgacaagcaggggtgctgaaggatcagtttctaaagtaaataaaagttttggtgaagaatcaaaaataatggtggaagataaagtttcttttgaaaatatgactgttggagaagaaagtaagcaagaacagttgattttggatcacttaccatctgtaacaaaggaatcatcacttagagcaactcaaccaagtgaaaatgataaacttcagaaagaactcaatgtacttaaatcagaacagaatgatttaaggctacagatggaagcccaacgcatttgcctctctctggtttattcaactcatgtggatcaggttcgtgaatatatggaaaatgaaaaagataaagctctttgcagtcttaaagaagagcttatttttgctcaagaggaaaagatcaaggaacttcagaaaatacaccagttagaactacagactatgaaaacacaagaaacaggtgatgaaggaaagcctttacatctgctcattggaaaacttcaaaaggcagtgtctgaagaatgttcttattttttacagactttatgcagtgtccttggtgaatattatactcctgctttaaaatgtgaagtaaatgcagaagacaaagagaattctggtgattacatttctgaaaatgaagatccagaattacaagattatagatatgaagttcaagactttcaagaaaatatgcacactcttctcaacaaagtaacagaagaatacaacaaactcttggtacttcaaacacgactaagcaagatctggggacagcagacagatggtatgaaacttgaatttggagaagaaaaccttccaaaagaggaaacagagtttttatcaatccattctcagatgaccaatttggaagacattgatgtcaatcataaaagcaagttatcttctctgcaagatcttgaaaaaactaaacttgaagaacaagttcaagaattagaaagcctcatatcctctttgcagcaacagttgaaagaaactgaacaaaactatgaggcagagatccactgtttacagaagaggcttcaagctgttagtgagtccacggttccgccaagcttacctgttgattcggtggtaattacagaatctgatgcacagagaacaatgtaccctggaagttgtgtgaaaaagaatattgatggtacaatagagttttctggtgaatttggagtgaaagaggaaacaaatatcgttaagttgcttgaaaaacaataccaagaacaattagaagaagaagtagctaaggttattgtgtcaatgagtatagcatttgctcaacaaactgaactgtctagaatatctgggggaaaagaaaatactgcatcatcaaagcaagcacatgctgtgtgtcagcaagaacaacattattttaatgaaatgaaattatcacaggatcaaattggttttcagacttttgagacagtggatgtgaaatttaaagaagaatttaaaccacttagtaaagagttaggagaacatggaaaggaaattttattatcaaatagtgatccccatgatataccagaatcaaaggactgtgtgctgactatttcagaagaaatgttctccaaagataaaacatttatagttagacagtctattcatgatgagatttcagtgtcaagcatggatgcttctagacaactaatgttgaatgaagaacagttggaagatatgagacaggaacttgtacgacaataccaagaacatcaacaggcaacggaattgttaaggcaagcacatatgcggcaaatggagagacagcgagaagaccaggaacagctacaagaagagattaagagacttaatagacaattagcccagaatggaaatgaaaaccaaggagaagttgaagaacaaacatttaaagaaaaggaattagacagaaaacctgaagatgtgcctcctgagattttgtctaatgaaaggtatacaaaatgtgtactttttcagtgcaaagtaaattaaaatggttgtttcaatgtaatagactttgtccttatttttatcttgtacattgatactttgtcttaaaaatcatcataccatctgtgtatgaaacatgtccatgtatgtgtagtatgtaaaggattttcagtttttcatcattaaatagataacattttaaaaaaatcttttctatataaattttgattggatattaatcacatacttaactgttaatcacctgatgttagcaaaacttttccttactttgattttgtagaggttaatataaaaatgtgaaatattaagtgagaatagttatcctacattagtattaaagactttaagcacaatatt

SEQ ID NO: 293077 - DNA, 1184 bp, Homo sapiens
aaaagatttttcaaaaatgtatgaggtatagaacatccaactttgagagcactttaaaaaaactctaaatattagtctcacctaccttgccatagagccagtcatggtgatttttacatatatattcaaaatctcttaaaagtcagcttaagtatatgggctgggcgcggtggctcatgcctgtaatcccagcactttgggcggccgaggcaggcggatcactaggtcaggagttcaagaccaaccagttcgagactagcctggccaacatggtgaaaccccgtctccactaaaaatacaaaaatttgctggacatggtggcatgtgtggatagtcccagctactcaggaggctgaggcaggagaatcacttgaacccaggaggcgggggttgcagtgagccaagatcacaccactgaattccagcctgggcaacagagtaacactccaccttgggggtagtggggagagactcagtttaagtatgaagaggacattttaaggaaaaaaagggctttaaaaaaatggagaataataataatttcctttgtgtgaactctggtgggtctgatacaggtagcaatgtaatttgaaatcagttgaatttcctgtttttctctcataggttcaactactcaatttcatgctggcatgagaagataatcctttgaaacatcattaattgaagtgattttaaatagatttccttttgtaaatcaatggttcttttgtgcttttgtattgtgaatattcaatgggaccaatatgaacacagcttatgattgtatacaaatcccttgccagcacatgaaaacaaactggaatttgtatatataagcattgtgtatgtattcatgcacaataattattgaattacctgtatatttgtggaatgctaatttaaaacattaaattataaaccttgtgtatttatcaaatgggtgaaaagattaaacttttacgcattacaatactgctgaatgtgtagctcgaggtgtcctgcacttttcttataaggctactgaagttacatgttttgcctaatatattctactggtgatgaagacagataatatcacttgtagagacctatttttgtataatggtagaagttttgaattttatggggtattttgtcaagtactgaaataaaaatgacttcaccattttcaccaaaatatattt

SEQ ID NO: 293078 - DNA, 1204 bp, Homo sapiens
gaagatggcggcggcggcggcggtgacggcgcttcccgtgcggctgaggacgatccgccagtgagcgcggagactgcttccacttcgggcgggggagcgccggaccgaatcggctctctaggccgtggagcttgccgtcccacctccgtccaaatcgacctttcctttctatccccaaccacccctcaacccctgttttcccctgccttccttgcagaggccatggaggacgaggagagacagaagaagctggaggccggcaaagccaagcttgcccagtttcgacaaagaaaagctcagtcggatgggcagagtccttccaagaagcagaaaaaaaagagaaaaacgtcaagcagtaaacatgatgtgtcagcacaccatgatttgaatattgatcaatcacagtgtaatgaaatgtacataaatagttctcagagagtagaatcaactgtgattcctgaatctacaataatgagaactctacatagtggagaaataaccagtcatgagcagggcttctctgtggaactggaaagtgaaatttcaaccacagcagatgactgcagttcagaggtaaatggttgcagttttgtgatgagaacaggaaagcctacaaatttattaagggaagaagaatttggtgttgatgattcttattctgaacaaggagcacaagacagtccgactcatctagagatgatggaaagtgagttggctgggaagcagcatgagattgaagagctaaacagagagctggaagaaatgagggttacctatgggactgaaggactgcagcagttacaagaatttgaagctgccattaaacaaagagatggcattataacccagctcactgctaatttacaacaagcaagaagagaaaaggatgagacaatgagagaatttttagagttgacagaacagagtcaaaaattacagattcaatttcagcaattacaggctagtgaaactctgagaaacagcactcatagtagcacagctgcagacttactacaagccaaacaacagatcctcactcatcaacagcagcttgaagaacaagaccacttattagaagattatcagaaaaagaaagaagacttcacaatgcaaattagtttcttgcaagagaaaattaaagtatatgaaatggactaattgactagagaaacatgaagacgagttatatgccagtaacagggag

SEQ ID NO: 293079 - DNA, 655 bp, Homo sapiens
gcattccagtagttacattaaagactgtaataattgttctttattttttcatttttatttagtgatagtttgatctttaaaagagagactcccaaagctgcttttttcttggtggcaataaagaaaaattatctttgacaataacggttattttcttttttcttagcttgcccagtttcgacaaagaaaagctcagtcggatgggcagagtccttccaagaagcagaaaaaaaagagaaaaacgtcaagcagtaaacatgatgtgtcagcacaccatgatttgaatattgatcaatcacagtgtaatgaaatgtacataaatagttctcagagagtagaatcaactgtgattcctgaatctacaataatgagaactctacatagtggagaaataaccagtcatgagcagggcttctctgtggaagtaagtattctcccagatttttaatcattatggttctcgatggaaagtagtcataacaacagtcattagcaactgtgcgcaatttgatcatgatttttatgtcctcttgaaagttttagtagtatggtaactaaacagtcataactaaaatatttgatcatctcagagagggagttttgtgagtttaatttaatatatgttgaacaactgcagtacaccaaagactgagca

SEQ ID NO: 293080 - DNA, 575 bp, Homo sapiens
gaaagactactgagacaaaatgctgagctgacagggcatatcagtcaactgactgaagagaagaatgacttaaggaacatggttatgaagctggaagagcagatcaggtggtatcgacagacaggagctggtagagataatgtatgtccatttttagcatctccatatatgagaattagtgcatgcttatcatttctgctgtctagttcaagttttaatcctgttaatgtaaaactatcacacacctgattcttaggatctgtagaaaattttatagggatgacaataataatattattactaagttataataattactgttatttattggaaaccatctctgtactcgactctgggttgtatacatacagaatctctaatccacatccaccttatacctgagaaaactgaattgaagtcgtagtcaaaccaagatacttgtatctccaaagccagatactttgctacctagggaccaacaacagatacacgagatgttcaaatgtgaatcctgactgttctcttcatttaattattagttattgtgttgatgactcaattaaaaggttctgtta

SEQ ID NO: 293081 - DNA, 2908 bp, Homo sapiens
ctctatggtgtaggagaaacccggcccccagaagattgtgggtgtagtggccacagccttacaggcaggcaggggtggttggtgtcaacaggggggccaacagggtaccagagccaagaccctcggcctcctcccccgccgccttcctgcagatctgcttggctttgaggaagagtggcagtactgcctcactgcataagggatgggatcagagaacagtgctttaaagagctatacactgagagaaccaccatttaccttaccctctggacttgctgtttatcccgctgtactgcaagatggcaaatttgcttcagtttttgtgtataagagagaaaatgaagacaaggttaataaagctgccaagcatttgaagacacttcgtcacccttgcttgctaagatttttatcttgtactgtggaagcggatggcattcatcttgtcactgagcgagtacagcccctggaagtggctttggaaacattgtcttctgcagaggtctgtgctgggatctatgacatattgctggctcttatcttccttcatgacagaggacacctaacacacaataatgtctgtttatcatctgtgtttgtgagtgaagatggacactggaagctaggaggaatggaaactgtttgtaaagtttctcaggccacaccagagtttctgaggagtattcagtcaataagagacccagcatctatccctcctgaagagatgtctccagaattcacaactctcccagagtgtcatggacatgcccgggatgccttttcatttggaacattggtggaaagtttgctcacaatcttaaatgaacaggtttcagcggatgttctctccagctttcaacagaccttgcactcaactttgctgaatcccattccaaaatgtcggccagcgctctgcaccttactatctcatgacttcttcagaaatgattttctggaagttgtgaatttcttgaaaagtttaacattgaagagtgaagaggagaaaacggaattctttaaatttctgctggacagagtcagctgcttgtcagaggaattgatagcttcaaggttggtgcctcttctgcttaatcagttggtgtttgcagagccagtggctgttaagagttttcttccttatctgcttggccccaaaaaagatcatgcgcagggagaaactccttgcttgctctcaccagccctgttccagtcacgggtgatccccgtgcttctccagttgtttgaagttcatgaagagcatgtgcggatggtgctgctgtctcacatcgaggcctacgtggagcacttcactcaggagcagctgaagaaagtcatcttgccacaggttttgctgggcctgcgtgatactagcgattccattgtggcaattactctgcatagcctagcagtgctggtctctctgcttggaccagaggtggttgtgggaggagaacgaaccaagatcttcaaacgcactgccccaagttttactaaaaatactgacctttctctagaaggcgatccattttctcagcctattaaatttcccataaatggactctcagatgtaaaaaatacttcggaggacagtgaaaacttcccatcaagttctaaaaagtctgaggagtggcctgactggagtgaacctgaggagcctgaaaatcaaactgtcaacatacagatttggcctagagaaccttgtgatgatgtcaagtcccagtgcactaccttggatgtggaagagtcatcttgggatgactgcgagcccagcagcttagatactaaagtaaacccaggaggtggaatcactgctacaaaacctgttacctcaggggagcagaagcctattcctgctttgctttcactcactgaagagtctatgccttggaaatcaagcttaccccgaaagattagccttgtacaaaggggggatgacgcagaccaaatcgagccgccaaaagtgtcatcacaagaaaggccccttaaggttccatcagaacttggtttaggagaggaattcaccattcaagtaaaaaagaagccagtaaaagatcctgagatggattggtttgctgatatgatcccagaaattaagccttctgctgcttttcttatattacctgaactgaggacagaaatggtcccaaaaaaggatgatgtctccccagtgatgcagttttcctcaaaatttgctgcagcagaaattactgagggagaggctgaaggctgggaagaagaaggggagctgaactgggaagataataactggtgacaatagatgtgagttaaactttaggaaaaaggattccctttttttaaaaaaaatcaatacctcaaaagcaggctttgggacaagaaaaccccaaagtggcctgcttttcccatcccaggagctcattatccagtctgtgccaactgaagtaggagactgactgtgagtgctggctaaaagccctgggtggtgaggctcacagtactggtttccaggaggaagagcctttgtgcatttgactgaggccagtttctatgaagagcaagtagctgaggagaggtcgaatttactgctttttccaggacaattctggaagtaaagaaaatgtaattcaagctggttagcttaattttgtgccattctttaacataagagtaagctctattatgaaatacaactttaaaaaattttagctataaattatataaatgattttaaattgctgaggtttccttaggcagcttatttatttgtttacagttagactatctgagtaaatggttctttgtggacctaggcagttcctgactgttccacatgtagtacattgtaccaaagttcttaataagaatattccccacaatcctgttctctaaatgtcaaataaagattattttcactagattcaactttacaaaa

SEQ ID NO: 293082 - DNA, 1640 bp, Homo sapiens
gaatgcactagttattacttacatgcttccactgagttaataatgtaagtattatgtaattatttggataacatgtgacatcgttgatcttgagtaatgttctgctgggatctcttttgtttagtatgcatggatatttccaagtaattagacctatactactacacttccttaatgctatccttcccataagtgtagttcttacctttaaccagtattttatgagaataattattttccctacaggcgatccattttctcagcctattaaatttcccataaatggactctcagatgtaaaaaatacttcggaggacagtgaaaacttcccatcaagttctaaaaagtctgaggagtggcctgactggagtgaacctgaggagcctgaaaatcaaactgtcaacatacagatttggcctagagaaccttgtgatgatgtcaagtcccagtgcactaccttggatgtggaagagtcatcttgggatgactgcgagcccagcagcttagatactaaagtaaacccaggaggtggaatcactgctacaaaacctgttacctcaggggagcagaagcctattcctgctttgctttcactcactgaagagtctatgccttggaaatcaagcttaccccgaaagattagccttgtacaaaggggggatgacgcagaccaaatcgagccgccaaaagtgtcatcacaagaaaggccccttaaggttccatcagaacttggtttaggagaggaattcaccattcaagtaaaaaagaagccagtaaaagatcctgagatggattggtttgctgatatgatcccagaaattaagccttctgctgcttttcttatattacctgaactgaggacagaaatggtcccaaaaaaggatgatgtctccccagtgatgcagttttcctcaaaatttgctgcagcagaaattactgagggagaggctgaaggctgggaagaagaaggggagctgaactgggaagataataactggtgacaatagatgtgagttaaactttaggaaaaaggattccctttttttaaaaaaaatcaatacctcaaaagcaggctttgggacaagaaaaccccaaagtggcctgcttttcccatcccaggagctcattatccagtctgtgccaactgaagtaggagactgactgtgagtgctggctaaaagccctgggtggtgaggctcacagtactggtttccaggaggaagagcctttgtgcatttgactgaggccagtttctatgaagagcaagtagctgaggagaggtcgaatttactgctttttccaggacaattctggaagtaaagaaaatgtaattcaagctggttagcttaattttgtgccattctttaacataagagtaagctctattatgaaatacaactttaaaaaattttagctataaattatataaatgattttaaattgctgaggtttccttaggcagcttatttatttgtttacagttagactatctgagtaaatggttctttgtggacctaggcagttcctgactgttccacatgtagtacattgtaccaaagttcttaataagaatattccccacaatcctgttctctaaatgtcaaataaagattattttcactagattcaactttacaaaa

SEQ ID NO: 293083 - DNA, 710 bp, Homo sapiens
agatcatgatgggctcagtttgggacaggtggtcctacccttgaaaagagctgaaaagagaagcatggacaggaacataactgttagtaccctagatgagttctgagtgcgctctgcagaacactgccagtacatgaactttttattacagttctgtgatgtgagtacagatatgaagacttaacatttaaaaccttttgtcgcaatttgacagagtaattttatgtacccaacatatgtctttttaattttgttttgattgtattttttaaaaatggtaagtctgtgatggattgggaggggaagatactggtcttttaccacaggtagtttgagagccactgacctggaacacatatctaagataatgtagtttatctaagcacaatctgtttgcagcccaattgctcatttacaggggaagaaagagataggtattgtggttgtcaacccttattacctcatttgctcctaggttttgctgggcctgcgtgatactagcgattccattgtggcaattactctgcatagcctagcagtgctggtctctctgcttggaccagaggtggttgtgggaggagaacgaaccaagatcttcaaacgcactgccccaagttttactaaaaatactgacctttctctagaaggtaagaattattaaaaggtctaactttttgtgtgtcatttttttagatttttagtattatata

SEQ ID NO: 293084 - DNA, 3012 bp, Homo sapiens
  misc_feature (134)..(134): n is a, c, g, or t
  misc_feature (845)..(845): n is a, c, g, or t
agattaacggccgtcccgaatatgcagcagaggcacaggtctcccctactcatttcaaaatatattagccttgctctaattagatattaaattttaattccgttaaacttttttcttaagtgcacaaagcatcntactccctggaggcaaacacatcgggctgcttcagcgttagcgggatgcttagcattttgaatattgtggcaaaaaaattaaaagttcacttattaatatttatcagcagtatcataatttccatcctcttatttcagaatttcacttgaggcaaaaataccacaagtgtaattactctagcacagctattaatgtgctggatgataggccactgcgtcacatgaccttctattgttcatgggtttaaagagaaagcagggctttgtatttctttttcttcttttaaagtcgactgtagcatcttggcttttgtctggggtggggaggatctggggtctggttcactttgtaaaagtaaaccatgtctgtttaaacaatagaggtgtttaagaagactctttagttttcctgcagattgttcaagattacatgataatcacacggagtatttatttcctactgacaaaccaagtacttgttacatcaccaatggtaccaggagatgaagacgcgggttttgagcaggagcgagattaccacccaaaaaggagctacctgaggcagcccagcttctagcaaactttttacatgttgcacatttcagttcttaaatgaaggctactccagtgtcatttcattaaagtacctgggtgtagtactcaagtcccccctcaagagttcataagtaagcagtatccttttggccagtngtcctgtttttgcccctacccagactgttcgagaagcatattctatagataaatctgacatttgtcatccaataccattgcagtcctctgcagcatacattctcaatgggggctgtatcacccctagattggttctgagatactgcaatgtcttgtgtccttccaaaggaccataatacttgagcaaatatgaacatttcttggggtgagggcagaaagagagaaacaaaagtctaaaaagggacaataatgaaaaaacagttgagacctttagtatgatgggaacaggatgaggaaggaggagatactgacaggagccctgggtcttgctctgcattaaacagatatttatggacattaaacagatatttatggagcacgactctgtaccctacaggcccagaatagtcttaaggctcctgggaattgatgataggccatttacccagtttcagtttagaggcagattcactggccttagcatttcagtaattatatttatttatttttagcctgaaccagatttaataggagaaactactttctgcgtttcttttaattacttgtagtttacacagtaactttagaagagtaaatgaaagcatgcttcgatgctgccactgtaaataccattcattagtaacttattttccctggagtcttgtgaagtgtgaatttaaagcctgctctatctggaatatggaatagtattaagattacaagcacattttatattcatgagccggaaaggcaaaaaaaaaaaaaaagtgatcctccatcctctgaattctcttaactatgtgactaatttcaattagtatgctttgtcattacagaactgttcaggtttcatctctgaacatttgcttttggcatcttcttcagtagcccaaaactgtcctgccgttttccaagaacactttccgtccataatgaggcaaggggaataaattgatacaaattcatgatttgagaagtggattgtttccctctcttctacgagtttggatccctgatcagtagacagacacataagacaactttctactgtgcaaattaaataaggattctgccagcaggccttcctttccattaccgcctatttccatttttcaagacaagtaaaaataatagtggaacaatatcttcaaaaaaattactagagcaacataatgcatgatatacaatatataaaataggacagcagaatccactacagaaataaaacatgggacttgggacagattgcattatgctctgaaaagtgaagtaactaagggtaaccgtaaagcttcgtatttatagactgcctttcccctgaggatctcagagtggttaatgttccaggagcgagggtgcttatggacttctgcaccattacttaagcaacttcattttttggcagaggtgccagcttgatatgaaaccacatgctgtgcaaggaccatttatataattaactccatttttgtaacacacctgcttctaagtggacatcaactaccaaaaaaaaaaaaaaaaacactttgttaggcagaagcagttagtgaaaatttatctaaccttgggtgggttgctctgatcacttgcttaacagagagcgtgttcaagaagctctcttgcggatcaggcactgggatctctctgcagcccatttgatcattttttcaagggacaaggctggttttcatcacttacatcgttcttgcctgagaacccagggatcagtataagtgcttgcctttgtatgcgtttcactactgtggctgttgggtctcagcccatgttctatgatccaatcccaatcagcaatggccttgacctagaatactttgagagccaaagagaataaatactcatcccaagaaagttgccttctctagaggatgacaaactcatcccaatgaacacgttcatatcagcatttcaattttgtcttcacagtttttgaccagggaagctgctaaaataattaagctagcagcagccccacttttgccacattctgaccttggaatagtgaaattgtcttatgagagcttatcttatggtatttccagtggaaagacactcagcagaatttctgtgactgagacaacagtggtcacacctctctcagataaaagcagttaagatgcttgtccaactgcagtttgcaaaaaaaaaa

SEQ ID NO: 293085 - DNA, 1070 bp, Homo sapiens
  misc_feature (6)..(6): n is a, c, g, or t
gcggcncgcctcagtttccctggccgtaaaacgcgggcgatggcgctcgatgccccgggagacgccggggtccgcgggcccttccggcaccgggtcctccttcaggttcgggcacccggctgcctccacgcggggcgagcgcggcgatgggatcggtccgtgctgcgctcagccccgctttcgctatccctctgctccaggggcagcaaaatcagcagatgagcccccagcgcgcctgcggcccacacactgcggccgtaacagttaaacagacggggaacattcatgtgcgtagagctcttcacggggcgatacagaaatgtgtcgttctaaagcgttaacgacctgcaatttgcatatcctccaacacatggattttactgattcaattatggatgtgtgcaaagaatctgctgctcgggcgtggtgtcctcagtgctgagagagccccgcgacggcggtgcagctcctccagggcgcgcagccccgccacctggcgccaccgcgagggagcgcaggcccagggcccgggcagacgctggaggggacgcggcaggtgaagatggggcacctccacttcccttctaaaggagcctgggaataggctaggaaatgtccccactgtagaagacagcaggaacatctgacacgcggataacctgtgctgagctcgttatattcccagcatttaattctagccattaggcatgcgttagccacaacttcgcataggaaggttattgcagctatatgggaacactttcagtttcccaagttaaaacatgaaattgcacatcatcatttggatccccaaagaggaaaagaaaaattcacaacctgccagtgaaatactcaggccacttggatgaagaccgaggtcctccatagaatccaggtgttatttactaactaatcagaaattaatatcaaaataggacttaaaaataacaaggctgtgttattacagcagtctttccagttgtgtacgctttactaatctaaattgggtaacagaactggagaaaaggaagactacacagacttatcataagctgttagtgaacgtgata

SEQ ID NO: 293086 - DNA, 516 bp, Homo sapiens
cgcctcagtttccctggccgtaaaacgcgggcgatggcgctcgatgccccgggagacgccggggtccgcgggcccttccggcaccgggtcctccttcaggttcgggcacccggctgcctccacgcggggcgagcgcggcgatgggatcggtccgtgctgcgctcagccccgctttcgctatccctctgctccaggggcagcaaaatcagcagatgagcccccagcgcgcctgcggcccacacactgcggccgtaacagttaaacagacggggaacattcatgtgcgtagagctcttcacggggcgatacagaaatgtgtcgttctaaagcgttaacgacctgcaatttgcatatcctccaacacatggattttactgattcaattatggatgtgtgcaaagaatctgctgctcggtgagtcattgttaattgtcggctttggggggaatacataaaacgtggaatattggcaatttatcgtgtttcgaccttttataaaggcgtcaccaggctgct

SEQ ID NO: 293087 - DNA, 1526 bp, Homo sapiens
accgtcatcagttcctaaattcacctgcagggctagggccaggcgcactcaccccacagccagccccactgggcctcggaggcagaatacgggaagaaccgcgaaacaaccctaaaccaattctgaggaccacgaattcggattatccgggagttcttttgccatggcaccgcccccgccacttccgctaggaacccggaagttcctacccgacgccggaagtcccacggccttgcctcctcagattcctctctcacccccacgcagaggagagaacttgcttctggacccgggtgggtgccggctcggctctccttgtcttccagagcggtggcccggaagcacagtcctcccagacgccagcgccagaagctcggatcgcggctgcaccgggagagcgccgatctgggtgcgaggcaggtgcggggccatgaatgggaccgcaaacccgctgctggaccgcgaggaacattgcctgaggctcggggagagcttcgagaagcggccgcgggcctccttccacactattcgttatgattttaaaccagcatctatagacacttcctgtgaaggagagcttcaagttggcaaaggagatgaagtcacaattacactgccacatatccctggatccacaccacccatgactgtgttcaaggggaacaaacggccttaccagaaagactgtgtgcttattattaatcatgacactggtgaatatgtgctggaaaaactcagtagcagcattcaggtgaagaaaacaagagctgagggcagcagtaaaatccaggcccgaatggaacagcagcccactcgtcctccacagacgtcacagccaccaccacctccaccacctatgccattcagagctccaacgaagcctccagttggacccaaaacttctcccttgaaagataacccctcacctgaacctcagttggatgacatcaaaagagagctgagggctgaagttgacattattgaacaaatgagcagcagcagtgggagcagctcttcagactctgagagctcttcgggaagtgatgacgatagctccagcagtggaggcgaggacaatggcccagcctctcctccgcagccttcacaccagcagccctacaacagtaggcctgccgttgccaatggaaccagccggccacaaggaagcaaccagctcatgaacaccctcagaaatgacttgcagttgagtgagtctggcagtgacagtgatgactagtgctggatctttcgaaacctactttttggtgcacaaacatgccgcaagactgagctactttggcgtggagtccattgcaagaggaaaatgttatggatcagtgactgtagtaggagtttgaggctctggaactctcacatattcaagtctttaacttagtggtgatgggtgattttctcgtgtcatttttgaacaatctcatctttcaaagtttaagtagacctgtagaagagctaacagaattatatttctatttagttaaaattgttaatgaaaaacagataaatgt

SEQ ID NO: 293088 - DNA, 756 bp, Homo sapiens
ctttttattttcggcccactttcaatatacgctaaaatcagtgtgcgtatcgtccggcggcgtgaagcttaatgaagacacgccgataacggtagcctatttaacagtttctgcgtatattagtcgacctaatggtcgacaagcaatttcacgggttatacctcggatgcttgggatggccggtttaacatcatttaagtataattaaaccgcttgccctagtcgtaacaccagagaacagttagtcagtaaacgaggattcatgcattaaccctctccaaagggtagctttagtcagtggctgcatctttgtttatttcatttttttttttaatgtaagatcacaatgaatctttgtcttttatattattgcaatttaaacttcctacttttaaaaatgtttagatttctaaagtggcaacttaaggaaaaaagtaattttggggagtggggtggggtggacttcatgctaggcaggtgcttgattaaaaataattcttgtaatcctagcattttgggaggtggaagtgggtggatagcttgagttcaggagttaaagaccagcctgggcaacatggtgaaaccccgtctgtaccaaaaatacaaaaaattagctgggggtgatggcacatgtctgtggttgcagctgcttgggaagcggagctgggaggatcgcttgagcctgggaggtagaggttgcagtaaaccaagatcacgccactgcactccagcctgggcgacagagtgagactcccc

SEQ ID NO: 293089 - DNA, 1400 bp, Homo sapiens
accgtcatcagttcctaaattcacctgcagggctagggccaggcgcactcaccccacagccagccccactgggcctcggaggcagaatacgggaagaaccgcgaaacaaccctaaaccaattctgaggaccacgaattcggattatccgggagttcttttgccatggcaccgcccccgccacttccgctaggaacccggaagttcctacccgacgccggaagtcccacggccttgcctcctcagattcctctctcacccccacgcagaggagagaacttgcttctggacccgggtgggtgccggctcggctctccttgtcttccagagcggtggcccggaagcacagtcctcccagacgccagcgccagaagctcggatcgcggctgcaccgggagagcgccgatctgggtgcgaggcaggtgcggggccatgaatgggaccgcaaacccgctgctggaccgcgaggaacattgcctgaggctcggggagagcttcgagaagcggccgcgggcctccttccacactattcgttatgattttaaaccagcatctatagacacttcctgtgaaggagagcttcaagttggcaaaggagatgaagtcacaattacactgccacatatccctggatccacaccacccatgactgtgttcaaggggaacaaacggccttaccagaaagactgtgtgcttattattaatcatgacactggtgaatatgtgctggaaaaactcagtagcagcattcaggtgaagaaaacaagagctgagggcagcagtaaaatccaggcccgaatggaacagcagcccactcgtcctccacagacgtcacagccaccaccacctccaccacctatgccattcagagctccaacgaagcctccagttggacccaaaacttctcccttgaaagataacccctcacctgaacctcagttggatgacatcaaaagagagctgagggctgaagttgacattattgaacaaatgagcagcagcagtgggagcagctcttcagactctgagagctcttcgggaagtgatgacgatagctccagcagtggaggcgaggacaatggcccagcctctcctccgcagccttcacaccagcagccctacaacagtaggcctgccgttgccaatggaaccagccggccacaaggaagcaaccagctcatgaacaccctcaatgtgacttctgccatgattgtgaggcttccccagccacgtggaactaaaccccagtgtgatggtggaagcagcatgaaaacaacatctccccaggcctcgcagtagaggcgaagggaacagggctgcccatgtgcctgtctctaaagacgccaccctcaggttgatgtcacctgtgggagaccgggtccacctacagacaccaggtgat

SEQ ID NO: 293090 - DNA, 1389 bp, Homo sapiens
accgtcatcagttcctaaattcacctgcagggctagggccaggcgcactcaccccacagccagccccactgggcctcggaggcagaatacgggaagaaccgcgaaacaaccctaaaccaattctgaggaccacgaattcggattatccgggagttcttttgccatggcaccgcccccgccacttccgctaggaacccggaagttcctacccgacgccggaagtcccacggccttgcctcctcagattcctctctcacccccacgcagaggagagaacttgcttctggacccgggtgggtgccggctcggctctccttgtcttccagagcggtggcccggaagcacagtcctcccagacgccagcgccagaagctcggatcgcggctgcaccgggagagcgccgatctgggtgcgaggcaggtgcggggccatgaatgggaccgcaaacccgctgctggaccgcgaggaacattgcctgaggctcggggagagcttcgagaagcggccgcgggcctccttccacactattcgttatgattttaaaccagcatctatagacacttcctgtgaaggagagcttcaagttggcaaaggagatgaagtcacaattacactgccacatatccctagctgagggcagcagtaaaatccaggcccgaatggaacagcagcccactcgtcctccacagacgtcacagccaccaccacctccaccacctatgccattcagagctccaacgaagcctccagttggacccaaaacttctcccttgaaagataacccctcacctgaacctcagttggatgacatcaaaagagagctgagggctgaagttgacattattgaacaaatgagcagcagcagtgggagcagctcttcagactctgagagctcttcgggaagtgatgacgatagctccagcagtggaggcgaggacaatggcccagcctctcctccgcagccttcacaccagcagccctacaacagtaggcctgccgttgccaatggaaccagccggccacaaggaagcaaccagctcatgaacaccctcagaaatgacttgcagttgagtgagtctggcagtgacagtgatgactagtgctggatctttcgaaacctactttttggtgcacaaacatgccgcaagactgagctactttggcgtggagtccattgcaagaggaaaatgttatggatcagtgactgtagtaggagtttgaggctctggaactctcacatattcaagtctttaacttagtggtgatgggtgattttctcgtgtcatttttgaacaatctcatctttcaaagtttaagtagacctgtagaagagctaacagaattatatttctatttagttaaaattgttaatgaaaaacagataaatgt

SEQ ID NO: 293091 - DNA, 1019 bp, Homo sapiens
ctatacatttgagctcatcgagggcagtaaatattctattcatgtctgtatccctgatacataatatagtactggattacagtagacactcaaatgttgaatgaatagctcacatgacaaaattacaagtatcagtattttgaagtggtctggaaagaacatggggttctacagagacttctgagttttcagtcacctggacaaatttgagaaccactatttttgccctgctaatttaatgtctgtatctcctttcagagctgagggcagcagtaaaatccaggcccgaatggaacagcagcccactcgtcctccacagacgtcacagccaccaccacctccaccacctatgccattcagagctccaacgaagcctccagttggacccaaaacttctcccttgaaagataacccctcacctgaacctcagttggatgacatcaaaagagagctgagggctgaagttgacattattgaacaaatgagcagcagcagtgggagcagctcttcagactctgagagctcttcgggaagtgatgacgatagctccagcagtggaggcgaggacaatggcccagcctctcctccgcagccttcacaccagcagccctacaacagtaggcctgccgttgccaatggaaccagccggccacaaggaagcaaccagctcatgaacaccctcagaaatgacttgcagttgagtgagtctggcagtgacagtgatgactagtgctggatctttcgaaacctactttttggtgcacaaacatgccgcaagactgagctactttggcgtggagtccattgcaagaggaaaatgttatggatcagtgactgtagtaggagtttgaggctctggaactctcacatattcaagtctttaacttagtggtgatgggtgattttctcgtgtcatttttgaacaatctcatctttcaaagtttaagtagacctgtagaagagctaacagaattatatttctatttagttaaaattgttaatgaaaaacagataaatgt

SEQ ID NO: 293092 - DNA, 430 bp, Homo sapiens
tgtgtgcaacagaaggcaatctgaacataagaacaaattaagacagcctagaaattgcacagatgaagaatctacaaacaaggacattaaagaatattaaagcagcacagagaagttatttccaagaattcaagaagcttcaaaaaacaaaagttacaccaacacttgtgaagctggcctaatacacagcatgtgcacaaaccaagacttatgtggctgatggcaccttttcatccagagctttgtggtgttcaaataaggacttcagtgctttcagcacttccacttcgctggacacgcctgctggagactgcgcttgtctcttcaccacggtcatcctaagagaccgctcatgcctggagacaaggcattccaaatgctctaacagcagctgaaataaaaggccaaaataaagacttgttaaacagca

SEQ ID NO: 293093 - DNA, 447 bp, Homo sapiens
ctcccccaccaacctcagtggttcagtggtgtctgcaaaatgcatccatcctgccatctgagtagcagaactgtaagagaaagcaacattcacctttgtgtcacagatcaaatggtaacccactgaagaccaccccattaccttgtgctagaacggaactgcctctgccatctctctttaacagaagcacatcctgagaacctgagagctcaaggtaagtggctgaacactgtcaacacatacagacatctaactgtctccttactgtacagccatagcaagaaacaaacgcatgcaatgctgtcaaggtagaagacaccactgtttactaccccagtcccaaatatctgtgtacgttagcacagcctacctagctcttctgtcattgtctttttaagtaaacattatacatttgaactgaatttgtagcaatgacatactgctttt

SEQ ID NO: 293094 - DNA, 579 bp, Homo sapiens
cagctagcttgctgcagcgcgagctgtttttcagctgaaaggcgccccctgggtcctaagcctcctaggtcatgcaaaatctaactgagccaagaaaggaactcagccaagagatatgcaggttgtgcttagcagccgatcagtttgagacctgcgaggccgcatccccagggtttttcatctcttctgtttccatttgtaactgtaagagaaagcaacattcacctttgtgtcacagatcaaatggtaacccactgaagaccaccccattaccttgtgctagaacggaactgcctctgccatctctctttaacagaagcacatcctgagaacctgagagctcaaggtaagtggctgaacactgtcaacacatacagacatctaactgtctccttactgtacagccatagcaagaaacaaacgcatgcaatgctgtcaaggtagaagacaccactgtttactaccccagtcccaaatatctgtgtacgttagcacagcctacctagctcttctgtcattgtctttttaagtaaacattatacatttgaactgaatttgtagcaatgacatactgctttt

SEQ ID NO: 293095 - DNA, 354 bp, Homo sapiens
cagctagcttgctgcagcgcgagctgtttttcagctgaaaggcgccccctgggtcctaagcctcctaggtcatgcaaaatctaactgagccaagaaaggaactcagccaagagatatgcaggttgtgcttagcagccgatcagtttgagacctgcgaggccgcatccccagggtttttcatctcttctgtttccatttgtgtgagtacagaaaaaataattctatcaaggggcatcatgggatgtgggaaattataagcactaaaacacagaacaacttagggagctatgcacccaggaggaattcatgaccacataggggggaaaaaataagagtttctggtggggagtggag

SEQ ID NO: 293096 - DNA, 904 bp, Homo sapiens
ctcgtgcatgccaccacgcccggctaatttttgtatttttagtagagacagggtttcaccatattggccaggatggtctcgatctcttgacctcgtgatccacctgcctcggcctcccaaattgctgggattacagcactgtgccctcctaggaaattattttttaagtgaaattttatttttattttttttaggattttggtagagaatgagtaggcctactcatcaatatcaaacaggacatttagtttctttccttagaacagacataaatttaatttcatggtaatatgataataagaaaatgcttctatttttctttagcacctccatggttctcatatacccatgtctgtaaaaagtgacatgagaattttgttgggttacattttattgtatttattagattcgcttatatagatgacttaggcagaaataaagtcatgtctttagaaggtgaacaagccaacttgtgatggcctgccttttgcttttggcagttgggatgagaacaattgactctcccattggttgttagatagttgaaatggtgcgttggtggtcatacttagtgttctaggctgtgaaatcatggagttcttccacttccaagaatgactcatttgctgttggattctagtacagaatttagcagcctgatgtgtccccaaactgatttaatttctactgaagtgcccttgtgtacatttgttttgtaatttaccaaagtactacctgagtgtataatgactcctgcagtgagttaatgtaattgctgctttgaccattgttttaaatctgtgtactagagtaactgtgagcagaatgaaatcacattatctcagtgttcaaaatatcattctaataaagtacatgcattaaacaattttaaaaatccaactgt

SEQ ID NO: 293097 - DNA, 966 bp, Homo sapiens
tgttgctgcctccccccgacccccacaccatcccccgccacaacactatataggaatcctgctctgtcacccaggctagagtgcagtggtacaatctcggctcatggcaacctctgcttcccaggttcaagcaattctcctggctcagctctccgagtaactgggactacaagcttatgaaaatcaacaccaaaaatcaattatttcactggtaccttggaaagctaagtagtgttggaacatgacaagttagatgaaagacctttggacatttttcgcagcacaagagatctcctccgttttggcagacagcacaccagtcttcatttgggtcatcatctttattgttgccatctcctccaatccttgccgacctgtgcatgaggcttcgaattggggactttccattaacaaggctgctgagccctgactgtttgcagctttcattcatatctgcaggttcagttttcacatggttttccaggcttgccaatgcatccaattcactttctagatgcaggttggttgagagaggtggtgtcaagctactctcaggactgctcaactaaaacaaaacgatgacaaattcttgaagaatcatttaatctttattgtatgccatatgtgtatttaacagttatgtgaatatgcatatagatatactgacgtaacaaatttattttatagatcacaatagtgccataaagaaatgacaataaccccaaaattattcaggcacgctaacatatgattttaaggggtctgctcctctgataatgtctcactcaataataagtaaattaattaaactgttaagctattgattgggaagtgagcatagggttatacttttccttgagagagctaattatggcacaccccttttcacacccagaatcttttgcatagcattttagaagcattctataatattcttctgctcacctatcattctactatattgta

SEQ ID NO: 293098 - DNA, 398 bp, Homo sapiens
caatttatagcaagaaaaaagctgggtttaccccaagaatactgacttactttcaccaaaaagaaattgggggacaagagaggaaggagaagactgaaaaaaacaagtatgactctactattttatggtctctgaaatcaagagacaagaggttgcatgaacataaaataataaatggaagggaagaactacagctctgctaaaccaaaacctaccacttgtagatgcaaaaactgatccctgataattagtgaattgctcaagcttactacagaattagaaccagactgcaggttttgtaaccttagccccctattaatttagagttttatctattttccttatactgaatataaactaaaggccaggagatgaaatctactctttaacattaatgt

SEQ ID NO: 293099 - DNA, 334 bp, Homo sapiens
tggggttttgccatgttggccaggctggtctcaaactcctgacctcaagtgctccgcctgcctcagcctcccaaagtgctgggattacaggtgtgagctaccacacctggctaatttacgccaacattttacaaccctttcaaagcatttgctattgaaagaaggcattcagtggcaaaattctgacattccagtaaatattactacccaaagaaaagaaaattcttaatttcaagatcaaagtgccaatgcttttcttttctaaataagagtaaagaaaaagaaggcccttattacatctctagcaaataactctatctccaaagacttaggt

SEQ ID NO: 293100 - DNA, 709 bp, Homo sapiens
atttgtttttcttttttagagacggagtcctgctctgtcacccaggctagagtgcagtggtacaatctcggctcatggcaacctctgcttcccaggttcaagcaattctcctggctcagctctccgagtaactgggactacaaggtgtgtgccaccatgcctggctaagttctttttttttttgtatttttagtagagatggggttttgccatgttggccaggctggtctcaaactcctgacctcaagtgctccgcctgcctcagcctcccaaagtgctgggattacaggtgtgagctaccacacctggctaatttacgccaacattttacaaccctttcaaagcatttgctattgaaagaaggcattcagtggcaaaattctgacattccagtaaatattactacccaaagaaaagaaaattcttaatttcaagatcaaagtgccaatgcttttcttttctaaataagagtaaagaaaaagaaggcccttattacatctctagcaaataactctatctccaaagacttaggtaagaaattacaattcttcagaaaaatattctggcactgtttaaatatctactagttttctaatccaaaaggttaacactttcaaagagggcactattattcaattaaagttactgcttctcaggaatttgagaagatatatcttttttttttttttttttcaatttatagcaagaa

SEQ ID NO: 293101 - DNA, 1459 bp, Homo sapiens
attccgaaagaaacgtgtcaggcaagaagcgctagttcacgcctgtcattccaccgctttgggaggccaaggcagggggatcacttgccccagaagtttgagaccagcctgggcaacatagtgaggcccctgtctctacaaaaaacttaaaatcaataaacaggtctccttccttcctcaatagtcctgttggtggctcacctctctgcctctccagatgtgaggcagatccacacgtttagctattgagataaggctgggcgtggtggctcacacctgtcattccggcctcagatctcttgtgcccaggagttttaagactagcctgggcgacctggctggcaacatggcctccacaaaaataaataaaacattttaaatatataaacattgagataatagcatcttgatgcctgtcttcattttttgtcttctgttttaaggactattagagacaaactaaccaaagataattctcccctcccacgtggctcgtgctgggacgccggcaccgtgagatggcgcccgtggccagatagagggtggcgtgtaaagcaggtggtcacccgtcactcgacttttcgcgtgctggtgagggtggtcgcatgtccatggatcagggctcacacctggcccatctggtggctgtgccatgggaggagcagagccacagccccgctccttgctgtgggtttcccgtgtcctccctgccctgcagtcccctgactccagctctggattagacaccccctgcttcccactgtgcacccgcccagagaagcacagcatgcgtgcctgcacttgcccccacgctgctaccctgctctgggtaccaaggacacaggcacagcagagcccccaccctcgaggcacctgtcatcttgtgacagggacaggctgaggggcaaatgaccagaaagggtggcaagtgccatgtcagacatatggtcttcatacaggggatgtcccaggactgctgggccagagacccctccatgtgggtcagcatcacccaagccaaaggccaaggaggtctcttggggggtgtggccgtcagaacaaagctgccaatgcgcgtacttttaaaggtgcggtcagctagtgaggctgtggctggccctggctgcatccagaccctggagtgtcctgcagccaggggcggatgcaggttttgtggggcctgaggcttctgtggtttaagggaccttccttaagaaaatacaaaattaggaacaggccttgaagcttctgctgctaaacagggtcaggtgaacccactgccagctgtgcccagaagacagtcccccaggctgagtcaaaagtggttcataggccggtcatggtggctcacgcctgtaatcacagcactttgggaggccaaggtgggcagatctcaaggtcaggagatcaagaccatcctggctaacacagtgaaaccccgtctctactaaaaaactac

SEQ ID NO: 293102 - DNA, 602 bp, Homo sapiens
attccgaaagaaacgtgtcaggcaagaagcgctagttcacgcctgtcattccaccgctttgggaggccaaggcagggggatcacttgccccagaagtttgagaccagcctgggcaacatagtgaggcccctgtctctacaaaaaacttaaaatcaataaacaggtctccttccttcctcaatagtcctgttggtggctcacctctctgcctctccagatgtgaggcagatccacacgtttagctattgagataaggctgggcgtggtggctcacacctgtcattccggcctcagatctcttgtgcccaggagttttaagactagcctgggcgacctggctggcaacatggcctccacaaaaataaataaaacattttaaatatataaacattgagataatagcatcttgatgcctgtcttcattttttgtcttctgttttaaggactattagagacaaactaaccaaagataattctcccctcccacgtggctcgtgctgggacgccggcaccgtgagatggcgcccgtggccagatagagggtggcgtgtaaagcaggtggcatcagataaacacccggtacagagctcgattcgtagata

SEQ ID NO: 293103 - DNA, 578 bp, Homo sapiens
ctgtatgtgtgtgtgtatgtgtgtagagactgggtttcgccatgttgcccgtgtgtgtgtgtgtgtgtgtgtgtgtgtttgtgtgtgtagagactgggtttcgccatgttgcccaggtgtgtgtgtgtgtaaagactgggtttccccatgttgcacaagctggtctattctcaaactactgagctcaggcaatctgcccaccacagtctcccaaagtgcttggattacaggcagaagccacagtgcctggccagcataaactattctaaatagctttttttatttaactaataaatctagacagattaaacattttagaggacctctaaaatactatgccctgtggaaaacaagacaaagcactaattccatacagcttgccttgggacagattctcccttcagtctcatctgtgtaatacttattattctcaaagaaagtgaacacatagagcgacatttaaattccaagatgtaacaaaaccttaatgttaacattaaaaaattaaaatctcagagtgtgccacaccataggtgcttaattaaaaaaaaacatactaaacagtgaaaatggatgac

SEQ ID NO: 293104 - DNA, 680 bp, Homo sapiens
ctgtatgtgtgtgtgtatgtgtgtagagactgggtttcgccatgttgcccgtgtgtgtgtgtgtgtgtgtgtgtgtctgtgtgtgtagggactgggtttcaccatgttgcccaggtgtgtgcatgtgtgtgtgtgtgtgtgtgtagggactgggtttcaccatgttgcccaggtgtgtgtttgtgtgtgtagagactgggtttcgccatgttgcccaggtgtgtgtgtgtgtaaagactgggtttccccatgttgcacaagctggtctattctcaaactactgagctcaggcaatctgcccaccacagtctcccaaagtgcttggattacaggcagaagccacagtgcctggccagcataaactattctaaatagctttttttatttaactaataaatctagacagattaaacattttagaggacctctaaaatactatgccctgtggaaaacaagacaaagcactaattccatacagcttgccttgggacagattctcccttcagtctcatctgtgtaatacttattattctcaaagaaagtgaacacatagagcgacatttaaattccaagatgtaacaaaaccttaatgttaacattaaaaaattaaaatctcagagtgtgccacaccataggtgcttaattaaaaaaaaacatactaaacagtgaaaatggatgac

SEQ ID NO: 293105 - DNA, 1104 bp, Homo sapiens
gcagaatgaggaggcccccgagctggctgttctaacttagaaggaagagaagactggatgggcctgcttgggatctaggcctcttctaaaccctatcctaagctccagttccatggcaaggctcagacttttaatgccatcttaatctgatggttgagcgcttcactctattttctggtgctgcccagccagtgccttctgccatggatgttactggctacttgagaaaaaggagaggggagaaccccttctttcattccaactgcctccgaccccaaagggattcttggctctctggtaaccatggataccaccatgaattttatttggatcctcagcaggttgattctggaggcctcatgctatgactttttatttctcttcctgggatccaccaccctctactctcagctgactgctgcatttaggccaggtctccaattgctttcctccagaaagtgtgttcccgtctagtgaggtagtattgaagcctcggctttccctctggagcctgggaccctgtttacagttgcacatctgggcccctcactgtggggattgatcattctcatgaaggaatcacagttatatggcaactgcagaaggctgagcctcctcatggtgctataaccccttgggacactcatccagacttctctgaagcagaaaacctgagctccccactcactgccctagaatttatggcaaggagcaaatctacagcattctctcccacctacgtcctgcttcttggttgagactactgggatccttcagaaaagaaacactgggtcccatagctaaattctcaaccgccaggcaccttcagaagaatccagcctaatactggaatttgtgctattatcttcctctccagccccccaactccatccctcaccacagttgtctaggaaatgacatgaattcaatatctaatgtcaaccaatggggagagccacaactccaggagaggttcctgagctgagtcccttaatttctggatgaagaagaccaacaagttttgtccaatgtatttgtttctcagaccttgcctaggcactaaaaataaaatactaggtcattggaggctaatgtgggaaatga

SEQ ID NO: 293106 - DNA, 384 bp, Homo sapiens
gcagaatgaggaggcccccgagctggctgttctaacttagaaggaagagaagactggatgggcctgcttgggatctaggcctcttctaaaccctatcctaagctccagttccatggcaaggctcagacttttaatgccatcttaatctgatggttgagcgcttcactctattttctggtgctgcccagccagtgccttctgccatggatgttactggctacttgagaaaaaggagaggggagaaccccttctttcattccaactgcctccgaccccaaagggattcttggctctctggtaaccatggataccaccatgaattttatttggatcctcagcaggttgattctggaggcctcatgctgaggatccaaaaaaaaaaaa

SEQ ID NO: 293107 - DNA, 970 bp, Homo sapiens
gcagaatgaggaggcccccgagctggctgttctaacttagaaggaagagaagactggatgggcctgcttgggatctaggcctcttctaaaccctatcctaagctccagttccatggcaaggctcagacttttaatgccatcttaatctgatggttgagcgcttcactctattttctggtgctgcccagccagtgccttctgccatggatgttactggctacttgagaaaaaggagaggggagaacccagtccccttgacttcccttttgagagcacacgtactgctgcatttaggccaggtctccaattgctttcctccagaaagtgtgttcccgtctagtgaggtagtattgaagcctcggctttccctctggagcctgggaccctgtttacagttgcacatctgggcccctcactgtggggattgatcattctcatgaaggaatcacagttatatggcaactgcagaaggctgagcctcctcatggtgctataaccccttgggacactcatccagacttctctgaagcagaaaacctgagctccccactcactgccctagaatttatggcaaggagcaaatctacagcattctctcccacctacgtcctgcttcttggttgagactactgggatccttcagaaaagaaacactgggtcccatagctaaattctcaaccgccaggcaccttcagaagaatccagcctaatactggaatttgtgctattatcttcctctccagccccccaactccatccctcaccacagttgtctaggaaatgacatgaattcaatatctaatgtcaaccaatggggagagccacaactccaggagaggttcctgagctgagtcccttaatttctggatgaagaagaccaacaagttttgtccaatgtatttgtttctcagaccttgcctaggcactaaaaataaaatactaggtcattggaggctaatgtgggaaatga

SEQ ID NO: 293108 - DNA, 909 bp, Homo sapiens
gcagaatgaggaggcccccgagctggctgttctaacttagaaggaagagaagactggatgggcctgcttgggatctaggcctcttctaaaccctatcctaagctccagttccatggcaaggctcagacttttaatgccatcttaatctgatggttgagcgcttcactctattttctggtgctgcccagccagtgccttctgccatggatgttactggctacttgagaaaaaggagaggggagaaccccttctttcattccaactgcctccgaccccaaagggattcttggctctctggtaaccatggataccaccatgaattttatttggatcctcagcaggttgattctggaggcctcatgctatgactttttatttctcttcctgggatccaccaccctctactctcagctgactgctgcatttaggccaggtctccaattgctttcctccagaaagtgtgttcccgtctagtgaggtagtattgaagcctcggctttccctctggagcctgggaccctgtttacagttgcacatctgggcccctcactgtggggattgatcattctcatgaaggaatcacagttatatggcaactgcagaaggctgagcctcctcatggtgctataaccccttgggacactcatccagacttctctgaagcagaaaacctgagctccccactcactgccctagaatttatggcaaggagcaaatctacagcattctctcccacctacgtcctgcttcttggttgagactactgggatccttcagaaaagaaacactgggtcccatagctaaattctcaaccgccaggcaccttcagaagaatccagccagtagtgggtcagccagtagtgggtcagccagtagtgggtcccagtagtaggtcagccagtagtgggt

SEQ ID NO: 293109 - DNA, 1274 bp, Homo sapiens
agcgagtcctccgccgtggccgaaggcggccgccatggcgccggcagtgccagcgggcgtcttgcgacccggctcgggcttcgccaccattcactgtgcttctcaagccacttcggcactctaatttcgccctgctctctctagacgatttttaatacctgggaaagttactccccagtctaacctaaaaaggtagaattgatggggtggggaattaacaggaaggcatgatcctcgaggataacgctgaccaggcgcttcttccaacaagcctgtttccctctctgtcgccaccgtaggagttcctacagctctcccgcacattctgtacggattgttttttagtcaagacgttctgtgcgagaggagaagttactttatgaacaccctaacaggggatcttacgacctcttccccgctctccactcagtccttttaaaaacgcgaggcaggatgaagaacgctattgaagtacattctaaaatgatcccacctgcaatttggatttttggagaatcgggatcggtgtaaaattctacatgcatacacgtatttgcacaagaatatttatagcaacgtggtttttaataggaaactatctaaatgttcattacaagtgaattacataaagctcaatacatccatactacgaatcactgaagagctgctaaaatagatgaaatatatttataatggcatgaacaaccgacacaagacagttgcagagtaatgtgtatttgtgattacatttatgtttttaagttatacaaacgcgtatgtgcctatgtgtatgtaaattcataggaagacaaatcagaggacggtggttacctggggaaaagcatgtgttgtcctagggtatagctttgcaggagagcttggcagagcctgccaaacctgatcagcttttccacctctcagctactgctttcggctccccagcctcataaactctcagctgccacattacaaatcagcagatgtcttgaggtgaaatgtggtgccaaatgtcaagctcaactttttggatcatctctcctgaatttcagttcctcgaatcctcactgtcctgggtctccaatgccttcaaaaaggattttagcaaaaaaagcaaaaatggaaaaattggataacatcaaacttaaaaacttctgcatgttaaagtaaataatcaacacagtgaaaaagcaagctatggaatgggagaaaacaattgcaaatcatatgtctgataagggattgatttccacaatatgtagagaactcttacaact

SEQ ID NO: 293110 - DNA, 367 bp, Homo sapiens
tggaagattgcggtatgttttgcgctttttattgtgatgctgaatccactttgtgtatttttcttgaagcagactggataagggataaatacaaataacaaacacgatcatgataactagcatagggtagatgctttaacaacattcaagtcaatgaatgagataattatgctctaagcattgtgttcctgttttcatttagactccagttttatcttagatattataacattttgaataacaaatttggttgatggtttaaatctttgtgagcatatttatagaaatcatgagtttccctttgtgttttcagatacactcacagaatattttccatttcctctctggctgggaaacatgtgtataa

SEQ ID NO: 293111 - DNA, 449 bp, Homo sapiens
tgcggccgccatcggcacggacttctggtatatcattgacaccgagcggctggagaggactggcccgggggcgcaggacctgctggggtccatcaatcgcagccagcccgagcctctgagctcccactccggcctctggcggacctgccgggagcccgtgcacaccgctgatgaaccccttcaggctggagaacgtgacagtcagcgaatcgagccggcaacttctcaagatagcgtcttgctgtgttgcccaggctggtctcaaattcctggcttcaagtgatcctcttgcttcagcctcccaaagtgctgggattacaggctgtacaagaagcacagcagcttctgcttctggggagccctcaggaaacttacaatcatggcggaaggtgaaagcccgaactctcatcttgatcgcgatacaaaataaatattggctctatcagaac

SEQ ID NO: 293112 - DNA, 356 bp, Homo sapiens
tgcggccgccatcggcacggacttctggtatatcattgacaccgagcggctggagaggactggcccgggggcgcaggacctgctggggtccatcaatcgcagccagcccgagcctctgagctcccactccggcctctggcggacctgccgggagcccgtgcacaccgctgatgaaccccttcaggctggagaacgtgacagtcagcgaatcgagccggcaacttctcagctgtacaagaagcacagcagcttctgcttctggggagccctcaggaaacttacaatcatggcggaaggtgaaagcccgaactctcatcttgatcgcgatacaaaataaatattggctctatcagaac

SEQ ID NO: 293113 - DNA, 212 bp, Homo sapiens
cagattttcagtgcctcacttatactaggaaacaaaaacagctagagctgttatgaattcaactttacttctcatctacatgaggctgtacaagaagcacagcagcttctgcttctggggagccctcaggaaacttacaatcatggcggaaggtgaaagcccgaactctcatcttgatcgcgatacaaaataaatattggctctatcagaac

SEQ ID NO: 293114 - DNA, 1040 bp, Homo sapiens
tgcgtccagtgctgcttccagcgctagccccaggggcacgaaggctggtgtagggaggtgcgcccctccgggggcccgccagccgtcagactcgaagctgtggctgtcattgcttctacaatcagtgcatgttcttcgctgacgtcagtcggagctgtcctggcactatataaggctggcgacagccccgggacagaccctgtgttccccaaggcgtcttcagcctgccccgagggacagagactggagctcaatcttggaccgtacagacgctcgccgacaacctggccggcggcaccatgaggcaggcgggacgcgcagcgctgctggccgcgctgctgctcctggtacagctgtgccctgggagcagccagaggagccccgaggcggccggggtccaggacccgagtctgcgctggagccccggggcacggaaccagggtggcggggcccgcgcgctcctcttgctgctggcggagcgcttcccgcgccgcgcggggcccggccgattgggactcgggacggcaggcgagcggccgcggcgggacaacccttctctgtccattgacctcacctttcacctgctgcggaccctgctggagctggcgcggacgcagagccagcgggagcgcgccgagcagaaccgcatcatattcgactcggtgggcaagtgatggcccggtttggggctgcgaaaacgttgacccctttcccccaccccagagttgggatgcggggcagagccaccagggcactgtctgcgtgactattttttaataaaagtactgaagacccgttggcttttgtcgtagaggcagggcagtcacagcagcgtgggaacccgtgggaaggtggggcccccgggccagcgggaggggaacaaaatgctgtggggggctccgagacagcggctttcagccaggtcagccaggtgcatgtggaccccaagggtccccaaatccccaggacctcagaggtcccggcaccaccgccccgccctcggccctcttcccagggcgctgggctcaccagttcgctcc

SEQ ID NO: 293115 - DNA, 1291 bp, Homo sapiens
tgcgtccagtgctgcttccagcgctagccccaggggcacgaaggctggtgtagggaggtgcgcccctccgggggcccgccagccgtcagactcgaagctgtggctgtcattgcttctacaatcagtgcatgttcttcgctgacgtcagtcggagctgtcctggcactatataaggctggcgacagccccgggacagaccctgtgttccccaaggcgtcttcagcctgccccgagggacagagactggagctcaatcttggaccgtacagacgctcgccgacaacctgtgagtggctcagagcgtccgcccagcctccccctgcaccaggactccgctcagctcagccaccacgctcctccggggagggaggctgggtggaagggatggaacagcactggcgcagtggctggggctggagggcaggctgcgggcattgggcggcggccggaggggtcgccgggcgagcgcggggaggggagcggcggcctgcagctgtcccaggcgcacctcaccctgcgctgcccctgtgtgtccagggccggcggcaccatgaggcaggcgggacgcgcagcgctgctggccgcgctgctgctcctggtacagctgtgccctgggagcagccagaggagccccgaggcggccggggtccaggacccgagtctgcgctggagccccggggcacggaaccagggtggcggggcccgcgcgctcctcttgctgctggcggagcgcttcccgcgccgcgcggggcccggccgattgggactcgggacggcaggcgagcggccgcggcgggacaacccttctctgtccattgacctcacctttcacctgctgcggaccctgctggagctggcgcggacgcagagccagcgggagcgcgccgagcagaaccgcatcatattcgactcggtgggcaagtgatggcccggtttggggctgcgaaaacgttgacccctttcccccaccccagagttgggatgcggggcagagccaccagggcactgtctgcgtgactattttttaataaaagtactgaagacccgttggcttttgtcgtagaggcagggcagtcacagcagcgtgggaacccgtgggaaggtggggcccccgggccagcgggaggggaacaaaatgctgtggggggctccgagacagcggctttcagccaggtcagccaggtgcatgtggaccccaagggtccccaaatccccaggacctcagaggtcccggcaccaccgccccgccctcggccctcttcccagggcgctgggctcaccagttcgctcc

SEQ ID NO: 293116 - DNA, 1017 bp, Homo sapiens
tgcgtccagtgctgcttccagcgctagccccaggggcacgaaggctggtgtagggaggtgcgcccctccgggggcccgccagccgtcagactcgaagctgtggctgtcattgcttctacaatcagtgcatgttcttcgctgacgtcagtcggagctgtcctggcactatataaggctggcgacagccccgggacagaccctgtgttccccaaggcgtcttcagcctgccccgagggacagagactggagctcaatcttggaccgtacagacgctcgccgacaacctggccggcggcaccatgaggcaggcgggacgcgcagcgctgctggccgcgctgctgctcctggtacagctgtgccctgggagcagccagaggagccccgagtctgcgctggagccccggggcacggaaccagggtggcggggcccgcgcgctcctcttgctgctggcggagcgcttcccgcgccgcgcggggcccggccgattgggactcgggacggcaggcgagcggccgcggcgggacaacccttctctgtccattgacctcacctttcacctgctgcggaccctgctggagctggcgcggacgcagagccagcgggagcgcgccgagcagaaccgcatcatattcgactcggtgggcaagtgatggcccggtttggggctgcgaaaacgttgacccctttcccccaccccagagttgggatgcggggcagagccaccagggcactgtctgcgtgactattttttaataaaagtactgaagacccgttggcttttgtcgtagaggcagggcagtcacagcagcgtgggaacccgtgggaaggtggggcccccgggccagcgggaggggaacaaaatgctgtggggggctccgagacagcggctttcagccaggtcagccaggtgcatgtggaccccaagggtccccaaatccccaggacctcagaggtcccggcaccaccgccccgccctcggccctcttcccagggcgctgggctcaccagttcgctcc

SEQ ID NO: 293117 - DNA, 682 bp, Homo sapiens
gctaagaacggcggcggcagcagtagccgcagctccccggtgtctggcccccctgccgtttgcgagaccctggccgtcgcctccgcctccccaatggcggcggcggcggagggcccccagcagagcgcagagggcagcgcgagcggcgggggcatgcaggcggcagcgcccccttcgtcgcagccgcacccgcagcagctccaagagcaggaagaaatgcaagaggagatggagaagctgcgagaggaaaacgagactctcaagaacgagatcgatgagctgagaaccgagatggacgagatgagggacactttcttcgaggaggatgcctgtcaactgcaggaaatgcgccacgagttggagagagccaacaaaaactgccggatcctgcagtaccgcctccgcaaagccgagcgcaaaaggctccgctacgcccagaccggggaaatcgacggggagctgttgcgcagcctggagcaggacctcaaggttgcaaaggatgtatctgtgagacttcaccatgaattagaaaatgtggaagaaaagagaacaacaacagaagatgaaaatgagaaactgaggcaacagctcatagaagttgaaattgcaaagcaagctttacagaatgaactggaaaaaatgaaagagttatccttaaaaagaaaaggaagcaaagatttgc

SEQ ID NO: 293118 - DNA, 711 bp, Homo sapiens
tcagtaacgcgaggttttcatttaaattcaaatctgggcctccgtttctctaattataatggtttgtcacacttcttcctggagagaggtagagtaagagaacgagagagggcctaaagtgggcctttttcccccagtttcctcttctgtactcagctccttgtcactcctgtctcgtggagagagagggcaattaaagctgagaatttggaattggaatggggtgtgtacggtgtgtgtcggaagggctggaagcgagtttgattttgacacgcggcctgtcaccgcctcagaacgagatcgatgagctgagaaccgagatggacgagatgagggacactttcttcgaggaggatgcctgtcaactgcaggaaatgcgccacgagttggagagagccaacaaaaactgccggatcctgcagtaccgcctccgcaaagccgagcgcaaaaggctccgctacgcccagaccggggaaatcgacggggagctgttgcgcagcctggagcaggacctcaaggttgcaaaggatgtatctgtgagacttcaccatgaattagaaaatgtggaagaaaagagaacaacaacagaagatgaaaatgagaaactgaggcaacagctcatagaagttgaaattgcaaagcaagctttacagaatgaactggaaaaaatgaaagagttatccttaaaaagaaaaggaagcaaagatttgc

SEQ ID NO: 293119 - DNA, 909 bp, Homo sapiens
gtctatggtggtgagggctgcgcggggagaccgggagacacgcgccgggcgggccctgagcctctccgccaggctcgcagctaggacgtcagagcccgggggagagaagctcctccgagctgtgcgcgccgcaccctcccggcgcggggaacccgaggggtagcgtgggtgccacggggctcacctggcagcgctgtgggctcggcgtccgggggatcctcgtacaccgacaccgggctcccgcctgtgcatccggggaagaacttccgcggaggagcgaactggccgggcacacaaacgttgaacgcgggtcagccctcggggcaccgagcgcgcagaccccgcccggcccgaatcaaccgccccaccttcctctccggcttccccggcttgcagagcagcgcccggcccggcagtgccagcattctgttggggcagatgctgtcgaaggcccgacggccggccgcgccgcccccgcacgcctgcattgtgcctcctgcctccgggtgccgactgctcggaggcggcggcccgggctggggcagcgatccacaccctgcactcccttcagtgcctgcaggctccgaagccagccagaggttggggcaggcgcgtgaccgagaaggagccgaggggctgccgaggagccacaaggcgcacgaaataaacgtggagtgacacccgccagcgctagactccggcctttgcgctcctgcaggatttagtaaggatgtagaataccggcagggatgccctggaacagcccccttattacagaagccccttccctcaaacctgaaccttatcctgggtcctgacttatggatttccacgtggtctcttttggcctgacgccaagagcccgccccgctccccaagccccgcactcttctcggcagtggcgcgtga

SEQ ID NO: 293120 - DNA, 1731 bp, Homo sapiens
gctgggttcccgtctgctgcctctcggagagtcccgggtgactgccgcaggctccatcgccctgtggcctgcaggtattgcgagatttatagggaggacgctgggacccccaaaagctgggaaatgggactattggcattcagggatgtggctctagaattctctccagaggagtgggaatgcctggacccagctcagcggagtttgtatagggatgtgatgttagagaactacagaaacctgatctcccttggtgaggatagcttcaatatgcaattcctatttcacagtcttgctatgtctaagccagaactgatcatctgtctggaggcaaggaaagagccctggaacgtgaacacagagaagacagccaaacactcagctttgtcttcttatcttactgaagacattttgccagagcagggcctgcaagtttcattccaaaaagtgatgctgagaagatatgaaagatgttgtcttgagaaattacgcttaaggaatgactgggaaattgtgggtgagtggaaagggcagaaggcaagttataatggacttgacctatgctcagcaactactcatagcaaaaactttcaatgcaataaatgtgtgaaaggttttagtaaatttgcaaatctaaataaatgtaagataagccatactggagaaaaaccattcaaatgcaaagaatgtggcaatgtctcttgcatgtctttaataatgactcaacagcagagaatccatattggagagaacccgtaccaatgtaaaaaatgtggcaaagcctttaatgagtgctcatgctttactgactgtaagagaattcatgttggagagaaacattgcaaatgtgaagaatgtaataacatttttaagtcttgctcaagtcttgctgttgttgagaaaaatcatactgaaaagaaaacctacagatgtgaagaatgtggcaaagcttttaacctgtgctcagttcttactaaacataagaaaattcatactggagagaaaccatacaaatgtgaagaatgtggcaaatcctttaagttgttcccataccttactcaacacaagagaattcatagtagagagaaaccctacaagtgtgaagaatgtggcaaagtctttaaattgttgtcataccttactcaacatagaagaattcatactggagagaaaaccttccgatgtgaagaatgtggaaaggcctttaaccagagctcacatctgactgaacataggagaattcatactggtgagaaaccatacaaatgtgaggaatgtggcaaagcttttacctggttctcataccttattcagcataagagaattcatactgggcagaaaccctacaaatgtgaggaatgtggcaaagcttttacctggttttcataccttactcaacataagagaattcatactggagagaaaccctacaaatgtgatgaatgtggcaaagcttttaactggttttcatatcttactaatcataagagaattcatactgaagaatgactaagacctactattcgatagcacaacagggtgactacagtcaataataatttaattgtagattttaaaataaccagaagagtataattggattgtttgtaacacaaaggatgcttgaggggatggacaccccattttccctgatgtaattattatacattgtatgcctctatcaaaacatctcatgtacctcatgaatatatacatgtacacacaaaaatt

SEQ ID NO: 293121 - DNA, 1031 bp, Homo sapiens
cggtgcgtctccgctgctccttccccttatccctgggaggtccaagtggtcccgcggcagcttctgttgctctgggacctgcaggtcccggaaggtccttagggaggaccccagacaccggagactgggaaatgggactattggcattcagggatgtggctctagaattctctccagaggagtgggaatgcctggacccagctcagcggagtttgtatagggatgtgatgttagagaactacagaaacctgatctcccttggtcttgctatgtctaagccagaactgatcatctgtctggaggcaaggaaagagccctggaacgtgaacacagagaagacagccaaacactcagctttgtcttcttatcttactgaagacattttgccagagcagggcctgcaagtttcattccaaaaagtgatgctgagaagatatgaaagatgttgtcttgagaaattacgcttaaggaatgactgggaaattgtggtagagacggggtttcaccgtgttagccaggatggtctcgatctcctgacctcgtgatccgcctgtctcggcctcccaaagtgctgggattacagacgtgagccactgcacccggccagcataagatttttatatgagtaattgggaaggcttctataaatataagccatgtgaagatgtgcttgcttcccctttgccttctgccatgattctaagtttcctgaggcctccccagaagcagaagcatgtaaagcccacagaaccggtccagtcgtcgaccatcgagctgctttgaagaccctgcggaggttccgtcgctgcttgaacacagtgcctggactccctgctccgtgaggcgaatttacaccgggtccagctgcgtcagcccgagttctgaattaaaacatgcctcccacagaatctatttctgatgaatatgaaaggaagattgttcttccatgttggtttttattgagatatctctttttttcccttttcatttggtgtcctaactccatgaatagaaaagaaaatgtattaatt

SEQ ID NO: 293122 - DNA, 879 bp, Homo sapiens
  misc_feature (655)..(655): n is a, c, g, or t
gctgggttcccgtctgctgcctctcggagagtcccgggtgactgccgcaggctccatcgccctgtggcctgcaggtattgcgagatttatagggaggacgctgggacccccaaaagctgggaaatgggactattggcattcagggatgtggctctagaattctctccagaggagtgggaatgcctggacccagctcagcggagtttgtatagggatgtgatgttagagaactacagaaacctgatctcccttggtgaggatagcttcaatatgcaattcctatttcacagtcttgctatgtctaagccagaactgatcatctgtctggaggcaaggaaagagccctggaacgtgaacacagagaagacagccaaacactcagctttgtcttcttatcttactgaagacattttgccagagcagggcctgcaagtttcattccaaaaagtgatgctgagaagatatgaaagatgttgtcttgagaaattacgcttaaggaatgactgggaaattgtggccatgtgaagatgtgcttgcttcccctttgccttctgccatgattctaagtttcctgaggcctccccagaagcagaagcatgtaaagcccacagaaccggtcagtcgtcgacatcgagctgtttgaagacctgcggangtccgtcgtgcttgacacagtgctggatcctgtcgtgagggattacacggtccagtggtcaccagtttgataaaatgctcccaaaaaaaaaaacgggtttttcggggggaaagatgaggcctggctaggtcgaccttgaagggaagcggccagggtatgactcgtattagaggagtggtgattcgcagcagttctctttcgtttgagacattctgacgtaaagc

SEQ ID NO: 293123 - DNA, 609 bp, Homo sapiens
gctgggttcccgtctgctgcctctcggagagtcccgggtgactgccgcaggctccatcgccctgtggcctgcaggtattgcgagatttatagggaggacgctgggacccccaaaagctgggaaatgggactattggcattcagggatgtggctctagaattctctccagaggagtgggaatgcctggacccagctcagcggagtttgtatagggatgtgatgttagagaactacagaaacctgatctcccttggtcttgctatgtctaagccagaactgatcatctgtctggaggcaaggaaagagccctggaacgtgaacacagagaagacagccaaacactcagctttgtcttcttatcttactgaagacattttgccagagcagggcctgcaagtttcattccaaaaagtgatgctgagaagatatgaaagatgttgtcttgagaaattacgcttaaggaatgactgggaaattgtggccatgtgaagatgtgcttgcttcccctttgccttctgccatgattctaagtttcctgaggcctccccagaagcagaagcatgtaaagcccacagaacccgtgagttgattaaatctcttttctttata

SEQ ID NO: 293124 - DNA, 759 bp, Homo sapiens
gctgggttcccgtctgctgcctctcggagagtcccgggtgactgccgcaggctccatcgccctgtggcctgcaggtattgcgagatttatagggaggacgctgggacccccaaaagctgggaaatgggactattggcattcagggatgtggctctagaattctctccagaggagtgggaatgcctggacccagctcagcggagtttgtatagggatgtgatgttagagaactacagaaacctgatctcccttggtgaggatagcttcaatatgcaattcctatttcacagtcttgctatgtctaagccagaactgatcatctgtctggaggcaaggaaagagccctggaacgtgaacacagagaagacagccaaacactcagccatgtgaagatgtgcttgcttcccctttgccttctgccatgattctaagtttcctgaggcctccccagaagcagaagcatgtaaagcccacagaaccggtccagtcgtcgaccatcgagctgctttgaagaccctgcggaggttccgtcgctgcttgaacacagtgcctggactccctgctccgtgaggcgaatttacaccgggtccagctgcgtcagcccgagttctgaattaaaacatgcctcccacagaatctatttctgatgaatatgaaaggaagattgttcttccatgttggtttttattgagatatctctttttttcccttttcatttggtgtcctaactccatgaatagaaaagaaaatgtattaatt

SEQ ID NO: 293125 - DNA, 829 bp, Homo sapiens
cggtgcgtctccgctgctccttccccttatccctgggaggtccaagtggtcccgcggcagcttctgttgctctgggacctgcaggtcccggaaggtccttagggaggaccccagacaccggagactgggaaatgggactattggcattcagggatgtggctctagaattctctccagaggagtgggaatgcctggacccagctcagcggagtttgtatagggatgtgatgttagagaactacagaaacctgatctcccttggtgaggatagcttcaatatgcaattcctatttcacagtcttgctatgtctaagccagaactgatcatctgtctggaggcaaggaaagagccctggaacgtgaacacagagaagacagccaaacactcagagtctcagctctgtcacccaggttggaatgcaatggtgcgatctcggctcactgcaaactgcgtcccgggttcaggtcattctcctgcctcagcctcctgagtagctgagattacaggcatgtgccaccgtgtctttttagtagagacggggtttcaccatgttggccaagctcgtctttaactcataacctcaggtgatccacccacctcagcctcccaaggtgctgggattacaggcatgagccactgcgcgtggccataatgtattttaaaatcagaaagtatgatacctgcaacattgttcttctttgtggagattgttgcgctcttcatggttccttcacgcactgtgtaattttagggttgccttttctatttctgcaaaaacgaaattgtgaacttgagaggattgcactgaatctgtaggtcacttgggtg

SEQ ID NO: 293126 - DNA, 868 bp, Homo sapiens
cggtgcgtctccgctgctccttccccttatccctgggaggtccaagtggtcccgcggcagcttctgttgctctgggacctgcaggtcccggaaggtccttagggaggaccccagacaccggagactgggaaatgggactattggcattcagggatgtggctctagaattctctccagaggagtgggaatgcctggacccagctcagcggagtttgtatagggatgtgatgttagagaactacagaaacctgatctcccttggtcttgctatgtctaagccagaactgatcatctgtctggaggcaaggaaagagccctggaacgtgaacacagagaagacagccaaacactcagctttgtcttcttatcttactgaagacattttgccagagcagggcctgcaagtttcattccaaaaagtgatgctgagaagatatgaaagatgttgtcttgagaaattacgcttaaggaatgactgggaaattgtggccatgtgaagatgtgcttgcttcccctttgccttctgccatgattctaagtttcctgaggcctccccagaagcagaagcatgtaaagcccacagaaccggtccagtcgtcgaccatcgagctgctttgaagaccctgcggaggttccgtcgctgcttgaacacagtgcctggactccctgctccgtgaggcgaatttacaccgggtccagctgggtcagcccgagttctgaattaaaacatgcctcccacagaatctatttctgatgaatatgaaaggaagattgttcttccatgttggtttttattgagatatctctttttttcccttttcatttggttgtcctaactccatgaatagaaaagaaaatgtattaattc

SEQ ID NO: 293127 - DNA, 726 bp, Homo sapiens
aaccctacaaatgtgaggaatgtggcaaagcttttacctggttttcataccttactcaacataagagaattcatactggagagaaaccctacaaatgtgatgaatgtggcaaagcttttaactggttttcatatcttactaatcataagagaattcatactgaagagaaaccctacaaatgtgaagaatgtggcaaagcctttggccagagctcacacctttctaaacataagacaattcataccagagagaaaccatacaagtgtgaggaatgtggcaaagcctttaaccactctgcacaacttgctgtacatgagaaaactcatacctgagaaaaaccctacaattctaaacaatatggcatagtctttaatacctattcacaacttcacagcagaatatttttactgaataagagtgttacaaatgtaatgactgtcaaaaggccatttacagtctatgagcctttgagtgcactaaaatgtttaggctacgaacaatacaaatagaccggttcaacacctccacttatatcacagctcttactgtacacagaagaatttatactggagggaaaccctccagttgctcaaactgtattcaatttcaaagactttgtattggagagaaaccctacaaatgtaataaatgcagaaacaacatttgttcaaaaaatatacctcagaaaacaccagagtgttcacactaaaaactgttttacagatg

SEQ ID NO: 293128 - DNA, 490 bp, Homo sapiens
tttctacccttccctttcctgataaagtcccacatagtctctacaattcaggtcaaaatgctacatctcctgtgaagcctctcttgatttccacagaggaactctggggccatgtccttccctctccaccacagaccacacctgcttgtagcactgtcactaggtggcttagtgcctgcttatcagcatccatctggctctctgtgttatcatctcatcaagaacaagaatccaatcttacttctctaagcatccccagctcccaggagagtgtctggaccatgatgataggtgtatgcatatgttggataaaacaaaaatcaaattcctttattccagttatctgaaaagtttttaccctccaatctcgactgttcattctgatccaggctaatgtcaatcttgcctcatagcaactctacctgtcctcttacttgtttttaccagacaatatggaagtaactaattaattttaagaaaaatttccctt

SEQ ID NO: 293129 - DNA, 519 bp, Homo sapiens
gcggccgccgaggggacgcctcgcgacggttcctgggagagctggcggcggccttgctctgcgcgctcttcgcgccgccctccccgcccgcccgcctcaggattgaggaagtgcgtctgggcccggccccggcgcggggggcagacggcggtgggacggccaggccccggccccgccagtgtgtccgcccggccccgcgtcccggagcgcccgcacccggccccgccgccgcctcagagcaagaaagctttctgctcagccatggctacgagtccacgccttaatgcaccccacagccagcggcagtggcagtgacaacagcgggacctgcctttgaagatcggctgctgcaagggttgatggctggcatgtcgcaaagaccccccagcatgtactggtgtgtggggccggaggagtcagctgtgtgtccagaacgtgccatggagacgcttaacggtgccggggacacgggcggcaagccgtccacgcggggcggtgaccctgcagcgcggtcccgca

SEQ ID NO: 293130 - DNA, 512 bp, Homo sapiens
gcggccgccgaggggacgcctcgcgacggttcctgggagagctggcggcggccttgctctgcgcgctcttcgcgccgccctccccgcccgcccgcctcaggattgaggaagtgcgtctgggcccggccccggcgcggggggcagacggcggtgggacggccaggccccggccccgccagtgtgtccgcccggccccgcgtcccggagcgcccgcacccggccccgccgccgcctcagagcaagaaagctttctgctcagccatggctacgagtccacgccttaatgcaccccacagccagcggcagtggcagtgacaacagcgggacctgcctttgaagatcggctgctgcaagggttgatggctggcatgtcgcaaagaccccccagcatgtactggtgtgtggggccggaggagtcagctgtgtgtccagaacgtgccatggagacgcttaacggtaaggacagggctgtgcttatgcctgcctgggtgtgacctgccatgctcatcctg

SEQ ID NO: 293131 - DNA, 370 bp, Homo sapiens
cggccgccgaggaggtgaggagcggcggcgggcgcgggaggagaagaggctgagggcgggagcctggtgctgagagcccagggccgggagggcgggagcgggctcgggcctgggaggggagtgcgagtgcagggctggggactggaccctggggagggaggtgcgggttcagcgccgggggacgggcccctggggaggggtgcggggccgggggaccagaccctggggaggggcttaaggggctggaggacgggaccctgggaagtggggtacagggctagaggtcgggactctagggagggagcctgggtcgggcgcacgggccgggcggggcgcgcggtgggggagcgacgggtggagggtggggtgg

SEQ ID NO: 293132 - DNA, 463 bp, Homo sapiens
tctggagctctgatgtacaacatggtgattacagctattaatgcatacttaagaactggaaagagtgggctttaaatgttctcaccacaaaaaaatctccctccggggacctctgagacgtttctccaggacaaggaacagcacgaacatgtcagcctgcgtggatgaaaccgggaagatggccgcgagccgtgtgcccacacaggagtgtggccatggctgtcggtgtgaggctgtagctctgtggaaaacgcagaccacacagtacagaggcgaggccgtctccagagctggcatcatcaatgtggctaccatcgggcaaggccagaagaaaatacggaaaataggaaaatcgctgctggactcatgtccttgggccttcagcaaattttctcctttaaaaatttcctttaatactgtgtaatgttgcttttgcgaaaataaaattcccgggacaaaaaaa

SEQ ID NO: 293133 - DNA, 780 bp, Homo sapiens
cacacagccagtgtatccttcagcaagcctcttttaatgatttaaaaaagaactactaacttttacaaataattgtgttcagagacagactttcaatctaaagaaaagatcaaggacctagctctcgtggcagaatgcagaaacagaagcctccagattgatctctgcagatgctaacgtggcccactttgtcctcatattcagcctgatcctaaagcccttacaactaagccaatacctgcttggattcttctgacaactggcaaagatgtcacgttccacttcttatctcaccacctcttaaccacaaattggccccagtggctttcaaaagggggaaaaaattgtgcgagtttgagactgtttatgtattcatgactaaaaccaaatctgagatctttggaactcttagctggccctggggcatgcgagccgcctgtgcatccctttggtccacctggaggcccgtgaagaccttcagtggaaggaagagtgggtcagatgagacgtgtccatttcatcagtcagccatcggtgacaggctgaattcagagacccaggccagagtgtaccagctacaaaatttatccaaggattccaattatgctttaaaaaattctaccagaagaagtaaaaaacgatgtttatatgttaagaaatgtaacagagtagctctcatttgataatataaaatagctctgcctctattcaaaacagttgattttaaaagtaggtatatagtcgctatacttattattatttttagattgctttaaaaag

SEQ ID NO: 293134 - DNA, 412 bp, Homo sapiens
aagacgagaatacatggtaggtatattttccttattaattttaaagtttacaaagcaaagattgatttcaaccaagctgtttcatgttatacattctaaataatatgagatgtgagctaataagttttttgtgtatattaccttattgattgaaacatgtgacccaacttttagcattaaatgtaaaaattattgcagaagactgctaaatcttctcttttccattataggtttttctgttcatgcatctcagggtgtattctaagatgggaaactgtttttaaagttttagattaatacagggtcctgtggttctcaaaattgcttggttaacaagaatacctagatatgatgttattaatcatatcaaatgtttttctgttaaaaatattaaaataactataaaatgtgc

SEQ ID NO: 293135 - DNA, 4184 bp, Homo sapiens
ggtgtactggtccggaattttgggatcgcaggcgcacaggggacggttgctggcccaggtgagcgggcgcgctggtccaggtgagcgggcgcgtccccgcgacggcgctgcctgcccgaggcggttcacgtaaagacagcgagatcctgagggccagccgggaaggaggcgtggatatggagctggctgctgccaagtccggggcccgcgccgctgcctagcgcgtcctggggactctgtggggacgcgccccgcgccgcggctcggggacccgtagagcccggcgctgcgcgcatggccctgctctcgcgccccgcgctcaccctcctgctcctcctcatggccgctgttgtcaggtgccaggagcaggcccagaccaccgactggagagccaccctgaagaccatccggaacggcgttcataagatagacacgtacctgaacgccgccttggacctcctgggaggcgaggacggtctctgccagtataaatgcagtgacggatctaagcctttcccacgttatggttataaaccctccccaccgaatggatgtggctctccactgtttggtgttcatcttaacattggtatcccttccctgacaaagtgttgcaaccaacacgacaggtgctatgagacctgtggcaaaagcaagaatgactgtgatgaagaattccagtattgcctctccaagatctgccgagatgtacagaaaacactaggactaactcagcatgttcaggcatgtgaaacaacagtggagctcttgtttgacagtgttatacatttaggttgtaaaccatatctggacagccaacgagccgcatgcaggtgtcattatgaagaaaaaactgatctttaaaggagatgccgacagctagtgacagatgaagatggaagaacataacctttgacaaataactaatgtttttacaacataaaactgtcttatttttgtgaaaggattattttgagaccttaaaataatttatatcttgatgttaaaacctcaaagcaaaaaaagtgagggagatagtgaggggagggcacgcttgtcttctcaggtatcttccccagcattgctcccttacttagtatgccaaatgtcttgaccaatatcaaaaacaagtgcttgtttagcggagaattttgaaaagaggaatatataactcaattttcacaaccacatttaccaaaaaaagagatcaaatataaaattcatcataatgtctgttcaacattatcttatttggaaaatggggaaattatcacttacaagtatttgtttactatgaaattttaaatacacatttatgcctagaaggaacggactttttttttctattttaattacacataatatgtaattaaagtacaacataatatgttgtttctctgtagcccgttgagcatatgagtaagtcacatttctattaggactacttacaaggacaaggtttccatttttccagttgtaaaattggaaccatcagctgataacctcgtagggagcaaccccaggatagctaagtgttatgtaatatgcctagaaggtgatgtgaatgcgattcagaagcatagccactcccattttatgagctactcacatgacaaatgtcatcttttgctataacctttgccaagttagagaaaagatggatttaatgagataaatgaaaagatatttaacctaatatatcaaggcactatttgctgttatgctttgttatttatttcccagcacttgttccttattgtagattttttaaagactgtaaccttttactaactgtggtcttactaaaatttgtgcttgatactgcttttcaaaaagcctttaattagagccaaaaggatggaaaaggcaagatataaatgccttttatagatctcttatttacattgaaaattattaccatatgtttagagcaaatccaagaaaacttcaacagcttctgaagatgtctatgaatgttgaaaacttttcaatctcttggaatgctcagttatgttcctagaccggtctttgctgactactggttgttaacctttccctagcctgggacctcaagccatatatatcctttgggtgacccatggccaaagttattaagatgaactgactttcaaagtcagagaaggacagcatagggagaggcggttatttgtaagtcattacaggtagaacagggcagaaggaaaagtatgttctggagaaagggccatgttcctaactttggagatatgtcattgccgggaacctagtatcttccaacttgaattggtggcagctgttccagtgagacaaggcacatgtatgccttgtggctaagtgagcaaactgggtttccacttaaatgtttgggaccctcaattgattctttatttcaaacctttataaaaggtacagttttgtaagccattattaataattaatgcttatcggctgggcacagtggctcacacctataatcccagcactttgggaggctgaggcggttggatcacttgaggtcaggagtttgagaccagctggccaacatggtgaaacagcgtctctactaaaaatacaaaaatttgccgggcgtggtggcgcatgcttatagtctcagctactcaggaagctgaggtacgagaatcacttgaacccaggaggtggaggttgcagtgagctgagattgtgccactgcactgcagcctgggcaacagagcaagactctaaaaaaaaaatggtttatcaatatttactattgaaatatttgtccaggtaactttacacttacaatgaattcatggattttgttagcagcattggctttctcaaaaggacaaactcaatatcgttataaaatataattcgtgatcacaaattatacaaaaatcagtagaaacagttttttatgttcagattaaaaaaaaaaacttgggataattttagatttacagaaaagttgcaaagatacatggagagcttctgtgaccactcacccagttcccccagtgttaaccttttatttaaccatgaagcatttgtcagaagctaagtaaccagcaatggcaattactattaacggaactttgactttatttttcagattgtactagttttttaattaatgtcatttttcttttccaggatccaatctaggataccacactgaattagtcgtcatgcctaattagcctctggtctgtgatagttccacagtctttctttttcataaccttgacagttttgaggagtactggtcaggtgttttgtagaatattcctcaatttgggtttgtctgatgttttcctcatggttagagtggggttatagatttttaggaagaataccagaggtgaaggtccttctcactgcatcatgtcaggagttacatgctatcagcttgatggtgtattaactttggacacttggttaaggtagtgtgtgttggttttttgctgctgaaaattactgttattttccctttccatacttctgttctttggaaaacagtcactaagtccagtcatgggaggtggtgggtgggaaagattacattcaaccccctggaagtgggaatatccatatgtagtatttggaatttttctatatggaaaatttgtttctccctcccaccctaatttgtttacatcagtatggactcatgtatattttgtattttgggtaacacagtatttattttgttgcttaagttgtccagcttggctattaggagttctgccaggttggctactatgtccctttgatgtgcccatccttttgatttttgagcacttcttactttctggcactacaagatgctccaggttcatcttggatattccctgccccaaccctagaatccctagaatcaacccctgctccaaagagccctggttccttttgttggagaatcatacttagaaaccaagatctgggcattagatgtgcttgttgctactgggatgtcactgtttgtagcagagttgagaaatatgtatgtatattaatccatgcatatgtacacatctataattatttatgtgtgtacaaagctaaacatgagtttgtactgccgtcttcaactcaaaatttgtcccaaaattttgtggcatatgtttagattttaaagttgatattttccctattgacagaataaactcattaaaagagcaaaaaaaaaaaaaaaaaaa

SEQ ID NO: 293136 - DNA, 4169 bp, Homo sapiens
cgatagctaggtacgagcccttcgtgtaaatcggccgaggccagctagcgggcgcgctggtccaggtgagcgggcgcgtccccgcgacggcgctgcctgcccgaggcggttcacgtaaagacagcgagatcctgagggccagccgggaaggaggcgtggatatggagctggctgctgccaagtccggggcccgcgccgctgcctagcgcgtcctggggactctgtggggacgcgccccgcgccgcggctcggggacccgtagagcccggcgctgcgcgcatggccctgctctcgcgccccgcgctcaccctcctgctcctcctcatggccgctgttgtcaggtgccaggagcaggcccagaccaccgactggagagccaccctgaagaccatccggaacggcgttcataagatagacacgtacctgaacgccgccttggacctcctgggaggcgaggacggtctctgccagtataaatgcagtgacggatctaagcctttcccacgttatggttataaaccctccccaccgaatggatgtggctctccactgtttggtgttcatcttaacattggtatcccttccctgacaaagtgttgcaaccaacacgacaggtgctatgagacctgtggcaaaagcaagaatgactgtgatgaagaattccagtattgcctctccaagatctgccgagatgtacagaaaacactaggactaactcagcatgttcaggcatgtgaaacaacagtggagctcttgtttgacagtgttatacatttaggttgtaaaccatatctggacagccaacgagccgcatgcaggtgtcattatgaagaaaaaactgatctttaaaggagatgccgacagctagtgacagatgaagatggaagaacataacctttgacaaataactaatgtttttacaacataaaactgtcttatttttgtgaaaggattattttgagaccttaaaataatttatatcttgatgttaaaacctcaaagcaaaaaaagtgagggagatagtgaggggagggcacgcttgtcttctcaggtatcttccccagcattgctcccttacttagtatgccaaatgtcttgaccaatatcaaaaacaagtgcttgtttagcggagaattttgaaaagaggaatatataactcaattttcacaaccacatttaccaaaaaaagagatcaaatataaaattcatcataatgtctgttcaacattatcttatttggaaaatggggaaattatcacttacaagtatttgtttactatgaaattttaaatacacatttatgcctagaaggaacggactttttttttctattttaattacacataatatgtaattaaagtacaacataatatgttgtttctctgtagcccgttgagcatatgagtaagtcacatttctattaggactacttacaaggacaaggtttccatttttccagttgtaaaattggaaccatcagctgataacctcgtagggagcaaccccaggatagctaagtgttatgtaatatgcctagaaggtgatgtgaatgcgattcagaagcatagccactcccattttatgagctactcacatgacaaatgtcatcttttgctataacctttgccaagttagagaaaagatggatttaatgagataaatgaaaagatatttaacctaatatatcaaggcactatttgctgttatgctttgttatttatttcccagcacttgttccttattgtagattttttaaagactgtaaccttttactaactgtggtcttactaaaatttgtgcttgatactgcttttcaaaaagcctttaattagagccaaaaggatggaaaaggcaagatataaatgccttttatagatctcttatttacattgaaaattattaccatatgtttagagcaaatccaagaaaacttcaacagcttctgaagatgtctatgaatgttgaaaacttttcaatctcttggaatgctcagttatgttcctagaccggtctttgctgactactggttgttaacctttccctagcctgggacctcaagccatatatatcctttgggtgacccatggccaaagttattaagatgaactgactttcaaagtcagagaaggacagcatagggagaggcggttatttgtaagtcattacaggtagaacagggcagaaggaaaagtatgttctggagaaagggccatgttcctaactttggagatatgtcattgccgggaacctagtatcttccaacttgaattggtggcagctgttccagtgagacaaggcacatgtatgccttgtggctaagtgagcaaactgggtttccacttaaatgtttgggaccctcaattgattctttatttcaaacctttataaaaggtacagttttgtaagccattattaataattaatgcttatcggctgggcacagtggctcacacctataatcccagcactttgggaggctgaggcggttggatcacttgaggtcaggagtttgagaccagctggccaacatggtgaaacagcgtctctactaaaaatacaaaaatttgccgggcgtggtggcgcatgcttatagtctcagctactcaggaagctgaggtacgagaatcacttgaacccaggaggtggaggttgcagtgagctgagattgtgccactgcactgcagcctgggcaacagagcaagactctaaaaaaaaaatggtttatcaatatttactattgaaatatttgtccaggtaactttacacttacaatgaattcatggattttgttagcagcattggctttctcaaaaggacaaactcaatatcgttataaaatataattcgtgatcacaaattatacaaaaatcagtagaaacagttttttatgttcagattaaaaaaaaaaacttgggataattttagatttacagaaaagttgcaaagatacatggagagcttctgtgaccactcacccagttcccccagtgttaaccttttatttaaccatgaagcatttgtcagaagctaagtaaccagcaatggcaattactattaacggaactttgactttatttttcagattgtactagttttttaattaatgtcatttttcttttccaggatccaatctaggataccacactgaattagtcgtcatgcctaattagcctctggtctgtgatagttccacagtctttctttttcataaccttgacagttttgaggagtactggtcaggtgttttgtagaatattcctcaatttgggtttgtctgatgttttcctcatggttagagtggggttatagatttttaggaagaataccagaggtgaaggtccttctcactgcatcatgtcaggagttacatgctatcagcttgatggtgtattaactttggacacttggttaaggtagtgtgtgttggttttttgctgctgaaaattactgttattttccctttccatacttctgttctttggaaaacagtcactaagtccagtcatgggaggtggtgggtgggaaagattacattcaaccccctggaagtgggaatatccatatgtagtatttggaatttttctatatggaaaatttgtttctccctcccaccctaatttgtttacatcagtatggactcatgtatattttgtattttgggtaacacagtatttattttgttgcttaagttgtccagcttggctattaggagttctgccaggttggctactatgtccctttgatgtgcccatccttttgatttttgagcacttcttactttctggcactacaagatgctccaggttcatcttggatattccctgccccaaccctagaatccctagaatcaacccctgctccaaagagccctggttccttttgttggagaatcatacttagaaaccaagatctgggcattagatgtgcttgttgctactgggatgtcactgtttgtagcagagttgagaaatatgtatgtatattaatccatgcatatgtacacatctataattatttatgtgtgtacaaagctaaacatgagtttgtactgccgtcttcaactcaaaatttgtcccaaaattttgtggcatatgtttagattttaaagttgatattttccctattgacagaataaactcattaaaagagcaaaaaaaaaaaaaaaaaaa

SEQ ID NO: 293137 - DNA, 4299 bp, Homo sapiens
ggtgtactggtccggaattttgggatcgcaggcgcacaggggacggttgctggcccaggtgagcgggcgcgctggtccaggtgagcgggcgcgtccccgcgacggcgctgcctgcccgaggcggttcacgtaaagacagcgagatcctgagggccagccgggaaggaggcgtggatatggagctggctgctgccaagtccggggcccgcgccgctgcctagcgcgtcctggggactctgtggggacgcgccccgcgccgcggctcggggacccgtagagcccggcgctgcgcgcatggccctgctctcgcgccccgcgctcaccctcctgctcctcctcatggccgctgttgtcaggtgccaggagcaggcccagaccaccgactggagagccaccctgaagaccatccggaacggcgttcataagatagacacgtacctgaacgccgccttggacctcctgggaggcgaggacggtctctgccagtataaatgcagtgacggatctaagcctttcccacgttatggttataaaccctccccaccgaatggatgtggctctccactgtttggtgttcatcttaacattggtatcccttccctgacaaagtgttgcaaccaacacgacaggtgctatgagacctgtggcaaaagcaagaatgactgtgatgaagaattccagtattgcctctccaagatctgccgagatgtacagaaaacactaggactaactcagcatgttcaggcatgtgaaacaacagtggagctcttgtttgacagtgttatacatttaggttgtaaaccatatctggacagccaacgagccgcatgcaggtgtcattatgaagaaaaaactgatctttaaaggagatgccgacagctagtgacagatgaagatggaagaacataacctttgacaaataactaatgtttttacaacataaaactgtcttatttttgtgaaaggattattttgagaccttaaaataatttatatcttgatgttaaaacctcaaagcaaaaaaagtgagggagatagtgaggggagggcacgcttgtcttctcaggtatcttccccagcattgctcccttacttagtatgccaaatgtcttgaccaatatcaaaaacaagtgcttgtttagcggagaattttgaaaagaggaatatataactcaattttcacaaccacatttaccaaaaaaagagatcaaatataaaattcatcataatgtctgttcaacattatcttatttggaaaatggggaaattatcacttacaagtatttgtttactatgaaattttaaatacacatttatgcctagaaggaacggactttttttttctattttaattacacataatatgtaattaaagtacaacataatatgttgtttctctgtagcccgttgagcatatgagtaagtcacatttctattaggactacttacaaggacaaggtttccatttttccagttgtaaaattggaaccatcagctgataacctcgtagggagcaaccccaggatagctaagtgttatgtaatatgcctagaaggtgatgtgaatgcgattcagaagcatagccactcccattttatgagctactcacatgacaaatgtcatcttttgctataacctttgccaagttagagaaaagatggatttaatgagataaatgaaaagatatttaacctaatatatcaaggcactatttgctgttatgctttgttatttatttcccagcacttgttccttattgtagattttttaaagactgtaaccttttactaactgtggtcttactaaaatttgtgcttgatactgcttttcaaaaagcctttaattagagccaaaaggatggaaaaggcaagatataaatgccttttatagatctcttatttacattgaaaattattaccatatgtttagagcaaatccaagaaaacttcaacagcttctgaagatgtctatgaatgttgaaaacttttcaatctcttggaatgctcagttatgttcctagaccggtctttgctgactactggttgttaacctttccctagcctgggacctcaagccatatatatcctttgggtgacccatggccaaagttattaagatgaactgactttcaaagtcagagaaggacagcatagggagaggcggttatttgtaagtcattacaggtagaacagggcagaaggaaaagtatgttctggagaaagggccatgttcctaactttggagatatgtcattgccgggaacctagtatcttccaacttgaattggtggcagctgttccagtgagacaaggcacatgtatgccttgtggctaagtgagcaaactgggtttccacttaaatgtttgggaccctcaattgattctttatttcaaacctttataaaaggtacagttttgtaagccattattaataattaatgcttatcggctgggcacagtggctcacacctataatcccagcactttgggaggctgaggcggttggatcacttgaggtcaggagtttgagaccagctggccaacatggtgaaacagcgtctctactaaaaatacaaaaatttgccgggcgtggtggcgcatgcttatagtctcagctactcaggaagctgaggtacgagaatcacttgaacccaggaggtggaggttgcagtgagctgagattgtgccactgcactgcagcctgggcaacagagcaagactctaaaaaaaaaatggtttatcaatatttactattgaaatatttgtccaggtaactttacacttacaatgaattcatggattttgttagcagcattggctttctcaaaaggacaaactcaatatcgttataaaatataattcgtgatcacaaattatacaaaaatcagtagaaacagttttttatgttcagattaaaaaaaaaaacttgggataattttagatttacagaaaagttgcaaagatacatggagagcttctgtgaccactcacccagttcccccagtgttaaccttttatttaaccatgaagcatttgtcagaagctaagtaaccagcaatggcaattactattaacggaactttgactttatttttcagattgtactagttttttaattaatgtcatttttcttttccaggatccaatctaggataccacactgaattagtcgtcatgcctaattagcctctggtctgtgatagttccacagtctttctttttcataaccttgacagttttgaggagtactggtcaggtgttttgtagaatattcctcaatttgggtttgtctgatgttttcctcatggttagagtggggttatagatttttaggaagaataccagaggtgaaggtccttctcactgcatcatgtcaggagttacatgctatcagcttgatggtgtattaactttggacacttggttaaggtagtgtgtgttggttttttgctgctgaaaattactgttattttccctttccatacttctgttctttggaaaacagtcactaagtccagtcatgggaggtggtgggtgggaaagattacattcaaccccctggaagtgggaatatccatatgtagtatttggaatttttctatatggaaaatttgtttctccctcccaccctaatttgtttacatcagtatggactcatgtatattttgtattttgggtaacacagtatttattttgttgcttaagttgtccagcttggctattaggagttctgccaggttggctactatgtccctttgatgtgcccatccttttgatttttgagcacttcttactttctggcactacaagatgctccaggttcatcttggatattccctgccccaaccctagaatccctagaatcaacccctgctccaaagagccctggttccttttgttggagaatcatacttagaaaccaagatctgggcattagatgtgcttgttgctactgggatgtcactgtttgtagcagagttgagaaatatgtatgtatattaatccatgcatatgtacacatctataattatttatgtgtgtacaaagctaaacatgagtttgtactgccgtcttcaactcaaaatttgtcccaaaattttgtggcatatgtttagattttaaagttgatattttccctattgacagaataaactcattaaaagagcaaaaaaaaaaaaaaaaaaacctcaggggggccgtacccatttgcctataggatcgataccattatggcgcgttacacgttggactggaaacctgcttcccaactatgcctgagcattcccttgcgttgcgatcc

SEQ ID NO: 293138 - DNA, 4107 bp, Homo sapiens
ggtgtactggtccggaattttgggatcgcaggcgcacaggggacggttgctggcccaggtgagcgggcgcgctggtccaggtgagcgggcgcgtccccgcgacggcgctgcctgcccgaggcggttcacgtaaagacagcgagatcctgagggccagccgggaaggaggcgtggatatggagctggctgctgccaagtccggggcccgcgccgctgcctagcgcgtcctggggactctgtggggacgcgccccgcgccgcggctcggggacccgtagagcccggcgctgcgcgcatggccctgctctcgcgccccgcgctcaccctcctgctcctcctcatggccgctgttgtcaggtgccaggagcaggcccagaccaccgactggagagccaccctgaagaccatccggaacggcgttcataagatagacacgtacctgaacgccgccttggacctcctgggaggcgaggacggtctctgccagtataaatgcagtgacgcttaacattggtatcccttccctgacaaagtgttgcaaccaacacgacaggtgctatgagacctgtggcaaaagcaagaatgactgtgatgaagaattccagtattgcctctccaagatctgccgagatgtacagaaaacactaggactaactcagcatgttcaggcatgtgaaacaacagtggagctcttgtttgacagtgttatacatttaggttgtaaaccatatctggacagccaacgagccgcatgcaggtgtcattatgaagaaaaaactgatctttaaaggagatgccgacagctagtgacagatgaagatggaagaacataacctttgacaaataactaatgtttttacaacataaaactgtcttatttttgtgaaaggattattttgagaccttaaaataatttatatcttgatgttaaaacctcaaagcaaaaaaagtgagggagatagtgaggggagggcacgcttgtcttctcaggtatcttccccagcattgctcccttacttagtatgccaaatgtcttgaccaatatcaaaaacaagtgcttgtttagcggagaattttgaaaagaggaatatataactcaattttcacaaccacatttaccaaaaaaagagatcaaatataaaattcatcataatgtctgttcaacattatcttatttggaaaatggggaaattatcacttacaagtatttgtttactatgaaattttaaatacacatttatgcctagaaggaacggactttttttttctattttaattacacataatatgtaattaaagtacaacataatatgttgtttctctgtagcccgttgagcatatgagtaagtcacatttctattaggactacttacaaggacaaggtttccatttttccagttgtaaaattggaaccatcagctgataacctcgtagggagcaaccccaggatagctaagtgttatgtaatatgcctagaaggtgatgtgaatgcgattcagaagcatagccactcccattttatgagctactcacatgacaaatgtcatcttttgctataacctttgccaagttagagaaaagatggatttaatgagataaatgaaaagatatttaacctaatatatcaaggcactatttgctgttatgctttgttatttatttcccagcacttgttccttattgtagattttttaaagactgtaaccttttactaactgtggtcttactaaaatttgtgcttgatactgcttttcaaaaagcctttaattagagccaaaaggatggaaaaggcaagatataaatgccttttatagatctcttatttacattgaaaattattaccatatgtttagagcaaatccaagaaaacttcaacagcttctgaagatgtctatgaatgttgaaaacttttcaatctcttggaatgctcagttatgttcctagaccggtctttgctgactactggttgttaacctttccctagcctgggacctcaagccatatatatcctttgggtgacccatggccaaagttattaagatgaactgactttcaaagtcagagaaggacagcatagggagaggcggttatttgtaagtcattacaggtagaacagggcagaaggaaaagtatgttctggagaaagggccatgttcctaactttggagatatgtcattgccgggaacctagtatcttccaacttgaattggtggcagctgttccagtgagacaaggcacatgtatgccttgtggctaagtgagcaaactgggtttccacttaaatgtttgggaccctcaattgattctttatttcaaacctttataaaaggtacagttttgtaagccattattaataattaatgcttatcggctgggcacagtggctcacacctataatcccagcactttgggaggctgaggcggttggatcacttgaggtcaggagtttgagaccagctggccaacatggtgaaacagcgtctctactaaaaatacaaaaatttgccgggcgtggtggcgcatgcttatagtctcagctactcaggaagctgaggtacgagaatcacttgaacccaggaggtggaggttgcagtgagctgagattgtgccactgcactgcagcctgggcaacagagcaagactctaaaaaaaaaatggtttatcaatatttactattgaaatatttgtccaggtaactttacacttacaatgaattcatggattttgttagcagcattggctttctcaaaaggacaaactcaatatcgttataaaatataattcgtgatcacaaattatacaaaaatcagtagaaacagttttttatgttcagattaaaaaaaaaaacttgggataattttagatttacagaaaagttgcaaagatacatggagagcttctgtgaccactcacccagttcccccagtgttaaccttttatttaaccatgaagcatttgtcagaagctaagtaaccagcaatggcaattactattaacggaactttgactttatttttcagattgtactagttttttaattaatgtcatttttcttttccaggatccaatctaggataccacactgaattagtcgtcatgcctaattagcctctggtctgtgatagttccacagtctttctttttcataaccttgacagttttgaggagtactggtcaggtgttttgtagaatattcctcaatttgggtttgtctgatgttttcctcatggttagagtggggttatagatttttaggaagaataccagaggtgaaggtccttctcactgcatcatgtcaggagttacatgctatcagcttgatggtgtattaactttggacacttggttaaggtagtgtgtgttggttttttgctgctgaaaattactgttattttccctttccatacttctgttctttggaaaacagtcactaagtccagtcatgggaggtggtgggtgggaaagattacattcaaccccctggaagtgggaatatccatatgtagtatttggaatttttctatatggaaaatttgtttctccctcccaccctaatttgtttacatcagtatggactcatgtatattttgtattttgggtaacacagtatttattttgttgcttaagttgtccagcttggctattaggagttctgccaggttggctactatgtccctttgatgtgcccatccttttgatttttgagcacttcttactttctggcactacaagatgctccaggttcatcttggatattccctgccccaaccctagaatccctagaatcaacccctgctccaaagagccctggttccttttgttggagaatcatacttagaaaccaagatctgggcattagatgtgcttgttgctactgggatgtcactgtttgtagcagagttgagaaatatgtatgtatattaatccatgcatatgtacacatctataattatttatgtgtgtacaaagctaaacatgagtttgtactgccgtcttcaactcaaaatttgtcccaaaattttgtggcatatgtttagattttaaagttgatattttccctattgacagaataaactcattaaaagagcaaaaaaaaaaaaaaaaaaa

SEQ ID NO: 293139 - DNA, 1324 bp, Homo sapiens
ggtgtactggtccggaattttgggatcgcaggcgcacaggggacggttgctggcccaggtgagcgggcgcgctggtccaggtgagcgggcgcgtccccgcgacggcgctgcctgcccgaggcggttcacgtaaagacagcgagatcctgagggccagccgggaaggaggcgtggatatggagctggctgctgccaagtccggggcccgcgccgctgcctagcgcgtcctggggactctgtggggacgcgccccgcgccgcggctcggggacccgtagagcccggcgctgcgcgcatggccctgctctcgcgccccgcgctcaccctcctgctcctcctcatggccgctgttgtcaggtgccaggagcaggcccagaccaccgactggagagccaccctgaagaccatccggaacggcgttcataagatagacacgtacctgaacgccgccttggacctcctgggaggcgaggacggtctctgccagtataaatgcagtgacggatctaagcctttcccacgttatggttataaaccctccccaccgaatggatgtggctctccactgtttggtgttcatcttaacattggtatcccttccctgacaaagtgttgcaaccaacacgacaggtgctatgagacctgtggcaaaagcaagaatgactgtgatgaagaattccagtattgcctctccaagatctgccgagatgtacagaaaacactaggactaactcagcatgttcaggcatgtgaaacaacagtggagctcttgtttgacagtgttatacatttaggttgtaaaccatatctggacagccaacgagccgcatgcaggtgtcattatgaagaaaaaactgatctttaaaggagatgccgacagctagtgacagatgaagatggaagaacataacctttgacaaataactaatgtttttacaacataaaactgtcttatttttgtgaaaggattattttgagaccttaaaataatttatatcttgatgttaaaacctcaaagcaaaaaaagtgagggagatagtgaggggagggcacgcttgtcttctcaggtatcttccccagcattgctcccttacttagtatgccaaatgtcttgaccaatatcaaaaacaagtgcttgtttagcggagaattttgaaaagaggaatatataactcaattttcacaaccacatttaccaaaaaaagagatcaaatataaaattcatcataatgtctgttcaacattatcttatttggaaaatggggaaattatcacttacaagtatttgtttactatgaaattttaaatacacatttatgcctaga

SEQ ID NO: 293140 - DNA, 1301 bp, Homo sapiens
gcagctgggaggaccctcccgccccaggcagaggtgggggatatccgggagttcatttctgacctcctcgctcttcagcacctccttgaactcccgcttgattcgctgcaccgcgatgttggccatgtctccgcccgcagctgattcgtacccgcctcctccgccaccgctacgaccaccgccaccgccgccacctcttcctccaccgcctcctccctcggcgattcagacctgagcacacgaacactgccactaccaccccggccgccgcgctcgcctcagtgtggaatcacctccgcgcccggccaccaaaatggcgccgggtcggcgcatgcgcacgacgttgacccggccgggcggcgcagccgctcctgttggagcccccatacgcccgagccacgagctcgcgtctcggctggggctgcggccgcgtggctccgccctgccggcgtctggggccgcgagggtgcggcttccaagctggccggccctagccggcccccccggcccttcccggcgcctccgctcctgtttaaacccgggtgctgtggtctgggcttccagcgctggcctctgaccgaaggttcgggcgcaaccgaacgggtttccgacgccgcactcggctggaacgccgccctgactcagctagacccggaacccggaggctgaacgccgtgtctagcgcaggaaaacgctctcccggatctcggtccggcccattttcagttggtgtagccccagaaaatctactgcagtcgtttttgttctgcaacatttatagtaccacgattattcccatcatctcaggtagcacagattattgaattaaggctggttattgttggatcagattgggtttgagacaggtactcggtggagaggcctgagggtgggtttagaagccagatgttgctctttgacctatttaataccgagcttgacacacacacacaatctctctctctctctctctctctcacacacacacacacacacacacactcactcctatgcccatccctagagtgtagggtgggcctaagactgcgcttctaacaagtctcccagttgctgctgctgttggtgctggttccgggaccacattatgagaaccactgaactgaatgaagcatgtgaaaattcacatatattaaagtgaaaattggagaaatggaaacaattacagtacccttcaggggactcggggtgggggagggggagccttatttctgtaaacctaggcctcaaaggtgcctggtgatagtaggcactcaataaatattgaatgagtaaatgagtac

SEQ ID NO: 293141 - DNA, 174 bp, Homo sapiens
ggtctggggccttccacagagacacaaagctgaaccattgagggctgtgggccacagcaaacaagccagagggcttcctagacaggctgccagatttagcaaaacgacccaagacacccagttaaatgtgaatattttatttacttattttttttttttagagatggggtcttg

SEQ ID NO: 293142 - DNA, 833 bp, Homo sapiens
acagtgaatttgatttgctcttatgcttctatttttaattctaaactttccaggagtgtgacaagacacttatctagtaagaaaacagctttatccactttaactaattgtgcttagcatcaagttggattaccacttcagtgacctgaggttattcataattggactgatttctagctgggacatgagtccagggggctgtgtctacccagaataactgtccccagcagaggctgcatttggaactcaagggaaagttcattcctccaggcttttgcttcttaaggggtattagacttgctagttaaaaggcagatttctaggtccccctccagatctgctaaatcaggatttctggggacctgacccaggagactatttttttgtttttgagacagagtcttgctctgtcacccaggctggaatacagtggcacaatctgggctcactgcaaccttcacctcctgggttcaatctcgtgcctcagcctcccaagtaactgggattacaggcgcctgccaccatgcccagctaattttttttatttttttattttttgagacggaatctcgctctgttgcccaggctggagtgcagtggtgcaatctcggctcgctgcaacctccgcctcccgggttcaagaaattctcctgcctcagcctttcgagtagcagggactacaggctcgtgccgccattcccagctaattttttgtattttagtagagatggggtttcaccatgttgcccagggtggtctcaaactcctgagctcaggcaatccacccaccttggcctcccaaagtgccaggattacaggcatgagccaccgtg

SEQ ID NO: 293143 - DNA, 423 bp, Homo sapiens
ttctgtccccgctaggagacacagagtccccgtttctcacccatctgagggcccacgtctgaatccttaatccaggcctcttctcaagattcctagaattcgagagctattgagtatttgaatttccaagatgtgagtctcgcccggaagtttcccggaaaacggtcgctgacacagagtcctcggctaccacacaaaggccagagggctccaccgcccgcatcctgaccccctggtagccacaatgctgcaattgatgtgctgattcacgaaacaacacctattgagcacctgctgtgctgaacactgtcctaccttccaggggtggagcctgatccaaacagacaaaactcctgcccttttcgagtgtacgttttcacagagaaacagtaaaaataaatatataaacaatagattagtttg

SEQ ID NO: 293144 - DNA, 5300 bp, Homo sapiens
tagtcgctgcacagtctgtctcttcgccggttcccggccccgtggatcctacttctctgtcgcccgcggttcgccgccccgctcgccgccgcgatgccagtgtttcatacgcgcacgatcgagagcatcctggagccggtggcacagcagatctcccacctggtgataatgcacgaggagggcgaggtggacggcaaagccattcctgacctcaccgcgcccgtggccgccgtgcaggcggccgtcagcaacctcgtccgggttggaaaagagactgttcaaaccactgaggatcagattttgaagagagatatgccaccagcatttattaaggttgagaatgcttgcaccaagcttgtccaggcagctcagatgcttcagtcagacccttactcagtgcctgctcgagattatctaattgatgggtcaaggggcatcctctctggaacatcagacctgctccttaccttcgatgaggctgaggtccgtaaaattattagagtttgcaaaggaattttggaatatcttacagtggcagaggtggtggagactatggaagatttggtcacttacacaaagaatcttgggccaggaatgactaagatggccaagatgattgacgagagacagcaggagctcactcaccaggagcaccgagtgatgttggtgaactcgatgaacaccgtgaaagagttgctgccagttctcatttcagctatgaagatttttgtaacaactaaaaactcaaaaaaccaaggcatagaggaagctttaaaaaatcgcaattttactgtagaaaaaatgagtgctgaaattaatgagataattcgtgtgttacaactcacctcttgggatgaagatgcctgggccagcaaggacactgaagccatgaagagagcattggcctccatagactccaaactgaaccaggccaaaggttggctccgtgaccctagtgcctccccaggggatgctggtgagcaggccatcagacagatcttagatgaagctggaaaagttggtgaactctgtgcaggcaaagaacgcagggagattctgggaacttgcaaaatgctagggcagatgactgatcaagtggctgacctccgtgccagaggacaaggatcctcaccggtggccatgcagaaagctcagcaggtatctcagggtctggatgtgctcacagcaaaagtggaaaatgcagctcgcaagctggaagccatgaccaactcaaagcagagcattgcaaagaagatcgatgctgctcagaactggcttgcagatccaaatggtggaccggaaggagaagagcagattcgaggtgctttggctgaagctcggaaaatagcagaattatgtgatgatcctaaagaaagagatgacattctacgttcccttggggaaatatctgctctgacttctaaattagcagatctacgaagacaggggaaaggagattctccagaggctcgagccttggccaaacaggtggccacggccctgcagaacctgcagaccaaaaccaaccgggctgtggccaacagcagaccggccaaagcagctgtacaccttgagggcaagattgagcaagcacagcggtggattgataatcccacagtggatgaccgtggagtcggtcaggctgccatccgggggcttgtggccgaagggcatcgtctggctaatgttatgatggggccttatcggcaagatcttctcgccaagtgtgaccgagtggaccagctgacagcccagctggctgacctggctgccagaggggaaggggagagtcctcaggcacgagcacttgcatctcagctccaagactccttaaaggatctaaaagctcggatgcaggaggccatgactcaggaagtgtcagatgttttcagcgataccacaactcccatcaagctgttggcagtggcagccacggcgcctcctgatgcgcctaacagggaagaggtatttgatgagagggcagctaactttgaaaaccattcaggaaagcttggtgctacggccgagaaggcggctgcggttggtactgctaataaatcaacagtggaaggcattcaggcctcagtgaagacggcccgagaactcacaccccaggtggtctcggctgctcgtatcttacttaggaaccctggaaatcaagctgcttatgaacattttgagaccatgaagaaccagtggatcgataatgttgaaaaaatgacagggctggtggacgaagccattgataccaaatctctgttggatgcttcagaagaagcaattaaaaaagacctggacaagtgcaaggtagctatggccaacattcagcctcagatgctggttgctggggcaaccagtattgctcgtcgggccaaccggatcctgctggtggctaagagggaggtggagaattccgaggatcccaagttccgtgaggctgtgaaagctgcctctgatgaattgagcaaaaccatctccccaatggtgatggatgcaaaagctgtggctggaaacatttccgaccctggactgcaaaagagcttcctggactcaggatatcggatcctgggagctgtggccaaggtcagagaagccttccaacctcaggagcctgacttcccgccgcctccaccagaccttgaacaactccgactaacagatgagcttgctcctcccaaaccacctctgcctgaaggtgaggtccctccacctaggcctccaccaccagaggaaaaggatgaagagttccctgagcagaaggccggggaggtgattaaccagccaatgatgatggctgccagacagctccatgatgaagctcgcaaatggtccagcaagggcaatgacatcattgcagcagccaagcgcatggctctgctgatggctgagatgtctcggctggtaagagggggcagtggtaccaagcgggcactcattcagtgtgccaaggacatcgccaaggcctcagatgaggtgactcggttggccaaggaggttgccaagcagtgcacagataaacggattagaaccaacctcttacaggtatgtgagcgaatcccaaccataagcacccagctcaaaatcctgtccacagtgaaggccaccatgctgggccggaccaacatcagtgatgaggagtctgagcaggccacagagatgctggttcacaatgcccagaacctcatgcagtctgtgaaggagactgtgcgggaagctgaagctgcttcaatcaaaattcgaacagatgctggatttacactgcgctgggttagaaagactccctggtaccagtaggcacctggctgagcctggctggcacagaaacctctactaaaaagaaggaaaatgatctgagtcccaggagctgcccagagttgctgggagctgaaaaatcacatcctggcctggcacatcagaaaggaatgggggcctcttcaaattagaagacatttatactcttttttcatggacactttgaaatgtgtttctgtataaagcctgtattctcaaacacagttacacttgtgcaccctctatcccaataggcagactgggtttctagcccatggacttcacataagctcagaatccaagtgaacactagccagacactctgctctgcccttgttccctaggggacacttccctctgtttctctttccttggctcccattcactcttccagaatcccaagacccagggcccaggcaaatcagttactaagaagaaaattgctgtgcctcccaaaattgttttgagctttccatgttgctgccaaccataccttccttccctgggctgtgctacctgggtccttttcagaagtgagctttgctgctacaggggaaggtggcctctgtggagccccagcatatgggggcctggattcatttcctgcccttcctcagtttaatccttctagtttcccacaatataaaactgtacttcactgtcaggaagaaatcacagaatcatatgattctgcttttaccatgcccctgagcaatgtctgtgctagggaaacttcccgtcccatatcctgcctcagcccgccaaggtagccatcccatgaacacactgtgtcctggtgctctctgccactggaagggcagagtagccagggtgtggccctgccatcttcccagcagggccactcccggcactccatgcttagtcactgcctgcagaggtctgtgctgaggccttatcattcattcttagctcttaattgttcattttgagctgaaatgctgcattttaattttaaccaaaacatgtctcctatatcctggtttttgtagccttcctccacatcctttctaaacaagattttaaagacatgtaggtgtttgttcatctgtaactctaaaagatcctttttaaattcagtcctaagaaagaggagtgcttgtcccctaagagtgtttaatggcaaggcagccctgtctgaaggacacttcctgcctaagggagagtggtatttgcagactagaattctagtgctgctgaagatgaatcaatgggaaatactactcctgtaattcctacctccctgcaaccaactacaaccaagctctctgcatctactcccaagtatggggttcaagagagtaatgggtttcatatttcttatcaccacagtaagttcctactaggcaaaatgagagggcagtgtttcctttttggtacttattactgctaagtatttcccagcacatgaaaccttattttttcccaaagccagaaccagatgagtaaaggagtaagaaccttgcctgaacatccttccttcccacccatcgctgtgtgttagttcccaacatcgaatgtgtacaacttaagttggtcctttacactcaggctttcactatttcctttaaaatgaggatgattattttcaaggccctcagcatatttgtatagttgcttgcctgatataaatgcaatattaatgcctttaaagtatgaatctatgccaaagatcacttgttgttttactaaagaaagattacttagaggaaataagaaaaatcatgtttgctctcccggttcttccagtggtttgagacactggtttacactttatgccggatgtgcttttctccaatatcagtgctcgagacacagtgaagcaaattaaaaaaaaaaaaaaaaaaaaatccctgaatgatgattagagacatcaccgctaaaaaactacatttataagctaggatttgttatatgcaaatattttctgcctcttcttttgttctgtttaaaacaataaaatgcatttgtataaaaatgctttaaatgat

SEQ ID NO: 293145 - DNA, 5504 bp, Homo sapiens
tagtcgctgcacagtctgtctcttcgccggttcccggccccgtggatcctacttctctgtcgcccgcggttcgccgccccgctcgccgccgcgatgccagtgtttcatacgcgcacgatcgagagcatcctggagccggtggcacagcagatctcccacctggtgataatgcacgaggagggcgaggtggacggcaaagccattcctgacctcaccgcgcccgtggccgccgtgcaggcggccgtcagcaacctcgtccgggttggaaaagagactgttcaaaccactgaggatcagattttgaagagagatatgccaccagcatttattaaggttgagaatgcttgcaccaagcttgtccaggcagctcagatgcttcagtcagacccttactcagtgcctgctcgagattatctaattgatgggtcaaggggcatcctctctggaacatcagacctgctccttaccttcgatgaggctgaggtccgtaaaattattagagtttgcaaaggaattttggaatatcttacagtggcagaggtggtggagactatggaagatttggtcacttacacaaagaatcttgggccaggaatgactaagatggccaagatgattgacgagagacagcaggagctcactcaccaggagcaccgagtgatgttggtgaactcgatgaacaccgtgaaagagttgctgccagttctcatttcagctatgaagatttttgtaacaactaaaaactcaaaaaaccaaggcatagaggaagctttaaaaaatcgcaattttactgtagaaaaaatgagtgctgaaattaatgagataattcgtgtgttacaactcacctcttgggatgaagatgcctgggccagcaaggacactgaagccatgaagagagcattggcctccatagactccaaactgaaccaggccaaaggttggctccgtgaccctagtgcctccccaggggatgctggtgagcaggccatcagacagatcttagatgaagctggaaaagttggtgaactctgtgcaggcaaagaacgcagggagattctgggaacttgcaaaatgctagggcagatgactgatcaagtggctgacctccgtgccagaggacaaggatcctcaccggtggccatgcagaaagctcagcaggtatctcagggtctggatgtgctcacagcaaaagtggaaaatgcagctcgcaagctggaagccatgaccaactcaaagcagagcattgcaaagaagatcgatgctgctcagaactggcttgcagatccaaatggtggaccggaaggagaagagcagattcgaggtgctttggctgaagctcggaaaatagcagaattatgtgatgatcctaaagaaagagatgacattctacgttcccttggggaaatatctgctctgacttctaaattagcagatctacgaagacaggggaaaggagattctccagaggctcgagccttggccaaacaggtggccacggccctgcagaacctgcagaccaaaaccaaccgggctgtggccaacagcagaccggccaaagcagctgtacaccttgagggcaagattgagcaagcacagcggtggattgataatcccacagtggatgaccgtggagtcggtcaggctgccatccgggggcttgtggccgaagggcatcgtctggctaatgttatgatggggccttatcggcaagatcttctcgccaagtgtgaccgagtggaccagctgacagcccagctggctgacctggctgccagaggggaaggggagagtcctcaggcacgagcacttgcatctcagctccaagactccttaaaggatctaaaagctcggatgcaggaggccatgactcaggaagtgtcagatgttttcagcgataccacaactcccatcaagctgttggcagtggcagccacggcgcctcctgatgcgcctaacagggaagaggtatttgatgagagggcagctaactttgaaaaccattcaggaaagcttggtgctacggccgagaaggcggctgcggttggtactgctaataaatcaacagtggaaggcattcaggcctcagtgaagacggcccgagaactcacaccccaggtggtctcggctgctcgtatcttacttaggaaccctggaaatcaagctgcttatgaacattttgagaccatgaagaaccagtggatcgataatgttgaaaaaatgacagggctggtggacgaagccattgataccaaatctctgttggatgcttcagaagaagcaattaaaaaagacctggacaagtgcaaggtagctatggccaacattcagcctcagatgctggttgctggggcaaccagtattgctcgtcgggccaaccggatcctgctggtggctaagagggaggtggagaattccgaggatcccaagttccgtgaggctgtgaaagctgcctctgatgaattgagcaaaaccatctccccaatggtgatggatgcaaaagctgtggctggaaacatttccgaccctggactgcaaaagagcttcctggactcaggatatcggatcctgggagctgtggccaaggtcagagaagccttccaacctcaggagcctgacttcccgccgcctccaccagaccttgaacaactccgactaacagatgagcttgctcctcccaaaccacctctgcctgaaggtgaggtccctccacctaggcctccaccaccagaggaaaaggatgaagagttccctgagcagaaggccggggaggtgattaaccagccaatgatgatggctgccagacagctccatgatgaagctcgcaaatggtccagcaagccgggcatcccagccgctgaggtgggtataggtgttgtagctgaggcagatgcggccgatgctgctggcttccctgtcccccctgacatggaagacgattacgaacctgagctgctgttaatgccatccaatcagccggtcaaccagcccattctggccgcggctcagtccttgcatcgggaagctaccaagtggtctagtaagggcaatgacatcattgcagcagccaagcgcatggctctgctgatggctgagatgtctcggctggtaagagggggcagtggtaccaagcgggcactcattcagtgtgccaaggacatcgccaaggcctcagatgaggtgactcggttggccaaggaggttgccaagcagtgcacagataaacggattagaaccaacctcttacaggtatgtgagcgaatcccaaccataagcacccagctcaaaatcctgtccacagtgaaggccaccatgctgggccggaccaacatcagtgatgaggagtctgagcaggccacagagatgctggttcacaatgcccagaacctcatgcagtctgtgaaggagactgtgcgggaagctgaagctgcttcaatcaaaattcgaacagatgctggatttacactgcgctgggttagaaagactccctggtaccagtaggcacctggctgagcctggctggcacagaaacctctactaaaaagaaggaaaatgatctgagtcccaggagctgcccagagttgctgggagctgaaaaatcacatcctggcctggcacatcagaaaggaatgggggcctcttcaaattagaagacatttatactcttttttcatggacactttgaaatgtgtttctgtataaagcctgtattctcaaacacagttacacttgtgcaccctctatcccaataggcagactgggtttctagcccatggacttcacataagctcagaatccaagtgaacactagccagacactctgctctgcccttgttccctaggggacacttccctctgtttctctttccttggctcccattcactcttccagaatcccaagacccagggcccaggcaaatcagttactaagaagaaaattgctgtgcctcccaaaattgttttgagctttccatgttgctgccaaccataccttccttccctgggctgtgctacctgggtccttttcagaagtgagctttgctgctacaggggaaggtggcctctgtggagccccagcatatgggggcctggattcatttcctgcccttcctcagtttaatccttctagtttcccacaatataaaactgtacttcactgtcaggaagaaatcacagaatcatatgattctgcttttaccatgcccctgagcaatgtctgtgctagggaaacttcccgtcccatatcctgcctcagcccgccaaggtagccatcccatgaacacactgtgtcctggtgctctctgccactggaagggcagagtagccagggtgtggccctgccatcttcccagcagggccactcccggcactccatgcttagtcactgcctgcagaggtctgtgctgaggccttatcattcattcttagctcttaattgttcattttgagctgaaatgctgcattttaattttaaccaaaacatgtctcctatatcctggtttttgtagccttcctccacatcctttctaaacaagattttaaagacatgtaggtgtttgttcatctgtaactctaaaagatcctttttaaattcagtcctaagaaagaggagtgcttgtcccctaagagtgtttaatggcaaggcagccctgtctgaaggacacttcctgcctaagggagagtggtatttgcagactagaattctagtgctgctgaagatgaatcaatgggaaatactactcctgtaattcctacctccctgcaaccaactacaaccaagctctctgcatctactcccaagtatggggttcaagagagtaatgggtttcatatttcttatcaccacagtaagttcctactaggcaaaatgagagggcagtgtttcctttttggtacttattactgctaagtatttcccagcacatgaaaccttattttttcccaaagccagaaccagatgagtaaaggagtaagaaccttgcctgaacatccttccttcccacccatcgctgtgtgttagttcccaacatcgaatgtgtacaacttaagttggtcctttacactcaggctttcactatttcctttaaaatgaggatgattattttcaaggccctcagcatatttgtatagttgcttgcctgatataaatgcaatattaatgcctttaaagtatgaatctatgccaaagatcacttgttgttttactaaagaaagattacttagaggaaataagaaaaatcatgtttgctctcccggttcttccagtggtttgagacactggtttacactttatgccggatgtgcttttctccaatatcagtgctcgagacacagtgaagcaaattaaaaaaaaaaaaaaaaaaaaatccctgaatgatgattagagacatcaccgctaaaaaactacatttataagctaggatttgttatatgcaaatattttctgcctcttcttttgttctgtttaaaacaataaaatgcatttgtataaaaatgctttaaatgat

SEQ ID NO: 293146 - DNA, 1000 bp, Homo sapiens
cacgcgtcgcggacggcgtgggtgacccacgcgtcggacatgtaggtgtttgttcatctgtaactctaaaagatcctttttaaattcagtcctaagaaagaggagtgcttgtcccctaagagtgtttaatggcaaggcagccctgtctgaaggacacttcctgcctaagggagagtggtatttgcagactagaattctagtgctgctgaagatgaatcaatgggaaatactactcctgtaattcctacctccctgcaaccaactacaaccaagctctctgcatctactcccaagtatggggttcaagagagtaatgggtttcatatttcttatcaccacagtaagttcctactaggcaaaatgagagggcagtgtttcctttttggtacttattactgctaagtatttcccagcacatgaaaccttattttttcccaaagccagaaccagatgagtaaaggagtaagaaccttgcctgaacatccttccttcccacccatcgctgtgtgttagttcccaacatcgaatgtgtacaacttaagttggtcctttacactcaggctttcactatttcctttaaaatgaggatgattattttcaaggccctcagcatatttgtatagttgcttgcctgatataaatgcaatattaatgcctttaaagtatgaatctatgccaaagatcacttgttgttttactaaagaaagattacttagaggaaataagaaaaatcatgtttgctctcccggttcttccagtggtttgagacactggtttacactttatgccggatgtgcttttctccaatatcagtgctcgagacacagtgaagcaaattaaaaaaaaaaaaaaaaaaaaatccctgaatgatgattagagacatcaccgctaaaaaactacatttataagctaggatttgttatatgcaaatattttctgcctcttcttttgttctgtttaaaacaataaaatgcatttgtataaaaatgctttaaatgat

SEQ ID NO: 293147 - DNA, 657 bp, Homo sapiens
tcccgaagcttttaaaaacgaccggccccttaaattttaatacgacccccctttagggggaaattgggtacccggccccccttattttttcccaaagccagaaccagatgagtaaaggagtaagaaccttgcctgaacatccttccttcccacccatcgctgtgtgttagttcccaacatcgaatgtgtacaacttaagttggtcctttacactcaggctttcactatttcctttaaaatgaggatgattattttcaaggccctcagcatatttgtatagttgcttgcctgatataaatgcaatattaatgcctttaaagtatgaatctatgccaaagatcacttgttgttttactaaagaaagattacttagaggaaataagaaaaatcatgtttgctctcccggttcttccagtggtttgagacactggtttacactttatgccggatgtgcttttctccaatatcagtgctcgagacacagtgaagcaaattaaaaaaaaaaaaaaaaaaaaatccctgaatgatgattagagacatcaccgctaaaaaactacatttataagctaggatttgttatatgcaaatattttctgcctcttcttttgttctgtttaaaacaataaaatgcatttgtataaaaatgctttaaatgat

SEQ ID NO: 293148 - DNA, 865 bp, Homo sapiens
tccccagtttattgatatgattaacctggagatgccaaagtgcttgttcagtgctgtgcctggggtgcacatcttgccctttcagactaatatctgggtcttccttttttttagtcaggaaatgtctctctccctctcctttccccctcctctctcctctctctttgtttctcacactgagtgcttgggcgagtgccctgtctcattctttttttttcttccagtgctatccgtatcactcaagaacggcccttttctcctcttctcacccttccggagggatgctaaggtggcaagctccctcctcttctctgtgcttctccttccttccttaacatggccagagcgtgggcagagctcacactgtatctttgcttccctctagggcaatgacatcattgcagcagccaagcgcatggctctgctgatggctgagatgtctcggctggtaagagggggcagtggtaccaagcgggcactcattcagtgtgccaaggacatcgccaaggcctcagatgaggtgactcggttggccaaggaggttgccaagcagtgcacagataaacggattagaaccaacctcttacaggtactcggggaaagaggctgcgtgtgtgtgtgtgtgtgtgtgtgtgcgtgcgtgtgtgtgtgtgttggaggggagggtatgagagggagaaaagcaggagagaaaaactaggtaagggagaaagaggcacttcaccggggacagaaatagcagaaagggaaaaaaacaaatgtactgggaaagacagattcaggaaaggttacttcctaatcaaatgaatgcttccatttctggagaaatggattgtactgaccctaggggaaaaaacaagtggaa

SEQ ID NO: 293149 - DNA, 820 bp, Homo sapiens
tccccagtttattgatatgattaacctggagatgccaaagtgcttgttcagtgctgtgcctggggtgcacatcttgccctttcagactaatatctgggtcttccttttttttagtcaggaaatgtctctctccctctcctttccccctcctctctcctctctctttgtttctcacactgagtgcttgggcgagtgccctgtctcattctttttttttcttccagtgctatccgtatcactcaagaacggcccttttctcctcttctctgtgcttctccttccttccttaacatggccagagcgtgggcagagctcacactgtatctttgcttccctctagggcaatgacatcattgcagcagccaagcgcatggctctgctgatggctgagatgtctcggctggtaagagggggcagtggtaccaagcgggcactcattcagtgtgccaaggacatcgccaaggcctcagatgaggtgactcggttggccaaggaggttgccaagcagtgcacagataaacggattagaaccaacctcttacaggtactcggggaaagaggctgcgtgtgtgtgtgtgtgtgtgtgtgtgcgtgcgtgtgtgtgtgtgttggaggggagggtatgagagggagaaaagcaggagagaaaaactaggtaagggagaaagaggcacttcaccggggacagaaatagcagaaagggaaaaaaacaaatgtactgggaaagacagattcaggaaaggttacttcctaatcaaatgaatgcttccatttctggagaaatggattgtactgaccctaggggaaaaaacaagtggaa

SEQ ID NO: 293150 - DNA, 856 bp, Homo sapiens
  misc_feature (761)..(761): n is a, c, g, or t
  misc_feature (801)..(801): n is a, c, g, or t
  misc_feature (841)..(841): n is a, c, g, or t
tagtcgctgcacagtctgtctcttcgccggttcccggccccgtggatcctacttctctgtcgcccgcggttcgccgccccgctcgccgccgcgatgccagtgtttcatacgcgcacgatcgagagcatcctggagccggtggcacagcagatctcccacctggtgataatgcacgaggagggcgaggtggacggcaaagccattcctgacctcaccgcgcccgtggccgccgtgcaggcggccgtcagcaacctcgtccgggttggaaaagagactgttcaaaccactgaggatcagattttgaagagagatatgccaccagcatttattaagcattcaggcctcagtgaagacggcccgagaactcacaccccaggtggtctcggctgctcgtatcttacttaggaaccctggaaatcaagctgcttatgaacattttgagaccatgaagaaccagtggatcgataatgttgaaaaaatgacagggctggtggacgaagccattgataccaaatctctgttggatgcttcagaagaagcaattaaaaaagacctggacaagtgcaaggtagctatggccaacattcagcctcagatgctggttgctggggcaaccagtattgctcgtcgggccaaccggatcctgctggtggctaagagggaggtggagaattccgaggatcccaagttccgtgaggctgtgaaagctgcctctgatgaattgagcaggccatcagacagatcttaaaatgaagcttggnaaaaagttggtgaactcttgtgcaaggcaaaagaacgcangggagaattcttggggaacttggcaaaatgcttagggcanaatgactggatcaag

SEQ ID NO: 293151 - DNA, 616 bp, Homo sapiens
gactgtctcttcaaactagaagataagcttttgagaatgggggttgtttagtcttcacattcagcaaattactgcagagtatataatgctcctgcttgtacctggtaagcactggttgaactggaaatgaaggttatgtgcgtgtgtgtgtgagtgtgtttgtgtgcatttgcacatgatggtgatggctaaacgtctgaggagatccatcaaggccaggatttggagtttgactgttgttttattaactagggtttgatgtcatctctaaagtctttgagcagttgctgcccttcttaaaggatgaaactttttcttaggctgcctgacccattttattgaaataaatgttcttaatatctgttttttcctcaaggtatttgatgagagggcagctaactttgaaaaccattcaggaaagcttggtgctacggccgagaaggcggctgcggttggtactgctaataaatcaacagtggaaggcattcaggcctcagtgaagacggcccgagaactcacaccccaggttgggttttgctcattcctcatacagtgttcagtaaagaaagttaattacagaacagtttctatacatttttgaatacttaccgtaaga

SEQ ID NO: 293152 - DNA, 667 bp, Homo sapiens
acggtcctctcaccgctctccagctcacaaccatttcctacctacagcttcatgatcttaaagtgtccattgagtctcatccctgacttcccgccgcctccaccagaccttgaacaactccgactaacagatgagcttgctcctcccaaaccacctctgcctgaaggtgaggtccctccacctaggcctccaccaccagaggaaaaggatgaagagttccctgagcagaaggccggggaggtgattaaccagccaatgatgatggctgccagacagctccatgatgaagctcgcaaatggtccagcaaggtaagtagtgaagcttttcttgttgagaaaggatgtcttctcggaaaggatgaaggaccatgaaagacccagaaagaagagtctatttggagtcaccctctctctctcctttggttcctgtgttgccaatagcatattcctcttcttacctgtgctttagtgagatgtttctgacacctgatggtttctccttcaagcttgcaaaagccagagtcagggtgcctgtgatttgagaagaggattcctgtcctttgtccattagagtgccaggtgccttgaccttagcatttggggtcttttagaaattgcttatctttcttggaactgcaaatgtttttagatgctacattgctaatga

SEQ ID NO: 293153 - DNA, 355 bp, Homo sapiens
ttgaacctgggaggtggaggttgcagtgagccaagatcatctccatagactccaaactgaaccaggccaaaggttggctccgtgaccctagtgcctccccaggtaaccctctagttctgcttttctgatcaatacaacgagaagctaaaaaccaagcaaatgaaagaaagaaattttcccataatctcatcatctgagagaactactgtaacattatggggcataccccattatctgatagttctgagtaactgaagcaagtagtaggccttacaaggatgaagggaatagattcgatcacctctaatcacggaggagtaagtcatactgagctgggcattctttgcaaaatttt

SEQ ID NO: 293154 - DNA, 5123 bp, Homo sapiens
cgccacgatctttgcaatgctctgctttgagttggtcatggcttccagcttgcgagctgcattttccacttttgctgtgagcacatccagaccctgagatacctgctgagctttctgcatggccaccggtgaggatccttgtcctctggcacggaggtcagccacttgatcagtcatctgccctagcattttgcaagttcccagaatctcccttactcagtgcctgctcgagattatctaattgatgggtcaaggggcatcctctctggaacatcagacctgctccttaccttcgatgaggctgaggtccgtaaaattattagagtttgcaaaggaattttggaatatcttacagtggcagaggtggtggagactatggaagatttggtcacttacacaaagaatcttgggccaggaatgactaagatggccaagatgattgacgagagacagcaggagctcactcaccaggagcaccgagtgatgttggtgaactcgatgaacaccgtgaaagagttgctgccagttctcatttcagctatgaagatttttgtaacaactaaaaactcaaaaaaccaaggcatagaggaagctttaaaaaatcgcaattttactgtagaaaaaatgagtgctgaaattaatgagataattcgtgtgttacaactcacctcttgggatgaagatgcctgggccagcaaggacactgaagccatgaagagagcattggcctccatagactccaaactgaaccaggccaaaggttggctccgtgaccctagtgcctccccaggggatgctggtgagcaggccatcagacagatcttagatgaagctggaaaagttggtgaactctgtgcaggcaaagaacgcagggagattctgggaacttgcaaaatgctagggcagatgactgatcaagtggctgacctccgtgccagaggacaaggatcctcaccggtggccatgcagaaagctcagcaggtatctcagggtctggatgtgctcacagcaaaagtggaaaatgcagctcgcaagctggaagccatgaccaactcaaagcagagcattgcaaagaagatcgatgctgctcagaactggcttgcagatccaaatggtggaccggaaggagaagagcagattcgaggtgctttggctgaagctcggaaaatagcagaattatgtgatgatcctaaagaaagagatgacattctacgttcccttggggaaatatctgctctgacttctaaattagcagatctacgaagacaggggaaaggagattctccagaggctcgagccttggccaaacaggtggccacggccctgcagaacctgcagaccaaaaccaaccgggctgtggccaacagcagaccggccaaagcagctgtacaccttgagggcaagattgagcaagcacagcggtggattgataatcccacagtggatgaccgtggagtcggtcaggctgccatccgggggcttgtggccgaagggcatcgtctggctaatgttatgatggggccttatcggcaagatcttctcgccaagtgtgaccgagtggaccagctgacagcccagctggctgacctggctgccagaggggaaggggagagtcctcaggcacgagcacttgcatctcagctccaagactccttaaaggatctaaaagctcggatgcaggaggccatgactcaggaagtgtcagatgttttcagcgataccacaactcccatcaagctgttggcagtggcagccacggcgcctcctgatgcgcctaacagggaagaggtatttgatgagagggcagctaactttgaaaaccattcaggaaagcttggtgctacggccgagaaggcggctgcggttggtactgctaataaatcaacagtggaaggcattcaggcctcagtgaagacggcccgagaactcacaccccaggtggtctcggctgctcgtatcttacttaggaaccctggaaatcaagctgcttatgaacattttgagaccatgaagaaccagtggatcgataatgttgaaaaaatgacagggctggtggacgaagccattgataccaaatctctgttggatgcttcagaagaagcaattaaaaaagacctggacaagtgcaaggtagctatggccaacattcagcctcagatgctggttgctggggcaaccagtattgctcgtcgggccaaccggatcctgctggtggctaagagggaggtggagaattccgaggatcccaagttccgtgaggctgtgaaagctgcctctgatgaattgagcaaaaccatctccccaatggtgatggatgcaaaagctgtggctggaaacatttccgaccctggactgcaaaagagcttcctggactcaggatatcggatcctgggagctgtggccaaggtcagagaagccttccaacctcaggagcctgacttcccgccgcctccaccagaccttgaacaactccgactaacagatgagcttgctcctcccaaaccacctctgcctgaaggtgaggtccctccacctaggcctccaccaccagaggaaaaggatgaagagttccctgagcagaaggccggggaggtgattaaccagccaatgatgatggctgccagacagctccatgatgaagctcgcaaatggtccagcaagggcaatgacatcattgcagcagccaagcgcatggctctgctgatggctgagatgtctcggctggtaagagggggcagtggtaccaagcgggcactcattcagtgtgccaaggacatcgccaaggcctcagatgaggtgactcggttggccaaggaggttgccaagcagtgcacagataaacggattagaaccaacctcttacaggtatgtgagcgaatcccaaccataagcacccagctcaaaatcctgtccacagtgaaggccaccatgctgggccggaccaacatcagtgatgaggagtctgagcaggccacagagatgctggttcacaatgcccagaacctcatgcagtctgtgaaggagactgtgcgggaagctgaagctgcttcaatcaaaattcgaacagatgctggatttacactgcgctgggttagaaagactccctggtaccagtaggcacctggctgagcctggctggcacagaaacctctactaaaaagaaggaaaatgatctgagtcccaggagctgcccagagttgctgggagctgaaaaatcacatcctggcctggcacatcagaaaggaatgggggcctcttcaaattagaagacatttatactcttttttcatggacactttgaaatgtgtttctgtataaagcctgtattctcaaacacagttacacttgtgcaccctctatcccaataggcagactgggtttctagcccatggacttcacataagctcagaatccaagtgaacactagccagacactctgctctgcccttgttccctaggggacacttccctctgtttctctttccttggctcccattcactcttccagaatcccaagacccagggcccaggcaaatcagttactaagaagaaaattgctgtgcctcccaaaattgttttgagctttccatgttgctgccaaccataccttccttccctgggctgtgctacctgggtccttttcagaagtgagctttgctgctacaggggaaggtggcctctgtggagccccagcatatgggggcctggattcatttcctgcccttcctcagtttaatccttctagtttcccacaatataaaactgtacttcactgtcaggaagaaatcacagaatcatatgattctgcttttaccatgcccctgagcaatgtctgtgctagggaaacttcccgtcccatatcctgcctcagcccgccaaggtagccatcccatgaacacactgtgtcctggtgctctctgccactggaagggcagagtagccagggtgtggccctgccatcttcccagcagggccactcccggcactccatgcttagtcactgcctgcagaggtctgtgctgaggccttatcattcattcttagctcttaattgttcattttgagctgaaatgctgcattttaattttaaccaaaacatgtctcctatatcctggtttttgtagccttcctccacatcctttctaaacaagattttaaagacatgtaggtgtttgttcatctgtaactctaaaagatcctttttaaattcagtcctaagaaagaggagtgcttgtcccctaagagtgtttaatggcaaggcagccctgtctgaaggacacttcctgcctaagggagagtggtatttgcagactagaattctagtgctgctgaagatgaatcaatgggaaatactactcctgtaattcctacctccctgcaaccaactacaaccaagctctctgcatctactcccaagtatggggttcaagagagtaatgggtttcatatttcttatcaccacagtaagttcctactaggcaaaatgagagggcagtgtttcctttttggtacttattactgctaagtatttcccagcacatgaaaccttattttttcccaaagccagaaccagatgagtaaaggagtaagaaccttgcctgaacatccttccttcccacccatcgctgtgtgttagttcccaacatcgaatgtgtacaacttaagttggtcctttacactcaggctttcactatttcctttaaaatgaggatgattattttcaaggccctcagcatatttgtatagttgcttgcctgatataaatgcaatattaatgcctttaaagtatgaatctatgccaaagatcacttgttgttttactaaagaaagattacttagaggaaataagaaaaatcatgtttgctctcccggttcttccagtggtttgagacactggtttacactttatgccggatgtgcttttctccaatatcagtgctcgagacacagtgaagcaaattaaaaaaaaaaaaaaaaaaaaatccctgaatgatgattagagacatcaccgctaaaaaactacatttataagctaggatttgttatatgcaaatattttctgcctcttcttttgttctgtttaaaacaataaaatgcatttgtataaaaatgctttaaatgat

SEQ ID NO: 293155 - DNA, 4308 bp, Homo sapiens
tttactgggaaaaaggaaaaagccaagcatgttcatgaaaaccacatgtactgtgctattgggaatattttgtcattaagtatttgagggtgtacaatgacagcatgtgtctgttttgagcagaggacaaggatcctcaccggtggccatgcagaaagctcagcaggtatctcagggtctggatgtgctcacagcaaaagtggaaaatgcagctcgcaagctggaagccatgaccaactcaaagcagagcattgcaaagaagatcgatgctgctcagaactggcttgcagatccaaatggtggaccggaaggagaagagcagattcgaggtgctttggctgaagctcggaaaatagcagaattatgtgatgatcctaaagaaagagatgacattctacgttcccttggggaaatatctgctctgacttctaaattagcagatctacgaagacaggggaaaggagattctccagaggctcgagccttggccaaacaggtggccacggccctgcagaacctgcagaccaaaaccaaccgggctgtggccaacagcagaccggccaaagcagctgtacaccttgagggcaagattgagcaagcacagcggtggattgataatcccacagtggatgaccgtggagtcggtcaggctgccatccgggggcttgtggccgaagggcatcgtctggctaatgttatgatggggccttatcggcaagatcttctcgccaagtgtgaccgagtggaccagctgacagcccagctggctgacctggctgccagaggggaaggggagagtcctcaggcacgagcacttgcatctcagctccaagactccttaaaggatctaaaagctcggatgcaggaggccatgactcaggaagtgtcagatgttttcagcgataccacaactcccatcaagctgttggcagtggcagccacggcgcctcctgatgcgcctaacagggaagaggtatttgatgagagggcagctaactttgaaaaccattcaggaaagcttggtgctacggccgagaaggcggctgcggttggtactgctaataaatcaacagtggaaggcattcaggcctcagtgaagacggcccgagaactcacaccccaggtggtctcggctgctcgtatcttacttaggaaccctggaaatcaagctgcttatgaacattttgagaccatgaagaaccagtggatcgataatgttgaaaaaatgacagggctggtggacgaagccattgataccaaatctctgttggatgcttcagaagaagcaattaaaaaagacctggacaagtgcaaggtagctatggccaacattcagcctcagatgctggttgctggggcaaccagtattgctcgtcgggccaaccggatcctgctggtggctaagagggaggtggagaattccgaggatcccaagttccgtgaggctgtgaaagctgcctctgatgaattgagcaaaaccatctccccaatggtgatggatgcaaaagctgtggctggaaacatttccgaccctggactgcaaaagagcttcctggactcaggatatcggatcctgggagctgtggccaaggtcagagaagccttccaacctcaggagcctgacttcccgccgcctccaccagaccttgaacaactccgactaacagatgagcttgctcctcccaaaccacctctgcctgaaggtgaggtccctccacctaggcctccaccaccagaggaaaaggatgaagagttccctgagcagaaggccggggaggtgattaaccagccaatgatgatggctgccagacagctccatgatgaagctcgcaaatggtccagcaagggcaatgacatcattgcagcagccaagcgcatggctctgctgatggctgagatgtctcggctggtaagagggggcagtggtaccaagcgggcactcattcagtgtgccaaggacatcgccaaggcctcagatgaggtgactcggttggccaaggaggttgccaagcagtgcacagataaacggattagaaccaacctcttacaggtatgtgagcgaatcccaaccataagcacccagctcaaaatcctgtccacagtgaaggccaccatgctgggccggaccaacatcagtgatgaggagtctgagcaggccacagagatgctggttcacaatgcccagaacctcatgcagtctgtgaaggagactgtgcgggaagctgaagctgcttcaatcaaaattcgaacagatgctggatttacactgcgctgggttagaaagactccctggtaccagtaggcacctggctgagcctggctggcacagaaacctctactaaaaagaaggaaaatgatctgagtcccaggagctgcccagagttgctgggagctgaaaaatcacatcctggcctggcacatcagaaaggaatgggggcctcttcaaattagaagacatttatactcttttttcatggacactttgaaatgtgtttctgtataaagcctgtattctcaaacacagttacacttgtgcaccctctatcccaataggcagactgggtttctagcccatggacttcacataagctcagaatccaagtgaacactagccagacactctgctctgcccttgttccctaggggacacttccctctgtttctctttccttggctcccattcactcttccagaatcccaagacccagggcccaggcaaatcagttactaagaagaaaattgctgtgcctcccaaaattgttttgagctttccatgttgctgccaaccataccttccttccctgggctgtgctacctgggtccttttcagaagtgagctttgctgctacaggggaaggtggcctctgtggagccccagcatatgggggcctggattcatttcctgcccttcctcagtttaatccttctagtttcccacaatataaaactgtacttcactgtcaggaagaaatcacagaatcatatgattctgcttttaccatgcccctgagcaatgtctgtgctagggaaacttcccgtcccatatcctgcctcagcccgccaaggtagccatcccatgaacacactgtgtcctggtgctctctgccactggaagggcagagtagccagggtgtggccctgccatcttcccagcagggccactcccggcactccatgcttagtcactgcctgcagaggtctgtgctgaggccttatcattcattcttagctcttaattgttcattttgagctgaaatgctgcattttaattttaaccaaaacatgtctcctatatcctggtttttgtagccttcctccacatcctttctaaacaagattttaaagacatgtaggtgtttgttcatctgtaactctaaaagatcctttttaaattcagtcctaagaaagaggagtgcttgtcccctaagagtgtttaatggcaaggcagccctgtctgaaggacacttcctgcctaagggagagtggtatttgcagactagaattctagtgctgctgaagatgaatcaatgggaaatactactcctgtaattcctacctccctgcaaccaactacaaccaagctctctgcatctactcccaagtatggggttcaagagagtaatgggtttcatatttcttatcaccacagtaagttcctactaggcaaaatgagagggcagtgtttcctttttggtacttattactgctaagtatttcccagcacatgaaaccttattttttcccaaagccagaaccagatgagtaaaggagtaagaaccttgcctgaacatccttccttcccacccatcgctgtgtgttagttcccaacatcgaatgtgtacaacttaagttggtcctttacactcaggctttcactatttcctttaaaatgaggatgattattttcaaggccctcagcatatttgtatagttgcttgcctgatataaatgcaatattaatgcctttaaagtatgaatctatgccaaagatcacttgttgttttactaaagaaagattacttagaggaaataagaaaaatcatgtttgctctcccggttcttccagtggtttgagacactggtttacactttatgccggatgtgcttttctccaatatcagtgctcgagacacagtgaagcaaattaaaaaaaaaaaaaaaaaaaaatccctgaatgatgattagagacatcaccgctaaaaaactacatttataagctaggatttgttatatgcaaatattttctgcctcttcttttgttctgtttaaaacaataaaatgcatttgtataaaaatgctttaaatgat

SEQ ID NO: 293156 - DNA, 3267 bp, Homo sapiens
gattcaggcctcagttgaaggacggcccgagaactcacaccccaggtggtctcgggctgcttcggtattcttttaaccttttaaggggggaaaaaaccccccaccctttggcgcaaaaattcaacaggctgcttatgaacattttgagaccatgaagaaccagtggatcgataatgttgaaaaaatgacagggctggtggacgaagccattgataccaaatctctgttggatgcttcagaagaagcaattaaaaaagacctggacaagtgcaaggtagctatggccaacattcagcctcagatgctggttgctggggcaaccagtattgctcgtcgggccaaccggatcctgctggtggctaagagggaggtggagaattccgaggatcccaagttccgtgaggctgtgaaagctgcctctgatgaattgagcaaaaccatctccccaatggtgatggatgcaaaagctgtggctggaaacatttccgaccctggactgcaaaagagcttcctggactcaggatatcggatcctgggagctgtggccaaggtcagagaagccttccaacctcaggagcctgacttcccgccgcctccaccagaccttgaacaactccgactaacagatgagcttgctcctcccaaaccacctctgcctgaaggtgaggtccctccacctaggcctccaccaccagaggaaaaggatgaagagttccctgagcagaaggccggggaggtgattaaccagccaatgatgatggctgccagacagctccatgatgaagctcgcaaatggtccagcaagggcaatgacatcattgcagcagccaagcgcatggctctgctgatggctgagatgtctcggctggtaagagggggcagtggtaccaagcgggcactcattcagtgtgccaaggacatcgccaaggcctcagatgaggtgactcggttggccaaggaggttgccaagcagtgcacagataaacggattagaaccaacctcttacaggtatgtgagcgaatcccaaccataagcacccagctcaaaatcctgtccacagtgaaggccaccatgctgggccggaccaacatcagtgatgaggagtctgagcaggccacagagatgctggttcacaatgcccagaacctcatgcagtctgtgaaggagactgtgcgggaagctgaagctgcttcaatcaaaattcgaacagatgctggatttacactgcgctgggttagaaagactccctggtaccagtaggcacctggctgagcctggctggcacagaaacctctactaaaaagaaggaaaatgatctgagtcccaggagctgcccagagttgctgggagctgaaaaatcacatcctggcctggcacatcagaaaggaatgggggcctcttcaaattagaagacatttatactcttttttcatggacactttgaaatgtgtttctgtataaagcctgtattctcaaacacagttacacttgtgcaccctctatcccaataggcagactgggtttctagcccatggacttcacataagctcagaatccaagtgaacactagccagacactctgctctgcccttgttccctaggggacacttccctctgtttctctttccttggctcccattcactcttccagaatcccaagacccagggcccaggcaaatcagttactaagaagaaaattgctgtgcctcccaaaattgttttgagctttccatgttgctgccaaccataccttccttccctgggctgtgctacctgggtccttttcagaagtgagctttgctgctacaggggaaggtggcctctgtggagccccagcatatgggggcctggattcatttcctgcccttcctcagtttaatccttctagtttcccacaatataaaactgtacttcactgtcaggaagaaatcacagaatcatatgattctgcttttaccatgcccctgagcaatgtctgtgctagggaaacttcccgtcccatatcctgcctcagcccgccaaggtagccatcccatgaacacactgtgtcctggtgctctctgccactggaagggcagagtagccagggtgtggccctgccatcttcccagcagggccactcccggcactccatgcttagtcactgcctgcagaggtctgtgctgaggccttatcattcattcttagctcttaattgttcattttgagctgaaatgctgcattttaattttaaccaaaacatgtctcctatatcctggtttttgtagccttcctccacatcctttctaaacaagattttaaagacatgtaggtgtttgttcatctgtaactctaaaagatcctttttaaattcagtcctaagaaagaggagtgcttgtcccctaagagtgtttaatggcaaggcagccctgtctgaaggacacttcctgcctaagggagagtggtatttgcagactagaattctagtgctgctgaagatgaatcaatgggaaatactactcctgtaattcctacctccctgcaaccaactacaaccaagctctctgcatctactcccaagtatggggttcaagagagtaatgggtttcatatttcttatcaccacagtaagttcctactaggcaaaatgagagggcagtgtttcctttttggtacttattactgctaagtatttcccagcacatgaaaccttattttttcccaaagccagaaccagatgagtaaaggagtaagaaccttgcctgaacatccttccttcccacccatcgctgtgtgttagttcccaacatcgaatgtgtacaacttaagttggtcctttacactcaggctttcactatttcctttaaaatgaggatgattattttcaaggccctcagcatatttgtatagttgcttgcctgatataaatgcaatattaatgcctttaaagtatgaatctatgccaaagatcacttgttgttttactaaagaaagattacttagaggaaataagaaaaatcatgtttgctctcccggttcttccagtggtttgagacactggtttacactttatgccggatgtgcttttctccaatatcagtgctcgagacacagtgaagcaaattaaaaaaaaaaaaaaaaaaaaatccctgaatgatgattagagacatcaccgctaaaaaactacatttataagctaggatttgttatatgcaaatattttctgcctcttcttttgttctgtttaaaacaataaaatgcatttgtataaaaatgctttaaatgat

SEQ ID NO: 293157 - DNA, 3215 bp, Homo sapiens
attatgtaggaagagtttgagctgaagaagagaattctggatgttatactttctcatgagaagtttgagtggataacagtgttttggagtttctgttcttctaaattgaaactaaattccatttctgttttcctaacagggctggtggacgaagccattgataccaaatctctgttggatgcttcagaagaagcaattaaaaaagacctggacaagtgcaaggtagctatggccaacattcagcctcagatgctggttgctggggcaaccagtattgctcgtcgggccaaccggatcctgctggtggctaagagggaggtggagaattccgaggatcccaagttccgtgaggctgtgaaagctgcctctgatgaattgagcaaaaccatctccccaatggtgatggatgcaaaagctgtggctggaaacatttccgaccctggactgcaaaagagcttcctggactcaggatatcggatcctgggagctgtggccaaggtcagagaagccttccaacctcaggagcctgacttcccgccgcctccaccagaccttgaacaactccgactaacagatgagcttgctcctcccaaaccacctctgcctgaaggtgaggtccctccacctaggcctccaccaccagaggaaaaggatgaagagttccctgagcagaaggccggggaggtgattaaccagccaatgatgatggctgccagacagctccatgatgaagctcgcaaatggtccagcaagggcaatgacatcattgcagcagccaagcgcatggctctgctgatggctgagatgtctcggctggtaagagggggcagtggtaccaagcgggcactcattcagtgtgccaaggacatcgccaaggcctcagatgaggtgactcggttggccaaggaggttgccaagcagtgcacagataaacggattagaaccaacctcttacaggtatgtgagcgaatcccaaccataagcacccagctcaaaatcctgtccacagtgaaggccaccatgctgggccggaccaacatcagtgatgaggagtctgagcaggccacagagatgctggttcacaatgcccagaacctcatgcagtctgtgaaggagactgtgcgggaagctgaagctgcttcaatcaaaattcgaacagatgctggatttacactgcgctgggttagaaagactccctggtaccagtaggcacctggctgagcctggctggcacagaaacctctactaaaaagaaggaaaatgatctgagtcccaggagctgcccagagttgctgggagctgaaaaatcacatcctggcctggcacatcagaaaggaatgggggcctcttcaaattagaagacatttatactcttttttcatggacactttgaaatgtgtttctgtataaagcctgtattctcaaacacagttacacttgtgcaccctctatcccaataggcagactgggtttctagcccatggacttcacataagctcagaatccaagtgaacactagccagacactctgctctgcccttgttccctaggggacacttccctctgtttctctttccttggctcccattcactcttccagaatcccaagacccagggcccaggcaaatcagttactaagaagaaaattgctgtgcctcccaaaattgttttgagctttccatgttgctgccaaccataccttccttccctgggctgtgctacctgggtccttttcagaagtgagctttgctgctacaggggaaggtggcctctgtggagccccagcatatgggggcctggattcatttcctgcccttcctcagtttaatccttctagtttcccacaatataaaactgtacttcactgtcaggaagaaatcacagaatcatatgattctgcttttaccatgcccctgagcaatgtctgtgctagggaaacttcccgtcccatatcctgcctcagcccgccaaggtagccatcccatgaacacactgtgtcctggtgctctctgccactggaagggcagagtagccagggtgtggccctgccatcttcccagcagggccactcccggcactccatgcttagtcactgcctgcagaggtctgtgctgaggccttatcattcattcttagctcttaattgttcattttgagctgaaatgctgcattttaattttaaccaaaacatgtctcctatatcctggtttttgtagccttcctccacatcctttctaaacaagattttaaagacatgtaggtgtttgttcatctgtaactctaaaagatcctttttaaattcagtcctaagaaagaggagtgcttgtcccctaagagtgtttaatggcaaggcagccctgtctgaaggacacttcctgcctaagggagagtggtatttgcagactagaattctagtgctgctgaagatgaatcaatgggaaatactactcctgtaattcctacctccctgcaaccaactacaaccaagctctctgcatctactcccaagtatggggttcaagagagtaatgggtttcatatttcttatcaccacagtaagttcctactaggcaaaatgagagggcagtgtttcctttttggtacttattactgctaagtatttcccagcacatgaaaccttattttttcccaaagccagaaccagatgagtaaaggagtaagaaccttgcctgaacatccttccttcccacccatcgctgtgtgttagttcccaacatcgaatgtgtacaacttaagttggtcctttacactcaggctttcactatttcctttaaaatgaggatgattattttcaaggccctcagcatatttgtatagttgcttgcctgatataaatgcaatattaatgcctttaaagtatgaatctatgccaaagatcacttgttgttttactaaagaaagattacttagaggaaataagaaaaatcatgtttgctctcccggttcttccagtggtttgagacactggtttacactttatgccggatgtgcttttctccaatatcagtgctcgagacacagtgaagcaaattaaaaaaaaaaaaaaaaaaaaatccctgaatgatgattagagacatcaccgctaaaaaactacatttataagctaggatttgttatatgcaaatattttctgcctcttcttttgttctgtttaaaacaataaaatgcatttgtataaaaatgctttaaatgat

SEQ ID NO: 293158 - DNA, 5250 bp, Homo sapiens
tagtcgctgcacagtctgtctcttcgccggttcccggccccgtggatcctacttctctgtcgcccgcggttcgccgccccgctcgccgccgcgatgccagtgtttcatacgcgcacgatcgagagcatcctggagccggtggcacagcagatctcccacctggtgataatgcacgaggagggcgaggtggacggcaaagccattcctgacctcaccgcgcccgtggccgccgtgcaggcggccgtcagcaacctcgtccgggttggaaaagagactgttcaaaccactgaggatcagattttgaagagagatatgccaccagcatttattaaggttgagaatgcttgcaccaagcttgtccaggcagctcagatgcttcagtcagacccttactcagtgcctgctcgagattatctaattgatgggtcaaggggcatcctctctggaacatcagacctgctccttaccttcgatgaggctgaggtccgtaaaattattagagtttgcaaaggaattttggaatatcttacagtggcagaggtggtggagactatggaagatttggtcacttacacaaagaatcttgggccaggaatgactaagatggccaagatgattgacgagagacagcaggagctcactcaccaggagcaccgagtgatgttggtgaactcgatgaacaccgtgaaagagttgctgccagttctcatttcagctatgaagatttttgtaacaactaaaaactcaaaaaaccaaggcatagaggaagctttaaaaaatcgcaattttactgtagaaaaaatgagtgctgaaattaatgagataattcgtgtgttacaactcacctcttgggatgaagatgcctgggccagcaaggacactgaagccatgaagagagcattggcctccatagactccaaactgaaccaggccaaaggttggctccgtgaccctagtgcctccccaggggatgctggtgagcaggccatcagacagatcttagatgaagctggaaaagttggtgaactctgtgcaggcaaagaacgcagggagattctgggaacttgcaaaatgctagggcagatgactgatcaagtggctgacctccgtgccagaggacaaggatcctcaccggtggccatgcagaaagctcagcaggtatctcagggtctggatgtgctcacagcaaaagtggaaaatgcagctcgcaagctggaagccatgaccaactcaaagcagagcattgcaaagaagatcgatgctgctcagaactggcttgcagatccaaatggtggaccggaaggagaagagcagattcgaggtgctttggctgaagctcggaaaatagcagaattatgtgatgatcctaaagaaagagatgacattctacgttcccttggggaaatatctgctctgacttctaaattagcagatctacgaagacaggggaaaggagattctccagaggctcgagccttggccaaacaggtggccacggccctgcagaacctgcagaccaaaaccaaccgggctgtggccaacagcagaccggccaaagcagctgtacaccttgagggcaagattgagcaagcacagcggtggattgataatcccacagtggatgaccgtggagtcggtcaggctgccatccgggggcttgtggccgaagggcatcgtctggctaatgttatgatggggccttatcggcaagatcttctcgccaagtgtgaccgagtggaccagctgacagcccagctggctgacctggctgccagaggggaaggggagagtcctcaggcacgagcacttgcatctcagctccaagactccttaaaggatctaaaagctcggatgcaggaggccatgactcaggaagtgtcagatgttttcagcgataccacaactcccatcaagctgttggcagtggcagccacggcgcctcctgatgcgcctaacagggaagaggtatttgatgagagggcagctaactttgaaaaccattcaggaaagcttggtgctacggccgagaaggcggctgcggttggtactgctaataaatcaacagtggaaggcattcaggcctcagtgaagacggcccgagaactcacaccccaggtggtctcggctgctcgtatcttacttaggaaccctggaaatcaagctgcttatgaacattttgagaccatgaagaaccagtggatcgataatgttgaaaaaatgacagggctggtggacgaagccattgataccaaatctctgttggatgcttcagaagaagcaattaaaaaagacctggacaagtgcaaggtagctatggccaacattcagcctcagatgctggttgctggggcaaccagtattgctcgtcgggccaaccggatcctgctggtggctaagagggaggtggagaattccgaggatcccaagttccgtgaggctgtgaaagctgcctctgatgaattgagcaaaaccatctccccaatggtgatggatgcaaaagctgtggctggaaacatttccgaccctggactgcaaaagagcttcctggactcaggatatcggatcctgggagctgtggccaaggtcagagaagccttccaacctcaggagcctgacttcccgccgcctccaccagaccttgaacaactccgactaacagatgagcttgctcctcccaaaccacctctgcctgaaggtgaggtccctccacctaggcctccaccaccagaggaaaaggatgaagagttccctgagcagaaggccggggaggtgattaaccagccaatgatgatggctgccagacagctccatgatgaagctcgcaaatggtccagcaagggcaatgacatcattgcagcagccaagcgcatggctctgctgatggctgagatgtctcggctggtaagagggggcagtggtaccaagcgggcactcattcagtgtgccaaggacatcgccaaggcctcagatgaggtgactcggttggccaaggaggttgccaagcagtgcacagataaacggattagaaccaacctcttacaggtatgtgagcgaatcccaaccataagcacccagctcaaaatcctgtccacagtgaaggccaccatgctgggccggaccaacatcagtgatgaggagtctgagcaggccacagagatgctggttcacaatgcccagaacctcatgcagtctgtgaaggagactgtgcgggaagctgaagctgcttcaatcaaaattcgaacagatgctggatttacactgcgctgggttagaaagactccctggtaccagtaggcacctggctgagcctggctggcacagaaacctctactaaaaagaaggaaaatgatctgagtcccaggagctgcccagagttgctgggagctgaaaaataagacatttatactcttttttcatggacactttgaaatgtgtttctgtataaagcctgtattctcaaacacagttacacttgtgcaccctctatcccaataggcagactgggtttctagcccatggacttcacataagctcagaatccaagtgaacactagccagacactctgctctgcccttgttccctaggggacacttccctctgtttctctttccttggctcccattcactcttccagaatcccaagacccagggcccaggcaaatcagttactaagaagaaaattgctgtgcctcccaaaattgttttgagctttccatgttgctgccaaccataccttccttccctgggctgtgctacctgggtccttttcagaagtgagctttgctgctacaggggaaggtggcctctgtggagccccagcatatgggggcctggattcatttcctgcccttcctcagtttaatccttctagtttcccacaatataaaactgtacttcactgtcaggaagaaatcacagaatcatatgattctgcttttaccatgcccctgagcaatgtctgtgctagggaaacttcccgtcccatatcctgcctcagcccgccaaggtagccatcccatgaacacactgtgtcctggtgctctctgccactggaagggcagagtagccagggtgtggccctgccatcttcccagcagggccactcccggcactccatgcttagtcactgcctgcagaggtctgtgctgaggccttatcattcattcttagctcttaattgttcattttgagctgaaatgctgcattttaattttaaccaaaacatgtctcctatatcctggtttttgtagccttcctccacatcctttctaaacaagattttaaagacatgtaggtgtttgttcatctgtaactctaaaagatcctttttaaattcagtcctaagaaagaggagtgcttgtcccctaagagtgtttaatggcaaggcagccctgtctgaaggacacttcctgcctaagggagagtggtatttgcagactagaattctagtgctgctgaagatgaatcaatgggaaatactactcctgtaattcctacctccctgcaaccaactacaaccaagctctctgcatctactcccaagtatggggttcaagagagtaatgggtttcatatttcttatcaccacagtaagttcctactaggcaaaatgagagggcagtgtttcctttttggtacttattactgctaagtatttcccagcacatgaaaccttattttttcccaaagccagaaccagatgagtaaaggagtaagaaccttgcctgaacatccttccttcccacccatcgctgtgtgttagttcccaacatcgaatgtgtacaacttaagttggtcctttacactcaggctttcactatttcctttaaaatgaggatgattattttcaaggccctcagcatatttgtatagttgcttgcctgatataaatgcaatattaatgcctttaaagtatgaatctatgccaaagatcacttgttgttttactaaagaaagattacttagaggaaataagaaaaatcatgtttgctctcccggttcttccagtggtttgagacactggtttacactttatgccggatgtgcttttctccaatatcagtgctcgagacacagtgaagcaaattaaaaaaaaaaaaaaaaaaaaatccctgaatgatgattagagacatcaccgctaaaaaactacatttataagctaggatttgttatatgcaaatattttctgcctcttcttttgttctgtttaaaacaataaaatgcatttgtataaaaatgctttaaatgat

SEQ ID NO: 293159 - DNA, 5249 bp, Homo sapiens
tagtcgctgcacagtctgtctcttcgccggttcccggccccgtggatcctacttctctgtcgcccgcggttcgccgccccgctcgccgccgcgatgccagtgtttcatacgcgcacgatcgagagcatcctggagccggtggcacagcagatctcccacctggtgataatgcacgaggagggcgaggtggacggcaaagccattcctgacctcaccgcgcccgtggccgccgtgcaggcggccgtcagcaacctcgtccgggttggaaaagagactgttcaaaccactgaggatcagattttgaagagagatatgccaccagcatttattaaggttgagaatgcttgcaccaagcttgtccaggcagctcagatgcttcagtcagacccttactcagtgcctgctcgagattatctaattgatgggtcaaggggcatcctctctggaacatcagacctgctccttaccttcgatgaggctgaggtccgtaaaattattagagtttgcaaaggaattttggaatatcttacagtggcagaggtggtggagactatggaagatttggtcacttacacaaagaatcttgggccaggaatgactaagatggccaagatgattgacgagagacagcaggagctcactcaccaggagcaccgagtgatgttggtgaactcgatgaacaccgtgaaagagttgctgccagttctcatttcagctatgaagatttttgtaacaactaaaaactcaaaaaaccaaggcatagaggaagctttaaaaaatcgcaattttactgtagaaaaaatgagtgctgaaattaatgagataattcgtgtgttacaactcacctcttgggatgaagatgcctgggccagcaaggacactgaagccatgaagagagcattggcctccatagactccaaactgaaccaggccaaaggttggctccgtgaccctagtgcctccccaggggatgctggtgagcaggccatcagacagatcttagatgaagctggaaaagttggtgaactctgtgcaggcaaagaacgcagggagattctgggaacttgcaaaatgctagggcagatgactgatcaagtggctgacctccgtgccagaggacaaggatcctcaccggtggccatgcagaaagctcagcaggtatctcagggtctggatgtgctcacagcaaaagtggaaaatgcagctcgcaagctggaagccatgaccaactcaaagcagagcattgcaaagaagatcgatgctgctcagaactggcttgcagatccaaatggtggaccggaaggagaagagcagattcgaggtgctttggctgaagctcggaaaatagcagaattatgtgatgatcctaaagaaagagatgacattctacgttcccttggggaaatatctgctctgacttctaaattagcagatctacgaagacaggggaaaggagattctccagaggctcgagccttggccaaacaggtggccacggccctgcagaacctgcagaccaaaaccaaccgggctgtggccaacagcagaccggccaaagcagctgtacaccttgagggcaagattgagcaagcacagcggtggattgataatcccacagtggatgaccgtggagtcggtcaggctgccatccgggggcttgtggccgaagggcatcgtctggctaatgttatgatggggccttatcggcaagatcttctcgccaagtgtgaccgagtggaccagctgacagcccagctggctgacctggctgccagaggggaaggggagagtcctcaggcacgagcacttgcatctcagctccaagactccttaaaggatctaaaagctcggatgcaggaggccatgactcaggaagtgtcagatgttttcagcgataccacaactcccatcaagctgttggcagtggcagccacggcgcctcctgatgcgcctaacagggaagaggtatttgatgagagggcagctaactttgaaaaccattcaggaaagcttggtgctacggccgagaaggcggctgcggttggtactgctaataaatcaacagtggaaggcattcaggcctcagtgaagacggcccgagaactcacaccccaggtggtctcggctgctcgtatcttacttaggaaccctggaaatcaagctgcttatgaacattttgagaccatgaagaaccagtggatcgataatgttgaaaaaatgacagggctggtggacgaagccattgataccaaatctctgttggatgcttcagaagaagcaattaaaaaagacctggacaagtgcaaggtagctatggccaacattcagcctcagatgctggttgctggggcaaccagtattgctcgtcgggccaaccggatcctgctggtggctaagagggaggtggagaattccgaggatcccaagttccgtgaggctgtgaaagctgcctctgatgaattgagcaaaaccatctccccaatggtgatggatgcaaaagctgtggctggaaacatttccgaccctggactgcaaaagagcttcctggactcaggatatcggatcctgggagctgtggccaaggtcagagaagccttccaacctcaggagcctgacttcccgccgcctccaccagaccttgaacaactccgactaacagatgagcttgctcctcccaaaccacctctgcctgaaggtgaggtccctccacctaggcctccaccaccagaggaaaaggatgaagagttccctgagcagaaggccggggaggtgattaaccagccaatgatgatggctgccagacagctccatgatgaagctcgcaaatggtccagcaagggcaatgacatcattgcagcagccaagcgcatggctctgctgatggctgagatgtctcggctggtaagagggggcagtggtaccaagcgggcactcattcagtgtgccaaggacatcgccaaggcctcagatgaggtgactcggttggccaaggaggttgccaagcagtgcacagataaacggattagaaccaacctcttacaggtatgtgagcgaatcccaaccataagcacccagctcaaaatcctgtccacagtgaaggccaccatgctgggccggaccaacatcagtgatgaggagtctgagcaggccacagagatgctggttcacaatgcccagaacctcatgcagtctgtgaaggagactgtgcgggaagctgaagctgcttcaatcaaaattcgaacagatgctggatttacactgcgctgggttagaaagactccctggtaccagtaggcacctggctgagcctggctggcacagaaacctctactaaaaagaaggcacatcctggcctggcacatcagaaaggaatgggggcctcttcaaattagaagacatttatactcttttttcatggacactttgaaatgtgtttctgtataaagcctgtattctcaaacacagttacacttgtgcaccctctatcccaataggcagactgggtttctagcccatggacttcacataagctcagaatccaagtgaacactagccagacactctgctctgcccttgttccctaggggacacttccctctgtttctctttccttggctcccattcactcttccagaatcccaagacccagggcccaggcaaatcagttactaagaagaaaattgctgtgcctcccaaaattgttttgagctttccatgttgctgccaaccataccttccttccctgggctgtgctacctgggtccttttcagaagtgagctttgctgctacaggggaaggtggcctctgtggagccccagcatatgggggcctggattcatttcctgcccttcctcagtttaatccttctagtttcccacaatataaaactgtacttcactgtcaggaagaaatcacagaatcatatgattctgcttttaccatgcccctgagcaatgtctgtgctagggaaacttcccgtcccatatcctgcctcagcccgccaaggtagccatcccatgaacacactgtgtcctggtgctctctgccactggaagggcagagtagccagggtgtggccctgccatcttcccagcagggccactcccggcactccatgcttagtcactgcctgcagaggtctgtgctgaggccttatcattcattcttagctcttaattgttcattttgagctgaaatgctgcattttaattttaaccaaaacatgtctcctatatcctggtttttgtagccttcctccacatcctttctaaacaagattttaaagacatgtaggtgtttgttcatctgtaactctaaaagatcctttttaaattcagtcctaagaaagaggagtgcttgtcccctaagagtgtttaatggcaaggcagccctgtctgaaggacacttcctgcctaagggagagtggtatttgcagactagaattctagtgctgctgaagatgaatcaatgggaaatactactcctgtaattcctacctccctgcaaccaactacaaccaagctctctgcatctactcccaagtatggggttcaagagagtaatgggtttcatatttcttatcaccacagtaagttcctactaggcaaaatgagagggcagtgtttcctttttggtacttattactgctaagtatttcccagcacatgaaaccttattttttcccaaagccagaaccagatgagtaaaggagtaagaaccttgcctgaacatccttccttcccacccatcgctgtgtgttagttcccaacatcgaatgtgtacaacttaagttggtcctttacactcaggctttcactatttcctttaaaatgaggatgattattttcaaggccctcagcatatttgtatagttgcttgcctgatataaatgcaatattaatgcctttaaagtatgaatctatgccaaagatcacttgttgttttactaaagaaagattacttagaggaaataagaaaaatcatgtttgctctcccggttcttccagtggtttgagacactggtttacactttatgccggatgtgcttttctccaatatcagtgctcgagacacagtgaagcaaattaaaaaaaaaaaaaaaaaaaaatccctgaatgatgattagagacatcaccgctaaaaaactacatttataagctaggatttgttatatgcaaatattttctgcctcttcttttgttctgtttaaaacaataaaatgcatttgtataaaaatgctttaaatgat

SEQ ID NO: 293160 - DNA, 2847 bp, Homo sapiens
tccccagtttattgatatgattaacctggagatgccaaagtgcttgttcagtgctgtgcctggggtgcacatcttgccctttcagactaatatctgggtcttccttttttttagtcaggaaatgtctctctccctctcctttccccctcctctctcctctctctttgtttctcacactgagtgcttgggcgagtgccctgtctcattctttttttttcttccagtgctatccgtatcactcaagaacggcccttttctcctcttctcacccttccggagggatgctaaggtggcaagctccctcctcttctctgtgcttctccttccttccttaacatggccagagcgtgggcagagctcacactgtatctttgcttccctctagggcaatgacatcattgcagcagccaagcgcatggctctgctgatggctgagatgtctcggctggtaagagggggcagtggtaccaagcgggcactcattcagtgtgccaaggacatcgccaaggcctcagatgaggtgactcggttggccaaggaggttgccaagcagtgcacagataaacggattagaaccaacctcttacaggtatgtgagcgaatcccaaccataagcacccagctcaaaatcctgtccacagtgaaggccaccatgctgggccggaccaacatcagtgatgaggagtctgagcaggccacagagatgctggttcacaatgcccagaacctcatgcagtctgtgaaggagactgtgcgggaagctgaagctgcttcaatcaaaattcgaacagatgctggatttacactgcgctgggttagaaagactccctggtaccagtaggcacctggctgagcctggctggcacagaaacctctactaaaaagaaggaaaatgatctgagtcccaggagctgcccagagttgctgggagctgaaaaatcacatcctggcctggcacatcagaaaggaatgggggcctcttcaaattagaagacatttatactcttttttcatggacactttgaaatgtgtttctgtataaagcctgtattctcaaacacagttacacttgtgcaccctctatcccaataggcagactgggtttctagcccatggacttcacataagctcagaatccaagtgaacactagccagacactctgctctgcccttgttccctaggggacacttccctctgtttctctttccttggctcccattcactcttccagaatcccaagacccagggcccaggcaaatcagttactaagaagaaaattgctgtgcctcccaaaattgttttgagctttccatgttgctgccaaccataccttccttccctgggctgtgctacctgggtccttttcagaagtgagctttgctgctacaggggaaggtggcctctgtggagccccagcatatgggggcctggattcatttcctgcccttcctcagtttaatccttctagtttcccacaatataaaactgtacttcactgtcaggaagaaatcacagaatcatatgattctgcttttaccatgcccctgagcaatgtctgtgctagggaaacttcccgtcccatatcctgcctcagcccgccaaggtagccatcccatgaacacactgtgtcctggtgctctctgccactggaagggcagagtagccagggtgtggccctgccatcttcccagcagggccactcccggcactccatgcttagtcactgcctgcagaggtctgtgctgaggccttatcattcattcttagctcttaattgttcattttgagctgaaatgctgcattttaattttaaccaaaacatgtctcctatatcctggtttttgtagccttcctccacatcctttctaaacaagattttaaagacatgtaggtgtttgttcatctgtaactctaaaagatcctttttaaattcagtcctaagaaagaggagtgcttgtcccctaagagtgtttaatggcaaggcagccctgtctgaaggacacttcctgcctaagggagagtggtatttgcagactagaattctagtgctgctgaagatgaatcaatgggaaatactactcctgtaattcctacctccctgcaaccaactacaaccaagctctctgcatctactcccaagtatggggttcaagagagtaatgggtttcatatttcttatcaccacagtaagttcctactaggcaaaatgagagggcagtgtttcctttttggtacttattactgctaagtatttcccagcacatgaaaccttattttttcccaaagccagaaccagatgagtaaaggagtaagaaccttgcctgaacatccttccttcccacccatcgctgtgtgttagttcccaacatcgaatgtgtacaacttaagttggtcctttacactcaggctttcactatttcctttaaaatgaggatgattattttcaaggccctcagcatatttgtatagttgcttgcctgatataaatgcaatattaatgcctttaaagtatgaatctatgccaaagatcacttgttgttttactaaagaaagattacttagaggaaataagaaaaatcatgtttgctctcccggttcttccagtggtttgagacactggtttacactttatgccggatgtgcttttctccaatatcagtgctcgagacacagtgaagcaaattaaaaaaaaaaaaaaaaaaaaatccctgaatgatgattagagacatcaccgctaaaaaactacatttataagctaggatttgttatatgcaaatattttctgcctcttcttttgttctgtttaaaacaataaaatgcatttgtataaaaatgctttaaatgat

SEQ ID NO: 293161 - DNA, 2300 bp, Homo sapiens
tctgaggttcccgtggctagcggatcagggcaccgtcttaaggtatgtgagcgaatcccaaccataagcacccagctcaaaatcctgtccacagtgaaggccaccatgctgggccggaccaacatcagtgatgaggagtctgagcaggccacagagatgctggttcacaatgcccagaacctcatgcagtctgtgaaggagactgtgcgggaagctgaagctgcttcaatcaaaattcgaacagatgctggatttacactgcgctgggttagaaagactccctggtaccagtaggcacctggctgagcctggctggcacagaaacctctactaaaaagaaggaaaatgatctgagtcccaggagctgcccagagttgctgggagctgaaaaatcacatcctggcctggcacatcagaaaggaatgggggcctcttcaaattagaagacatttatactcttttttcatggacactttgaaatgtgtttctgtataaagcctgtattctcaaacacagttacacttgtgcaccctctatcccaataggcagactgggtttctagcccatggacttcacataagctcagaatccaagtgaacactagccagacactctgctctgcccttgttccctaggggacacttccctctgtttctctttccttggctcccattcactcttccagaatcccaagacccagggcccaggcaaatcagttactaagaagaaaattgctgtgcctcccaaaattgttttgagctttccatgttgctgccaaccataccttccttccctgggctgtgctacctgggtccttttcagaagtgagctttgctgctacaggggaaggtggcctctgtggagccccagcatatgggggcctggattcatttcctgcccttcctcagtttaatccttctagtttcccacaatataaaactgtacttcactgtcaggaagaaatcacagaatcatatgattctgcttttaccatgcccctgagcaatgtctgtgctagggaaacttcccgtcccatatcctgcctcagcccgccaaggtagccatcccatgaacacactgtgtcctggtgctctctgccactggaagggcagagtagccagggtgtggccctgccatcttcccagcagggccactcccggcactccatgcttagtcactgcctgcagaggtctgtgctgaggccttatcattcattcttagctcttaattgttcattttgagctgaaatgctgcattttaattttaaccaaaacatgtctcctatatcctggtttttgtagccttcctccacatcctttctaaacaagattttaaagacatgtaggtgtttgttcatctgtaactctaaaagatcctttttaaattcagtcctaagaaagaggagtgcttgtcccctaagagtgtttaatggcaaggcagccctgtctgaaggacacttcctgcctaagggagagtggtatttgcagactagaattctagtgctgctgaagatgaatcaatgggaaatactactcctgtaattcctacctccctgcaaccaactacaaccaagctctctgcatctactcccaagtatggggttcaagagagtaatgggtttcatatttcttatcaccacagtaagttcctactaggcaaaatgagagggcagtgtttcctttttggtacttattactgctaagtatttcccagcacatgaaaccttattttttcccaaagccagaaccagatgagtaaaggagtaagaaccttgcctgaacatccttccttcccacccatcgctgtgtgttagttcccaacatcgaatgtgtacaacttaagttggtcctttacactcaggctttcactatttcctttaaaatgaggatgattattttcaaggccctcagcatatttgtatagttgcttgcctgatataaatgcaatattaatgcctttaaagtatgaatctatgccaaagatcacttgttgttttactaaagaaagattacttagaggaaataagaaaaatcatgtttgctctcccggttcttccagtggtttgagacactggtttacactttatgccggatgtgcttttctccaatatcagtgctcgagacacagtgaagcaaattaaaaaaaaaaaaaaaaaaaaatccctgaatgatgattagagacatcaccgctaaaaaactacatttataagctaggatttgttatatgcaaatattttctgcctcttcttttgttctgtttaaaacaataaaatgcatttgtataaaaatgctttaaatgat

SEQ ID NO: 293162 - DNA, 2189 bp, Homo sapiens
gggtctgtcgccacctttgggggagaaacaacctcagccacagagatgctggttcacaatgcccagaacctcatgcagtctgtgaaggagactgtgcgggaagctgaagctgcttcaatcaaaattcgaacagatgctggatttacactgcgctgggttagaaagactccctggtaccagtaggcacctggctgagcctggctggcacagaaacctctactaaaaagaaggaaaatgatctgagtcccaggagctgcccagagttgctgggagctgaaaaatcacatcctggcctggcacatcagaaaggaatgggggcctcttcaaattagaagacatttatactcttttttcatggacactttgaaatgtgtttctgtataaagcctgtattctcaaacacagttacacttgtgcaccctctatcccaataggcagactgggtttctagcccatggacttcacataagctcagaatccaagtgaacactagccagacactctgctctgcccttgttccctaggggacacttccctctgtttctctttccttggctcccattcactcttccagaatcccaagacccagggcccaggcaaatcagttactaagaagaaaattgctgtgcctcccaaaattgttttgagctttccatgttgctgccaaccataccttccttccctgggctgtgctacctgggtccttttcagaagtgagctttgctgctacaggggaaggtggcctctgtggagccccagcatatgggggcctggattcatttcctgcccttcctcagtttaatccttctagtttcccacaatataaaactgtacttcactgtcaggaagaaatcacagaatcatatgattctgcttttaccatgcccctgagcaatgtctgtgctagggaaacttcccgtcccatatcctgcctcagcccgccaaggtagccatcccatgaacacactgtgtcctggtgctctctgccactggaagggcagagtagccagggtgtggccctgccatcttcccagcagggccactcccggcactccatgcttagtcactgcctgcagaggtctgtgctgaggccttatcattcattcttagctcttaattgttcattttgagctgaaatgctgcattttaattttaaccaaaacatgtctcctatatcctggtttttgtagccttcctccacatcctttctaaacaagattttaaagacatgtaggtgtttgttcatctgtaactctaaaagatcctttttaaattcagtcctaagaaagaggagtgcttgtcccctaagagtgtttaatggcaaggcagccctgtctgaaggacacttcctgcctaagggagagtggtatttgcagactagaattctagtgctgctgaagatgaatcaatgggaaatactactcctgtaattcctacctccctgcaaccaactacaaccaagctctctgcatctactcccaagtatggggttcaagagagtaatgggtttcatatttcttatcaccacagtaagttcctactaggcaaaatgagagggcagtgtttcctttttggtacttattactgctaagtatttcccagcacatgaaaccttattttttcccaaagccagaaccagatgagtaaaggagtaagaaccttgcctgaacatccttccttcccacccatcgctgtgtgttagttcccaacatcgaatgtgtacaacttaagttggtcctttacactcaggctttcactatttcctttaaaatgaggatgattattttcaaggccctcagcatatttgtatagttgcttgcctgatataaatgcaatattaatgcctttaaagtatgaatctatgccaaagatcacttgttgttttactaaagaaagattacttagaggaaataagaaaaatcatgtttgctctcccggttcttccagtggtttgagacactggtttacactttatgccggatgtgcttttctccaatatcagtgctcgagacacagtgaagcaaattaaaaaaaaaaaaaaaaaaaaatccctgaatgatgattagagacatcaccgctaaaaaactacatttataagctaggatttgttatatgcaaatattttctgcctcttcttttgttctgtttaaaacaataaaatgcatttgtataaaaatgctttaaatgat

SEQ ID NO: 293163 - DNA, 2123 bp, Homo sapiens
cggatgtgatttttcagctcccagccactctgggaagctgaagctgcttcaatcaaaattcgaacagatgctggatttacactgcgctgggttagaaagactccctggtaccagtaggcacctggctgagcctggctggcacagaaacctctactaaaaagaaggaaaatgatctgagtcccaggagctgcccagagttgctgggagctgaaaaatcacatcctggcctggcacatcagaaaggaatgggggcctcttcaaattagaagacatttatactcttttttcatggacactttgaaatgtgtttctgtataaagcctgtattctcaaacacagttacacttgtgcaccctctatcccaataggcagactgggtttctagcccatggacttcacataagctcagaatccaagtgaacactagccagacactctgctctgcccttgttccctaggggacacttccctctgtttctctttccttggctcccattcactcttccagaatcccaagacccagggcccaggcaaatcagttactaagaagaaaattgctgtgcctcccaaaattgttttgagctttccatgttgctgccaaccataccttccttccctgggctgtgctacctgggtccttttcagaagtgagctttgctgctacaggggaaggtggcctctgtggagccccagcatatgggggcctggattcatttcctgcccttcctcagtttaatccttctagtttcccacaatataaaactgtacttcactgtcaggaagaaatcacagaatcatatgattctgcttttaccatgcccctgagcaatgtctgtgctagggaaacttcccgtcccatatcctgcctcagcccgccaaggtagccatcccatgaacacactgtgtcctggtgctctctgccactggaagggcagagtagccagggtgtggccctgccatcttcccagcagggccactcccggcactccatgcttagtcactgcctgcagaggtctgtgctgaggccttatcattcattcttagctcttaattgttcattttgagctgaaatgctgcattttaattttaaccaaaacatgtctcctatatcctggtttttgtagccttcctccacatcctttctaaacaagattttaaagacatgtaggtgtttgttcatctgtaactctaaaagatcctttttaaattcagtcctaagaaagaggagtgcttgtcccctaagagtgtttaatggcaaggcagccctgtctgaaggacacttcctgcctaagggagagtggtatttgcagactagaattctagtgctgctgaagatgaatcaatgggaaatactactcctgtaattcctacctccctgcaaccaactacaaccaagctctctgcatctactcccaagtatggggttcaagagagtaatgggtttcatatttcttatcaccacagtaagttcctactaggcaaaatgagagggcagtgtttcctttttggtacttattactgctaagtatttcccagcacatgaaaccttattttttcccaaagccagaaccagatgagtaaaggagtaagaaccttgcctgaacatccttccttcccacccatcgctgtgtgttagttcccaacatcgaatgtgtacaacttaagttggtcctttacactcaggctttcactatttcctttaaaatgaggatgattattttcaaggccctcagcatatttgtatagttgcttgcctgatataaatgcaatattaatgcctttaaagtatgaatctatgccaaagatcacttgttgttttactaaagaaagattacttagaggaaataagaaaaatcatgtttgctctcccggttcttccagtggtttgagacactggtttacactttatgccggatgtgcttttctccaatatcagtgctcgagacacagtgaagcaaattaaaaaaaaaaaaaaaaaaaaatccctgaatgatgattagagacatcaccgctaaaaaactacatttataagctaggatttgttatatgcaaatattttctgcctcttcttttgttctgtttaaaacaataaaatgcatttgtataaaaatgctttaaatgat

SEQ ID NO: 293164 - DNA, 4322 bp, Homo sapiens
tagtcgctgcacagtctgtctcttcgccggttcccggccccgtggatcctacttctctgtcgcccgcggttcgccgccccgctcgccgccgcgatgccagtgtttcatacgcgcacgatcgagagcatcctggagccggtggcacagcagatctcccacctggtgataatgcacgaggagggcgaggtggacggcaaagccattcctgacctcaccgcgcccgtggccgccgtgcaggcggccgtcagcaacctcgtccgggttggaaaagagactgttcaaaccactgaggatcagattttgaagagagatatgccaccagcatttattaaggttgagaatgcttgcaccaagcttgtccaggcagctcagatgcttcagtcagacccttactcagtgcctgctcgagattatctaattgatgggtcaaggggcatcctctctggaacatcagacctgctccttaccttcgatgaggctgaggtccgtaaaattattagagtttgcaaaggaattttggaatatcttacagtggcagaggtggtggagactatggaagatttggtcacttacacaaagaatcttgggccaggaatgactaagatggccaagatgattgacgagagacagcaggagctcactcaccaggagcaccgagtgatgttggtgaactcgatgaacaccgtgaaagagttgctgccagttctcatttcagctatgaagatttttgtaacaactaaaaactcaaaaaaccaaggcatagaggaagctttaaaaaatcgcaattttactgtagaaaaaatgagtgctgaaattaatgagataattcgtgtgttacaactcacctcttgggatgaagatgcctgggccagcaaggacactgaagccatgaagagagcattggcctccatagactccaaactgaaccaggccaaaggttggctccgtgaccctagtgcctccccaggggatgctggtgagcaggccatcagacagatcttagatgaagctggaaaagttggtgaactctgtgcaggcaaagaacgcagggagattctgggaacttgcaaaatgctagggcagatgactgatcaagtggctgacctccgtgccagaggacaaggatcctcaccggtggccatgcagaaagctcagcaggtatctcagggtctggatgtgctcacagcaaaagtggaaaatgcagctcgcaagctggaagccatgaccaactcaaagcagagcattgcaaagaagatcgatgctgctcagaactggcttgcagatccaaatggtggaccggaaggagaagagcagattcgaggtgctttggctgaagctcggaaaatagcagaattatgtgatgatcctaaagaaagagatgacattctacgttcccttggggaaatatctgctctgacttctaaattagcagatctacgaagacaggggaaaggagattctccagaggctcgagccttggccaaacaggtggccacggccctgcagaacctgcagaccaaaaccaaccgggctgtggccaacagcagaccggccaaagcagctgtacaccttgagggcaagattgagcaagcacagcggtggattgataatcccacagtggatgaccgtggagtcggtcaggctgccatccgggggcttgtggccgaagggcatcgtctggctaatgttatgatggggccttatcggcaagatcttctcgccaagtgtgaccgagtggaccagctgacagcccagctggctgacctggctgccagaggggaaggggagagtcctcaggcacgagcacttgcatctcagctccaagactccttaaaggatctaaaagctcggatgcaggaggccatgactcaggaagtgtcagatgttttcagcgataccacaactcccatcaagctgttggcagtggcagccacggcgcctcctgatgcgcctaacagggaagaggtatttgatgagagggcagctaactttgaaaaccattcaggaaagcttggtgctacggccgagaaggcggctgcggttggtactgctaataaatcaacagtggaaggcattcaggcctcagtgaagacggcccgagaactcacaccccaggtggtctcggctgctcgtatcttacttaggaaccctggaaatcaagctgcttatgaacattttgagaccatgaagaaccagtggatcgataatgttgaaaaaatgacagggctggtggacgaagccattgataccaaatctctgttggatgcttcagaagaagcaattaaaaaagacctggacaagtgcaaggtagctatggccaacattcagcctcagatgctggttgctggggcaaccagtattgctcgtcgggccaaccggatcctgctggtggctaagagggaggtggagaattccgaggatcccaagttccgtgaggctgtgaaagctgcctctgatgaattgagcaaaaccatctccccaatggtgatggatgcaaaagctgtggctggaaacatttccgaccctggactgcaaaagagcttcctggactcaggatatcggatcctgggagctgtggccaaggtcagagaagccttccaacctcaggagcctgacttcccgccgcctccaccagaccttgaacaactccgactaacagatgagcttgctcctcccaaaccacctctgcctgaaggtgaggtccctccacctaggcctccaccaccagaggaaaaggatgaagagttccctgagcagaaggccggggaggtgattaaccagccaatgatgttgctgccaaccataccttccttccctgggctgtgctacctgggtccttttcagaagtgagctttgctgctacaggggaaggtggcctctgtggagccccagcatatgggggcctggattcatttcctgcccttcctcagtttaatccttctagtttcccacaatataaaactgtacttcactgtcaggaagaaatcacagaatcatatgattctgcttttaccatgcccctgagcaatgtctgtgctagggaaacttcccgtcccatatcctgcctcagcccgccaaggtagccatcccatgaacacactgtgtcctggtgctctctgccactggaagggcagagtagccagggtgtggccctgccatcttcccagcagggccactcccggcactccatgcttagtcactgcctgcagaggtctgtgctgaggccttatcattcattcttagctcttaattgttcattttgagctgaaatgctgcattttaattttaaccaaaacatgtctcctatatcctggtttttgtagccttcctccacatcctttctaaacaagattttaaagacatgtaggtgtttgttcatctgtaactctaaaagatcctttttaaattcagtcctaagaaagaggagtgcttgtcccctaagagtgtttaatggcaaggcagccctgtctgaaggacacttcctgcctaagggagagtggtatttgcagactagaattctagtgctgctgaagatgaatcaatgggaaatactactcctgtaattcctacctccctgcaaccaactacaaccaagctctctgcatctactcccaagtatggggttcaagagagtaatgggtttcatatttcttatcaccacagtaagttcctactaggcaaaatgagagggcagtgtttcctttttggtacttattactgctaagtatttcccagcacatgaaaccttattttttcccaaagccagaaccagatgagtaaaggagtaagaaccttgcctgaacatccttccttcccacccatcgctgtgtgttagttcccaacatcgaatgtgtacaacttaagttggtcctttacactcaggctttcactatttcctttaaaatgaggatgattattttcaaggccctcagcatatttgtatagttgcttgcctgatataaatgcaatattaatgcctttaaagtatgaatctatgccaaagatcacttgttgttttactaaagaaagattacttagaggaaataagaaaaatcatgtttgctctcccggttcttccagtggtttgagacactggtttacactttatgccggatgtgcttttctccaatatcagtgctcgagacacagtgaagcaaattaaaaaaaaaaaaaaaaaaaaatccctgaatgatgattagagacatcaccgctaaaaaactacatttataagctaggatttgttatatgcaaatattttctgcctcttcttttgttctgtttaaaacaataaaatgcatttgtataaaaatgctttaaatgat

SEQ ID NO: 293165 - DNA, 1826 bp, Homo sapiens
aagtcatttcgagggcaatcggtcattcctattaacctatctcactttctaatttctaccacattgccattccacttctcaatatttaaccttggagtggacccatcgcgtgaatccaagtgaacactagccagacactctgctctgcccttgttccctaggggacacttccctctgtttctctttccttggctcccattcactcttccagaatcccaagacccagggcccaggcaaatcagttactaagaagaaaattgctgtgcctcccaaaattgttttgagctttccatgttgctgccaaccataccttccttccctgggctgtgctacctgggtccttttcagaagtgagctttgctgctacaggggaaggtggcctctgtggagccccagcatatgggggcctggattcatttcctgcccttcctcagtttaatccttctagtttcccacaatataaaactgtacttcactgtcaggaagaaatcacagaatcatatgattctgcttttaccatgcccctgagcaatgtctgtgctagggaaacttcccgtcccatatcctgcctcagcccgccaaggtagccatcccatgaacacactgtgtcctggtgctctctgccactggaagggcagagtagccagggtgtggccctgccatcttcccagcagggccactcccggcactccatgcttagtcactgcctgcagaggtctgtgctgaggccttatcattcattcttagctcttaattgttcattttgagctgaaatgctgcattttaattttaaccaaaacatgtctcctatatcctggtttttgtagccttcctccacatcctttctaaacaagattttaaagacatgtaggtgtttgttcatctgtaactctaaaagatcctttttaaattcagtcctaagaaagaggagtgcttgtcccctaagagtgtttaatggcaaggcagccctgtctgaaggacacttcctgcctaagggagagtggtatttgcagactagaattctagtgctgctgaagatgaatcaatgggaaatactactcctgtaattcctacctccctgcaaccaactacaaccaagctctctgcatctactcccaagtatggggttcaagagagtaatgggtttcatatttcttatcaccacagtaagttcctactaggcaaaatgagagggcagtgtttcctttttggtacttattactgctaagtatttcccagcacatgaaaccttattttttcccaaagccagaaccagatgagtaaaggagtaagaaccttgcctgaacatccttccttcccacccatcgctgtgtgttagttcccaacatcgaatgtgtacaacttaagttggtcctttacactcaggctttcactatttcctttaaaatgaggatgattattttcaaggccctcagcatatttgtatagttgcttgcctgatataaatgcaatattaatgcctttaaagtatgaatctatgccaaagatcacttgttgttttactaaagaaagattacttagaggaaataagaaaaatcatgtttgctctcccggttcttccagtggtttgagacactggtttacactttatgccggatgtgcttttctccaatatcagtgctcgagacacagtgaagcaaattaaaaaaaaaaaaaaaaaaaaatccctgaatgatgattagagacatcaccgctaaaaaactacatttataagctaggatttgttatatgcaaatattttctgcctcttcttttgttctgtttaaaacaataaaatgcatttgtataaaaatgctttaaatgat

SEQ ID NO: 293166 - DNA, 1391 bp, Homo sapiens
ccacggggccgacccacgcgttcgataaaactgtacttcactgtcaggaagaaatcacagaatcatatgattctgcttttaccatgcccctgagcaatgtctgtgctagggaaacttcccgtcccatatcctgcctcagcccgccaaggtagccatcccatgaacacactgtgtcctggtgctctctgccactggaagggcagagtagccagggtgtggccctgccatcttcccagcagggccactcccggcactccatgcttagtcactgcctgcagaggtctgtgctgaggccttatcattcattcttagctcttaattgttcattttgagctgaaatgctgcattttaattttaaccaaaacatgtctcctatatcctggtttttgtagccttcctccacatcctttctaaacaagattttaaagacatgtaggtgtttgttcatctgtaactctaaaagatcctttttaaattcagtcctaagaaagaggagtgcttgtcccctaagagtgtttaatggcaaggcagccctgtctgaaggacacttcctgcctaagggagagtggtatttgcagactagaattctagtgctgctgaagatgaatcaatgggaaatactactcctgtaattcctacctccctgcaaccaactacaaccaagctctctgcatctactcccaagtatggggttcaagagagtaatgggtttcatatttcttatcaccacagtaagttcctactaggcaaaatgagagggcagtgtttcctttttggtacttattactgctaagtatttcccagcacatgaaaccttattttttcccaaagccagaaccagatgagtaaaggagtaagaaccttgcctgaacatccttccttcccacccatcgctgtgtgttagttcccaacatcgaatgtgtacaacttaagttggtcctttacactcaggctttcactatttcctttaaaatgaggatgattattttcaaggccctcagcatatttgtatagttgcttgcctgatataaatgcaatattaatgcctttaaagtatgaatctatgccaaagatcacttgttgttttactaaagaaagattacttagaggaaataagaaaaatcatgtttgctctcccggttcttccagtggtttgagacactggtttacactttatgccggatgtgcttttctccaatatcagtgctcgagacacagtgaagcaaattaaaaaaaaaaaaaaaaaaaaatccctgaatgatgattagagacatcaccgctaaaaaactacatttataagctaggatttgttatatgcaaatattttctgcctcttcttttgttctgtttaaaacaataaaatgcatttgtataaaaatgctttaaatgat

SEQ ID NO: 293167 - DNA, 5041 bp, Homo sapiens
tagtcgctgcacagtctgtctcttcgccggttcccggccccgtggatcctacttctctgtcgcccgcggttcgccgccccgctcgccgccgcgatgccagtgtttcatacgcgcacgatcgagagcatcctggagccggtggcacagcagatctcccacctggtgataatgcacgaggagggcgaggtggacggcaaagccattcctgacctcaccgcgcccgtggccgccgtgcaggcggccgtcagcaacctcgtccgggttggaaaagagactgttcaaaccactgaggatcagattttgaagagagatatgccaccagcatttattaaggttgagaatgcttgcaccaagcttgtccaggcagctcagatgcttcagtcagacccttactcagtgcctgctcgagattatctaattgatgggtcaaggggcatcctctctggaacatcagacctgctccttaccttcgatgaggctgaggtccgtaaaattattagagtttgcaaaggaattttggaatatcttacagtggcagaggtggtggagactatggaagatttggtcacttacacaaagaatcttgggccaggaatgactaagatggccaagatgattgacgagagacagcaggagctcactcaccaggagcaccgagtgatgttggtgaactcgatgaacaccgtgaaagagttgctgccagttctcatttcagctatgaagatttttgtaacaactaaaaactcaaaaaaccaaggcatagaggaagctttaaaaaatcgcaattttactgtagaaaaaatgagtgctgaaattaatgagataattcgtgtgttacaactcacctcttgggatgaagatgcctgggccagcaaggacactgaagccatgaagagagcattggcctccatagactccaaactgaaccaggccaaaggttggctccgtgaccctagtgcctccccaggggatgctggtgagcaggccatcagacagatcttagatgaagctggaaaagttggtgaactctgtgcaggcaaagaacgcagggagattctgggaacttgcaaaatgctagggcagatgactgatcaagtggctgacctccgtgccagaggacaaggatcctcaccggtggccatgcagaaagctcagcaggtatctcagggtctggatgtgctcacagcaaaagtggaaaatgcagctcgcaagctggaagccatgaccaactcaaagcagagcattgcaaagaagatcgatgctgctcagaactggcttgcagatccaaatggtggaccggaaggagaagagcagattcgaggtgctttggctgaagctcggaaaatagcagaattatgtgatgatcctaaagaaagagatgacattctacgttcccttggggaaatatctgctctgacttctaaattagcagatctacgaagacaggggaaaggagattctccagaggctcgagccttggccaaacaggtggccacggccctgcagaacctgcagaccaaaaccaaccgggctgtggccaacagcagaccggccaaagcagctgtacaccttgagggcaagattgagcaagcacagcggtggattgataatcccacagtggatgaccgtggagtcggtcaggctgccatccgggggcttgtggccgaagggcatcgtctggctaatgttatgatggggccttatcggcaagatcttctcgccaagtgtgaccgagtggaccagctgacagcccagctggctgacctggctgccagaggggaaggggagagtcctcaggcacgagcacttgcatctcagctccaagactccttaaaggatctaaaagctcggatgcaggaggccatgactcaggaagtgtcagatgttttcagcgataccacaactcccatcaagctgttggcagtggcagccacggcgcctcctgatgcgcctaacagggaagaggtatttgatgagagggcagctaactttgaaaaccattcaggaaagcttggtgctacggccgagaaggcggctgcggttggtactgctaataaatcaacagtggaaggcattcaggcctcagtgaagacggcccgagaactcacaccccaggtggtctcggctgctcgtatcttacttaggaaccctggaaatcaagctgcttatgaacattttgagaccatgaagaaccagtggatcgataatgttgaaaaaatgacagggctggtggacgaagccattgataccaaatctctgttggatgcttcagaagaagcaattaaaaaagacctggacaagtgcaaggtagctatggccaacattcagcctcagatgctggttgctggggcaaccagtattgctcgtcgggccaaccggatcctgctggtggctaagagggaggtggagaattccgaggatcccaagttccgtgaggctgtgaaagctgcctctgatgaattgagcaaaaccatctccccaatggtgatggatgcaaaagctgtggctggaaacatttccgaccctggactgcaaaagagcttcctggactcaggatatcggatcctgggagctgtggccaaggtcagagaagccttccaacctcaggagcctgacttcccgccgcctccaccagaccttgaacaactccgactaacagatgagcttgctcctcccaaaccacctctgcctgaaggtgaggtccctccacctaggcctccaccaccagaggaaaaggatgaagagttccctgagcagaaggccggggaggtgattaaccagccaatgatgatggctgccagacagctccatgatgaagctcgcaaatggtccagcaagggcaatgacatcattgcagcagccaagcgcatggctctgctgatggctgagatgtctcggctggtaagagggggcagtggtaccaagcgggcactcattcagtgtgccaaggacatcgccaaggcctcagatgaggtgactcggttggccaaggaggttgccaagcagtgcacagataaacggattagaaccaacctcttacaggtatgtgagcgaatcccaaccataagcacccagctcaaaatcctgtccacagtgaaggccaccatgctgggccggaccaacatcagtgatgaggagtctgagcaggccacagagatgctggttcacaatgcccagaacctcatgcagtctgtgaaggagactgtgcgggaagctgaagctgcttcaatcaaaattcgaacagatgctggatttacactgcgctgggttagaaagactccctggtaccagtaggcacctggctgagcctggctggcacagaaacctctactaaaaagaaggaaaatgatctgagtcccaggagctgcccagagttgctgggagctgaaaaatcacatcctggcctggcacatcagaaaggaatgggggcctcttcaaattagaagacatttatactcttttttcatggacactttgaaatgtgtttctgtataaagcctgtattctcaaacacagttacacttgtgcaccctctatcccaataggcagactgggtttctagcccatggacttcacataagctcagaatccaagtgaacactagccagacactctgctctgcccttgttccctaggggacacttccctctgtttctctttccttggctcccattcactcttccagaatcccaagacccagggcccaggcaaatcagttactaagaagaaaattgctgtgcctcccaaaattgttttgagctttccatgttgctgccaaccataccttccttccctgggctgtgctacctgggtccttttcagaagtgagctttgctgctacaggggaaggtggcctctgtggagccccagcatatgggggcctggattcatttcctgcccttcctcagtttaatccttctagtttcccacaatataaaactgtacttcactgtcaggaagaaatcacagaatcatatgattctgcttttaccatgcccctgagcaatgtctgtgctagggaaacttcccgtcccatatcctgcctcagcccgccaaggtagccatcccatgaacacactgtgtcctggtgctctctgccactggaagggcagagtagccagggtgtggccctgccatcttcccagcagggccactcccggcactccatgcttagtcactgcctgcagaggtctgtgctgaggccttatcattcattcttagctcttaattgttcattttgagctgaaatgctgcattttaattttaaccaaaacatgtctcctatatcctggtttttgtagccttcctccacatcctttctaaacaagattttaaagacatgtaggtgtttgttcatctgtaactctaaaagatcctttttaaattcagtcctaagaaagaggagtgcttgtcccctaagagtgtttaatggcaaggcagccctgtctgaaggacacttcctgcctaagggagagtggtatttgcagactagaattctagtgctgctgaagatgaatcaatgggaaatactactcctgtaattcctacctccctgcaaccaactacaaccaagctctctgcatctactcccaagtatggggttcaagagagtaatgggtttcatatttcttatcaccacagtaagttcctactaggcaaaatgagagggcagtgtttcctttttggtacttattactgctaagtatttcccagcacatgaaaccttattttttcccaaagccagaaccagatgagtaaaggagtaagaaaaatcatgtttgctctcccggttcttccagtggtttgagacactggtttacactttatgccggatgtgcttttctccaatatcagtgctcgagacacagtgaagcaaattaaaaaaaaaaaaaaaaaaaaatccctgaatgatgattagagacatcaccgctaaaaaactacatttataagctaggatttgttatatgcaaatattttctgcctcttcttttgttctgtttaaaacaataaaatgcatttgtataaaaatgctttaaatgat

SEQ ID NO: 293168 - DNA, 4345 bp, Homo sapiens
tagtcgctgcacagtctgtctcttcgccggttcccggccccgtggatcctacttctctgtcgcccgcggttcgccgccccgctcgccgccgcgatgccagtgtttcatacgcgcacgatcgagagcatcctggagccggtggcacagcagatctcccacctggtgataatgcacgaggagggcgaggtggacggcaaagccattcctgacctcaccgcgcccgtggccgccgtgcaggcggccgtcagcaacctcgtccgggttggaaaagagactgttcaaaccactgaggatcagattttgaagagagatatgccaccagcatttattaaggttgagaatgcttgcaccaagcttgtccaggcagctcagatgcttcagtcagacccttactcagtgcctgctcgagattatctaattgatgggtcaaggggcatcctctctggaacatcagacctgctccttaccttcgatgaggctgaggtccgtaaaattattagagtttgcaaaggaattttggaatatcttacagtggcagaggtggtggagactatggaagatttggtcacttacacaaagaatcttgggccaggaatgactaagatggccaagatgattgacgagagacagcaggagctcactcaccaggagcaccgagtgatgttggtgaactcgatgaacaccgtgaaagagttgctgccagttctcatttcagctatgaagatttttgtaacaactaaaaactcaaaaaaccaaggcatagaggaagctttaaaaaatcgcaattttactgtagaaaaaatgagtgctgaaattaatgagataattcgtgtgttacaactcacctcttgggatgaagatgcctgggccagcaaggacactgaagccatgaagagagcattggcctccatagactccaaactgaaccaggccaaaggttggctccgtgaccctagtgcctccccaggggatgctggtgagcaggccatcagacagatcttagatgaagctggaaaagttggtgaactctgtgcaggcaaagaacgcagggagattctgggaacttgcaaaatgctagggcagatgactgatcaagtggctgacctccgtgccagaggacaaggatcctcaccggtggccatgcagaaagctcagcaggtatctcagggtctggatgtgctcacagcaaaagtggaaaatgcagctcgcaagctggaagccatgaccaactcaaagcagagcattgcaaagaagatcgatgctgctcagaactggcttgcagatccaaatggtggaccggaaggagaagagcagattcgaggtgctttggctgaagctcggaaaatagcagaattatgtgatgatcctaaagaaagagatgacattctacgttcccttggggaaatatctgctctgacttctaaattagcagatctacgaagacaggggaaaggagattctccagaggctcgagccttggccaaacaggtggccacggccctgcagaacctgcagaccaaaaccaaccgggctgtggccaacagcagaccggccaaagcagctgtacaccttgagggcaagattgagcaagcacagcggtggattgataatcccacagtggatgaccgtggagtcggtcaggctgccatccgggggcttgtggccgaagggcatcgtctggctaatgttatgatggggccttatcggcaagatcttctcgccaagtgtgaccgagtggaccagctgacagcccagctggctgacctggctgccagaggggaaggggagagtcctcaggcacgagcacttgcatctcagctccaagactccttaaaggatctaaaagctcggatgcaggaggccatgactcaggaagtgtcagatgttttcagcgataccacaactcccatcaagctgttggcagtggcagccacggcgcctcctgatgcgcctaacagggaagaggtatttgatgagagggcagctaactttgaaaaccattcaggaaagcttggtgctacggccgagaaggcggctgcggttggtactgctaataaatcaacagtggaaggcattcaggcctcagtgaagacggcccgagaactcacaccccaggtggtctcggctgctcgtatcttacttaggaaccctggaaatcaagctgcttatgaacattttgagaccatgaagaaccagtggatcgataatgttgaaaaaatgacagggctggtggacgaagccattgataccaaatctctgttggatgcttcagaagaagcaattaaaaaagacctggacaagtgcaaggtagctatggccaacattcagcctcagatgctggttgctggggcaaccagtattgctcgtcgggccaaccggatcctgctggtggctaagagggaggtggagaattccgaggatcccaagttccgtgaggctgtgaaagctgcctctgatgaattgagcaaaaccatctccccaatggtgatggatgcaaaagctgtggctggaaacatttccgaccctggactgcaaaagagcttcctggactcaggatatcggatcctgggagctgtggccaaggtcagagaagccttccaacctcaggagcctgacttcccgccgcctccaccagaccttgaacaactccgactaacagatgagcttgctcctcccaaaccacctctgcctgaaggtgaggtccctccacctaggcctccaccaccagaggaaaaggatgaagagttccctgagcagaaggccggggaggtgattaaccagccaatgatgatggctgccagacagctccatgatgaagctcgcaaatggtccagcaagggcaatgacatcattgcagcagccaagcgcatggctctgctgatggctgagatgtctcggctggtaagagggggcagtggtaccaagcgggcactcattcagtgtgccaaggacatcgccaaggcctcagatgaggtgactcggttggccaaggaggttgccaagcagtgcacagataaacggattagaaccaacctcttacaggtatgtgagcgaatcccaaccataagcacccagctcaaaatcctgtccacagtgaaggccaccatgctgggccggaccaacatcagtgatgaggagtctgagcaggccacagagatgctggttcacaatgcccagaacctcatgcagtctgtgaaggagactgtgcgggaagctgaagctgcttcaatcaaaattcgaacagatgctggatttacactgcgctgggttagaaagactccctggtaccagtaggcacctggctgagcctggctggcacagaaacctctactaaaaagaaggaaaatgatctgagtcccaggagctgcccagagttgctgggagctgaaaaatcacatcctggcctggcacatcagaaaggaatgggggcctcttcaaattagaagacatttatactcttttttcatggacactttgaaatgtgtttctgtataaagcctgtattctcaaacacagttacacttgtgcaccctctatcccaataggcagactgggtttctagcccatggacttcacataagctcagaatccaagtgaacactagccagacactctgctctgcccttgttccctaggggacacttccctctgtttctctttccttggctcccattcactcttccagaatcccaagacccagggcccaggcaaatcagttactaagaagaaaattgctgtgcctcccaaaattgttttgagctttccatgttgctgccaaccataccttccttccctgggctgtgctacctgggtccttttcagaagtgagctttgctgctacaggggaaggtggcctctgtggagccccagcatatgggggcctggattcatttcctgcccttcctcagtttaatccttctagtttcccacaatataaaactgtacttcactgtcaggaagaaatcacagaatcatatgattctgcttttaccatgcccctgagcaatgtctgtgctagggaaacttcccgtcccatatcctgcctcagcccgccaaggtagccatcccatgaacacactgtgtcctggtgctctctgccactggaagggcagagtagccagggtgtggccctgccatcttcccagcagggccactcccggcactccatgcttagtcactgcctgcagaggtctgtgctgaggccttatcattcattcttagctcttaattgttcattttgagctgaaatgctgcattttaattttaaccaaaacatgtctcctatatcctggtttttgtagccttcctccagcagtagccacagggatcctgctagagtccgacc

SEQ ID NO: 293169 - DNA, 4571 bp, Homo sapiens
  misc_feature (4440)..(4440): n is a, c, g, or t
tagtcgctgcacagtctgtctcttcgccggttcccggccccgtggatcctacttctctgtcgcccgcggttcgccgccccgctcgccgccgcgatgccagtgtttcatacgcgcacgatcgagagcatcctggagccggtggcacagcagatctcccacctggtgataatgcacgaggagggcgaggtggacggcaaagccattcctgacctcaccgcgcccgtggccgccgtgcaggcggccgtcagcaacctcgtccgggttggaaaagagactgttcaaaccactgaggatcagattttgaagagagatatgccaccagcatttattaaggttgagaatgcttgcaccaagcttgtccaggcagctcagatgcttcagtcagacccttactcagtgcctgctcgagattatctaattgatgggtcaaggggcatcctctctggaacatcagacctgctccttaccttcgatgaggctgaggtccgtaaaattattagagtttgcaaaggaattttggaatatcttacagtggcagaggtggtggagactatggaagatttggtcacttacacaaagaatcttgggccaggaatgactaagatggccaagatgattgacgagagacagcaggagctcactcaccaggagcaccgagtgatgttggtgaactcgatgaacaccgtgaaagagttgctgccagttctcatttcagctatgaagatttttgtaacaactaaaaactcaaaaaaccaaggcatagaggaagctttaaaaaatcgcaattttactgtagaaaaaatgagtgctgaaattaatgagataattcgtgtgttacaactcacctcttgggatgaagatgcctgggccagcaaggacactgaagccatgaagagagcattggcctccatagactccaaactgaaccaggccaaaggttggctccgtgaccctagtgcctccccaggggatgctggtgagcaggccatcagacagatcttagatgaagctggaaaagttggtgaactctgtgcaggcaaagaacgcagggagattctgggaacttgcaaaatgctagggcagatgactgatcaagtggctgacctccgtgccagaggacaaggatcctcaccggtggccatgcagaaagctcagcaggtatctcagggtctggatgtgctcacagcaaaagtggaaaatgcagctcgcaagctggaagccatgaccaactcaaagcagagcattgcaaagaagatcgatgctgctcagaactggcttgcagatccaaatggtggaccggaaggagaagagcagattcgaggtgctttggctgaagctcggaaaatagcagaattatgtgatgatcctaaagaaagagatgacattctacgttcccttggggaaatatctgctctgacttctaaattagcagatctacgaagacaggggaaaggagattctccagaggctcgagccttggccaaacaggtggccacggccctgcagaacctgcagaccaaaaccaaccgggctgtggccaacagcagaccggccaaagcagctgtacaccttgagggcaagattgagcaagcacagcggtggattgataatcccacagtggatgaccgtggagtcggtcaggctgccatccgggggcttgtggccgaagggcatcgtctggctaatgttatgatggggccttatcggcaagatcttctcgccaagtgtgaccgagtggaccagctgacagcccagctggctgacctggctgccagaggggaaggggagagtcctcaggcacgagcacttgcatctcagctccaagactccttaaaggatctaaaagctcggatgcaggaggccatgactcaggaagtgtcagatgttttcagcgataccacaactcccatcaagctgttggcagtggcagccacggcgcctcctgatgcgcctaacagggaagaggtatttgatgagagggcagctaactttgaaaaccattcaggaaagcttggtgctacggccgagaaggcggctgcggttggtactgctaataaatcaacagtggaaggcattcaggcctcagtgaagacggcccgagaactcacaccccaggtggtctcggctgctcgtatcttacttaggaaccctggaaatcaagctgcttatgaacattttgagaccatgaagaaccagtggatcgataatgttgaaaaaatgacagggctggtggacgaagccattgataccaaatctctgttggatgcttcagaagaagcaattaaaaaagacctggacaagtgcaaggtagctatggccaacattcagcctcagatgctggttgctggggcaaccagtattgctcgtcgggccaaccggatcctgctggtggctaagagggaggtggagaattccgaggatcccaagttccgtgaggctgtgaaagctgcctctgatgaattgagcaaaaccatctccccaatggtgatggatgcaaaagctgtggctggaaacatttccgaccctggactgcaaaagagcttcctggactcaggatatcggatcctgggagctgtggccaaggtcagagaagccttccaacctcaggagcctgacttcccgccgcctccaccagaccttgaacaactccgactaacagatgagcttgctcctcccaaaccacctctgcctgaaggtgaggtccctccacctaggcctccaccaccagaggaaaaggatgaagagttccctgagcagaaggccggggaggtgattaaccagccaatgatgatggctgccagacagctccatgatgaagctcgcaaatggtccagcaagggcaatgacatcattgcagcagccaagcgcatggctctgctgatggctgagatgtctcggctggtaagagggggcagtggtaccaagcgggcactcattcagtgtgccaaggacatcgccaaggcctcagatgaggtgactcggttggccaaggaggttgccaagcagtgcacagataaacggattagaaccaacctcttacaggtatgtgagcgaatcccaaccataagcacccagctcaaaatcctgtccacagtgaaggccaccatgctgggccggaccaacatcagtgatgaggagtctgagcaggccacagagatgctggttcacaatgcccagaacctcatgcagtctgtgaaggagactgtgcgggaagctgaagctgcttcaatcaaaattcgaacagatgctggatttacactgcgctgggttagaaagactccctggtaccagtaggcacctggctgagcctggctggcacagaaacctctactaaaaagaaggaaaatgatctgagtcccaggagctgcccagagttgctgggagctgaaaaatcacatcctggcctggcacatcagaaaggaatgggggcctcttcaaattagaagacatttatactcttttttcatggacactttgaaatgtgtttctgtataaagcctgtattctcaaacacagttacacttgtgcaccctctatcccaataggcagactgggtttctagcccatggacttcacataagctcagaatccaagtgaacactagccagacactctgctctgcccttgttccctaggggacacttccctctgtttctctttccttggctcccattcactcttccagaatcccaagacccagggcccaggcaaatcagttactaagaagaaaattgctgtgcctcccaaaattgttttgagctttccatgttgctgccaaccataccttccttccctgggctgtgctacctgggtccttttcagaagtgagctttgctgctacaggggaaggtggcctctgtggagccccagcatatgggggcctggattcatttcctgcccttcctcagtttaatccttctagtttcccacaatataaaactgtacttcactgtcaggaagaaatcacagaatcatatgattctgcttttaccatgcccctgagcaatgtctgtgctagggaaacttcccgtcccatatcctgcctcagcccgccaaggtagccatcccatgaacacactgtgtcctggtgctctctgccactggaagggcagagtagccagggtgtggccctgccatcttcccagcagggccactcccggcactccatgcttagtcactgcctgcagaggtctgtgctgaggccttatcattcattcttagctcttaattgttcattttgagctgaaatgctgcattttaattttaaccaaaacatgtctcctatatcctggtatcttttcagatacacatcattgatatttttatctgtgaattctgtttacttcctttccccatattttttcctagtttattgtcttttgacttggttaatgatgttttttatttttctgtttttttctccaagcaaaagtattttanttttatgtagttgaatttagtaatcttttctgtggcttctggatttggattataggtttccccatttcaagattatggctggacatggcctgtgggtggctctcccctggcaggaggaagatcatggtctc

SEQ ID NO: 293170 - DNA, 3318 bp, Homo sapiens
tagtcgctgcacagtctgtctcttcgccggttcccggccccgtggatcctacttctctgtcgcccgcggttcgccgccccgctcgccgccgcgatgccagtgtttcatacgcgcacgatcgagagcatcctggagccggtggcacagcagatctcccacctggtgataatgcacgaggagggcgaggtggacggcaaagccattcctgacctcaccgcgcccgtggccgccgtgcaggcggccgtcagcaacctcgtccgggttggaaaagagactgttcaaaccactgaggatcagattttgaagagagatatgccaccagcatttattaaggttgagaatgcttgcaccaagcttgtccaggcagctcagatgcttcagtcagacccttactcagtgcctgctcgagattatctaattgatgggtcaaggggcatcctctctggaacatcagacctgctccttaccttcgatgaggctgaggtccgtaaaattattagagtttgcaaaggaattttggaatatcttacagtggcagaggtggtggagactatggaagatttggtcacttacacaaagaatcttgggccaggaatgactaagatggccaagatgattgacgagagacagcaggagctcactcaccaggagcaccgagtgatgttggtgaactcgatgaacaccgtgaaagagttgctgccagttctcatttcagctatgaagatttttgtaacaactaaaaactcaaaaaaccaaggcatagaggaagctttaaaaaatcgcaattttactgtagaaaaaatgagtgctgaaattaatgagataattcgtgtgttacaactcacctcttgggatgaagatgcctgggccagcaaggacactgaagccatgaagagagcattggcctccatagactccaaactgaaccaggccaaaggttggctccgtgaccctagtgcctccccaggggatgctggtgagcaggccatcagacagatcttagatgaagctggaaaagttggtgaactctgtgcaggcaaagaacgcagggagattctgggaacttgcaaaatgctagggcagatgactgatcaagtggctgacctccgtgccagaggacaaggatcctcaccggtggccatgcagaaagctcagcaggtatctcagggtctggatgtgctcacagcaaaagtggaaaatgcagctcgcaagctggaagccatgaccaactcaaagcagagcattgcaaagaagatcgatgctgctcagaactggcttgcagatccaaatggtggaccggaaggagaagagcagattcgaggtgctttggctgaagctcggaaaatagcagaattatgtgatgatcctaaagaaagagatgacattctacgttcccttggggaaatatctgctctgacttctaaattagcagatctacgaagacaggggaaaggagattctccagaggctcgagccttggccaaacaggtggccacggccctgcagaacctgcagaccaaaaccaaccgggctgtggccaacagcagaccggccaaagcagctgtacaccttgagggcaagattgagcaagcacagcggtggattgataatcccacagtggatgaccgtggagtcggtcaggctgccatccgggggcttgtggccgaagggcatcgtctggctaatgttatgatggggccttatcggcaagatcttctcgccaagtgtgaccgagtggaccagctgacagcccagctggctgacctggctgccagaggggaaggggagagtcctcaggcacgagcacttgcatctcagctccaagactccttaaaggatctaaaagctcggatgcaggaggccatgactcaggaagtgtcagatgttttcagcgataccacaactcccatcaagctgttggcagtggcagccacggcgcctcctgatgcgcctaacagggaagaggtatttgatgagagggcagctaactttgaaaaccattcaggaaagcttggtgctacggccgagaaggcggctgcggttggtactgctaataaatcaacagtggaaggcattcaggcctcagtgaagacggcccgagaactcacaccccaggtggtctcggctgctcgtatcttacttaggaaccctggaaatcaagctgcttatgaacattttgagaccatgaagaaccagtggatcgataatgttgaaaaaatgacagggctggtggacgaagccattgataccaaatctctgttggatgcttcagaagaagcaattaaaaaagacctggacaagtgcaaggtagctatggccaacattcagcctcagatgctggttgctggggcaaccagtattgctcgtcgggccaaccggatcctgctggtggctaagagggaggtggagaattccgaggatcccaagttccgtgaggctgtgaaagctgcctctgatgaattgagcaaaaccatctccccaatggtgatggatgcaaaagctgtggctggaaacatttccgaccctggactgcaaaagagcttcctggactcaggatatcggatcctgggagctgtggccaaggtcagagaagccttccaacctcaggagcctgacttcccgccgcctccaccagaccttgaacaactccgactaacagatgagcttgctcctcccaaaccacctctgcctgaaggtgaggtccctccacctaggcctccaccaccagaggaaaaggatgaagagttccctgagcagaaggccggggaggtgattaaccagccaatgatgatggctgccagacagctccatgatgaagctcgcaaatggtccagcaagggcaatgacatcattgcagcagccaagcgcatggctctgctgatggctgagatgtctcggctggtaagagggggcagtggtaccaagcgggcactcattcagtgtgccaaggacatcgccaaggcctcagatgaggtgactcggttggccaaggaggttgccaagcagtgcacagataaacggattagaaccaacctcttacaggtactcggggaaagaggctgcgtgtgtgtgtgtgtgtgtgtgtgtgcgtgcgtgtgtgtgtgtgttggaggggagggtatgagagggagaaaagcaggagagaaaaactaggtaagggagaaagaggcacttcaccggggacagaaatagcagaaagggaaaaaaacaaatgtactgggaaagacagattcaggaaaggttacttcctaatcaaatgaatgcttccatttctggagaaatggattgtactgaccctaggggaaaaaacaagtggaa

SEQ ID NO: 293171 - DNA, 3196 bp, Homo sapiens
tagtcgctgcacagtctgtctcttcgccggttcccggccccgtggatcctacttctctgtcgcccgcggttcgccgccccgctcgccgccgcgatgccagtgtttcatacgcgcacgatcgagagcatcctggagccggtggcacagcagatctcccacctggtgataatgcacgaggagggcgaggtggacggcaaagccattcctgacctcaccgcgcccgtggccgccgtgcaggcggccgtcagcaacctcgtccgggttggaaaagagactgttcaaaccactgaggatcagattttgaagagagatatgccaccagcatttattaaggttgagaatgcttgcaccaagcttgtccaggcagctcagatgcttcagtcagacccttactcagtgcctgctcgagattatctaattgatgggtcaaggggcatcctctctggaacatcagacctgctccttaccttcgatgaggctgaggtccgtaaaattattagagtttgcaaaggaattttggaatatcttacagtggcagaggtggtggagactatggaagatttggtcacttacacaaagaatcttgggccaggaatgactaagatggccaagatgattgacgagagacagcaggagctcactcaccaggagcaccgagtgatgttggtgaactcgatgaacaccgtgaaagagttgctgccagttctcatttcagctatgaagatttttgtaacaactaaaaactcaaaaaaccaaggcatagaggaagctttaaaaaatcgcaattttactgtagaaaaaatgagtgctgaaattaatgagataattcgtgtgttacaactcacctcttgggatgaagatgcctgggccagcaaggacactgaagccatgaagagagcattggcctccatagactccaaactgaaccaggccaaaggttggctccgtgaccctagtgcctccccaggggatgctggtgagcaggccatcagacagatcttagatgaagctggaaaagttggtgaactctgtgcaggcaaagaacgcagggagattctgggaacttgcaaaatgctagggcagatgactgatcaagtggctgacctccgtgccagaggacaaggatcctcaccggtggccatgcagaaagctcagcaggtatctcagggtctggatgtgctcacagcaaaagtggaaaatgcagctcgcaagctggaagccatgaccaactcaaagcagagcattgcaaagaagatcgatgctgctcagaactggcttgcagatccaaatggtggaccggaaggagaagagcagattcgaggtgctttggctgaagctcggaaaatagcagaattatgtgatgatcctaaagaaagagatgacattctacgttcccttggggaaatatctgctctgacttctaaattagcagatctacgaagacaggggaaaggagattctccagaggctcgagccttggccaaacaggtggccacggccctgcagaacctgcagaccaaaaccaaccgggctgtggccaacagcagaccggccaaagcagctgtacaccttgagggcaagattgagcaagcacagcggtggattgataatcccacagtggatgaccgtggagtcggtcaggctgccatccgggggcttgtggccgaagggcatcgtctggctaatgttatgatggggccttatcggcaagatcttctcgccaagtgtgaccgagtggaccagctgacagcccagctggctgacctggctgccagaggggaaggggagagtcctcaggcacgagcacttgcatctcagctccaagactccttaaaggatctaaaagctcggatgcaggaggccatgactcaggaagtgtcagatgttttcagcgataccacaactcccatcaagctgttggcagtggcagccacggcgcctcctgatgcgcctaacagggaagaggtatttgatgagagggcagctaactttgaaaaccattcaggaaagcttggtgctacggccgagaaggcggctgcggttggtactgctaataaatcaacagtggaaggcattcaggcctcagtgaagacggcccgagaactcacaccccaggtggtctcggctgctcgtatcttacttaggaaccctggaaatcaagctgcttatgaacattttgagaccatgaagaaccagtggatcgataatgttgaaaaaatgacagggctggtggacgaagccattgataccaaatctctgttggatgcttcagaagaagcaattaaaaaagacctggacaagtgcaaggtagctatggccaacattcagcctcagatgctggttgctggggcaaccagtattgctcgtcgggccaaccggatcctgctggtggctaagagggaggtggagaattccgaggatcccaagttccgtgaggctgtgaaagctgcctctgatgaattgagcaaaaccatctccccaatggtgatggatgcaaaagctgtggctggaaacatttccgaccctggactgcaaaagagcttcctggactcaggatatcggatcctgggagctgtggccaaggtcagagaagccttccaacctcaggagcctgacttcccgccgcctccaccagaccttgaacaactccgactaacagatgagcttgctcctcccaaaccacctctgcctgaaggtgaggtccctccacctaggcctccaccaccagaggaaaaggatgaagagttccctgagcagaaggccggggaggtgattaaccagccaatgatgatggctgccagacagctccatgatgaagctcgcaaatggtccagcaaggtaagtagtgaagcttttcttgttgagaaaggatgtcttctcggaaaggatgaaggaccatgaaagacccagaaagaagagtctatttggagtcaccctctctctctcctttggttcctgtgttgccaatagcatattcctcttcttacctgtgctttagtgagatgtttctgacacctgatggtttctccttcaagcttgcaaaagccagagtcagggtgcctgtgatttgagaagaggattcctgtcctttgtccattagagtgccaggtgccttgaccttagcatttggggtcttttagaaattgcttatctttcttggaactgcaaatgtttttagatgctacattgctaatga

SEQ ID NO: 293172 - DNA, 2295 bp, Homo sapiens
tagtcgctgcacagtctgtctcttcgccggttcccggccccgtggatcctacttctctgtcgcccgcggttcgccgccccgctcgccgccgcgatgccagtgtttcatacgcgcacgatcgagagcatcctggagccggtggcacagcagatctcccacctggtgataatgcacgaggagggcgaggtggacggcaaagccattcctgacctcaccgcgcccgtggccgccgtgcaggcggccgtcagcaacctcgtccgggttggaaaagagactgttcaaaccactgaggatcagattttgaagagagatatgccaccagcatttattaaggttgagaatgcttgcaccaagcttgtccaggcagctcagatgcttcagtcagacccttactcagtgcctgctcgagattatctaattgatgggtcaaggggcatcctctctggaacatcagacctgctccttaccttcgatgaggctgaggtccgtaaaattattagagtttgcaaaggaattttggaatatcttacagtggcagaggtggtggagactatggaagatttggtcacttacacaaagaatcttgggccaggaatgactaagatggccaagatgattgacgagagacagcaggagctcactcaccaggagcaccgagtgatgttggtgaactcgatgaacaccgtgaaagagttgctgccagttctcatttcagctatgaagatttttgtaacaactaaaaactcaaaaaaccaaggcatagaggaagctttaaaaaatcgcaattttactgtagaaaaaatgagtgctgaaattaatgagataattcgtgtgttacaactcacctcttgggatgaagatgcctgggccagcaaggacactgaagccatgaagagagcattggcctccatagactccaaactgaaccaggccaaaggttggctccgtgaccctagtgcctccccaggggatgctggtgagcaggccatcagacagatcttagatgaagctggaaaagttggtgaactctgtgcaggcaaagaacgcagggagattctgggaacttgcaaaatgctagggcagatgactgatcaagtggctgacctccgtgccagaggacaaggatcctcaccggtggccatgcagaaagctcagcaggtatctcagggtctggatgtgctcacagcaaaagtggaaaatgcagctcgcaagctggaagccatgaccaactcaaagcagagcattgcaaagaagatcgatgctgctcagaactggcttgcagatccaaatggtggaccggaaggagaagagcagattcgaggtgctttggctgaagctcggaaaatagcagaattatgtgatgatcctaaagaaagagatgacattctacgttcccttggggaaatatctgctctgacttctaaattagcagatctacgaagacaggggaaaggagattctccagaggctcgagccttggccaaacaggtggccacggccctgcagaacctgcagaccaaaaccaaccgggctgtggccaacagcagaccggccaaagcagctgtacaccttgagggcaagattgagcaagcacagcggtggattgataatcccacagtggatgaccgtggagtcggtcaggctgccatccgggggcttgtggccgaagggcatcgtctggctaatgttatgatggggccttatcggcaagatcttctcgccaagtgtgaccgagtggaccagctgacagcccagctggctgacctggctgccagaggggaaggggagagtcctcaggcacgagcacttgcatctcagctccaagactccttaaaggatctaaaagctcggatgcaggaggccatgactcaggaagtgtcagatgttttcagcgataccacaactcccatcaagctgttggcagtggcagccacggcgcctcctgatgcgcctaacagggaagaggtgggtatctgaggtcttccatttttctgtcagcctgtgctataggtatatgtaaaggtgaaatgtgattacagtggacatcaggatcagtggttgggaaactgtagatgaagggtggaagagcagaacagggaaagccctaccacctctacttttagtctccacgtatatcagtgaggaatatctttagttgcaagcaatagaagacctgaccatcagagatgaaaacaaccgggtttgttttcatcacaaaccaagaaacatggaagtaggtggctttggcattggttcagcagctaaatatcatgaaagctggcatttctatgattt

SEQ ID NO: 293173 - DNA, 1893 bp, Homo sapiens
tagtcgctgcacagtctgtctcttcgccggttcccggccccgtggatcctacttctctgtcgcccgcggttcgccgccccgctcgccgccgcgatgccagtgtttcatacgcgcacgatcgagagcatcctggagccggtggcacagcagatctcccacctggtgataatgcacgaggagggcgaggtggacggcaaagccattcctgacctcaccgcgcccgtggccgccgtgcaggcggccgtcagcaacctcgtccgggttggaaaagagactgttcaaaccactgaggatcagattttgaagagagatatgccaccagcatttattaaggttgagaatgcttgcaccaagcttgtccaggcagctcagatgcttcagtcagacccttactcagtgcctgctcgagattatctaattgatgggtcaaggggcatcctctctggaacatcagacctgctccttaccttcgatgaggctgaggtccgtaaaattattagagtttgcaaaggaattttggaatatcttacagtggcagaggtggtggagactatggaagatttggtcacttacacaaagaatcttgggccaggaatgactaagatggccaagatgattgacgagagacagcaggagctcactcaccaggagcaccgagtgatgttggtgaactcgatgaacaccgtgaaagagttgctgccagttctcatttcagctatgaagatttttgtaacaactaaaaactcaaaaaaccaaggcatagaggaagctttaaaaaatcgcaattttactgtagaaaaaatgagtgctgaaattaatgagataattcgtgtgttacaactcacctcttgggatgaagatgcctgggccagcaaggacactgaagccatgaagagagcattggcctccatagactccaaactgaaccaggccaaaggttggctccgtgaccctagtgcctccccaggggatgctggtgagcaggccatcagacagatcttagatgaagctggaaaagttggtgaactctgtgcaggcaaagaacgcagggagattctgggaacttgcaaaatgctagggcagatgactgatcaagtggctgacctccgtgccagaggacaaggatcctcaccggtggccatgcagaaagctcagcaggtatctcagggtctggatgtgctcacagcaaaagtggaaaatgcagctcgcaagctggaagccatgaccaactcaaagcagagcattgcaaagaagatcgatgctgctcagaactggcttgcagatccaaatggtggaccggaaggagaagagcagattcgaggtgctttggctgaagctcggaaaatagcagaattatgtgatgatcctaaagaaagagatgacattctacgttcccttggggaaatatctgctctgacttctaaattagcagatctacgaagacaggggaaaggagattctccagaggctcgagccttggccaaacaggtggccacggccctgcagaacctgcagaccaaaaccaaccgggctgtggccaacagcagaccggccaaagcagctgtacaccttgagggcaagattgagcaagcacagcggtggattgataatcccacagtggatgaccgtggagtcggtaagggcagcagtgcactataacctcattaaattggtctcagtgcaaataagcaagttgttgataggggtcctgtaacatctgtaattaggtaagggttctttagctgctgataagtaactgtgattccatttccaaatgcagccagtaaaattcctgtgatgtaatcaagaagcagaccaggcatggtggctcacagtgctcaaggaggctcacagtgctcaaggaggctcacagtgctaaggaggctacagtgc

SEQ ID NO: 293174 - DNA, 1349 bp, Homo sapiens
tagtcgctgcacagtctgtctcttcgccggttcccggccccgtggatcctacttctctgtcgcccgcggttcgccgccccgctcgccgccgcgatgccagtgtttcatacgcgcacgatcgagagcatcctggagccggtggcacagcagatctcccacctggtgataatgcacgaggagggcgaggtggacggcaaagccattcctgacctcaccgcgcccgtggccgccgtgcaggcggccgtcagcaacctcgtccgggttggaaaagagactgttcaaaccactgaggatcagattttgaagagagatatgccaccagcatttattaaggttgagaatgcttgcaccaagcttgtccaggcagctcagatgcttcagtcagacccttactcagtgcctgctcgagattatctaattgatgggtcaaggggcatcctctctggaacatcagacctgctccttaccttcgatgaggctgaggtccgtaaaattattagagtttgcaaaggaattttggaatatcttacagtggcagaggtggtggagactatggaagatttggtcacttacacaaagaatcttgggccaggaatgactaagatggccaagatgattgacgagagacagcaggagctcactcaccaggagcaccgagtgatgttggtgaactcgatgaacaccgtgaaagagttgctgccagttctcatttcagctatgaagatttttgtaacaactaaaaactcaaaaaaccaaggcatagaggaagctttaaaaaatcgcaattttactgtagaaaaaatgagtgctgaaattaatgagataattcgtgtgttacaactcacctcttgggatgaagatgcctgggccagcaaggacactgaagccatgaagagagcattggcctccatagactccaaactgaaccaggccaaaggttggctccgtgaccctagtgcctccccaggggatgctggtgagcaggccatcagacagatcttagatgaagctggaaaagttggtgaactctgtgcaggcaaagaacgcagggagattctgggaacttgcaaaatgctagggcagatgactgatcaagtggctgacctccgtgccaggtaaaagttcctctgtccttacagagcagtagtgggtaactcactcctaacagggtgattcagaaaacaagcctctgccagtttggagttatctcttgggctagtagataacagagatattatagtctattaaattcttttgagatggaggtgaactttcccttggctgactttatttatttatttattattttttggagacagagtctcactctgttacccagacaagaacca

SEQ ID NO: 293175 - DNA, 567 bp, Homo sapiens
tagtcgctgcacagtctgtctcttcgccggttcccggccccgtggatcctacttctctgtcgcccgcggttcgccgccccgctcgccgccgcgatgccagtgtttcatacgcgcacgatcgagagcatcctggagccggtggcacagcagatctcccacctggtgataatgcacgaggagggcgaggtggacggcaaagccattcctgacctcaccgcgcccgtggccgccgtgcaggcggccgtcagcaacctcgtccgggttggaaaagagactgttcaaaccactgaggatcagattttgaagagagatatgccaccagcatttattaaacttttactagaggaaatcctaaagaatgtacttcagacaagtccgctgatcccagatgtaagcctgaaatacaagagggaatgatgagccaagatactggacagtttgttggtaaatgtagataagtgttgatgtatataataatgggatgtttttactcaacgcttctgataccagatgtatggctttttttttccacaccaacaacctggtcgaccgtctcacctgacacca

SEQ ID NO: 293176 - DNA, 288 bp, Homo sapiens
gatgctggttgctggggcaaccagtattgctcgtcgggccaaccggatcctgctggtggctaagagggaggtggagaattccgaggatcccaagttccgtgaggctgtgaaagctgcctctgatgaattgagcaaaaccatctccccaatggtgatggatgcaaaagctgtggctggaaacatttccgaccctggtaagcaatgcatggcactatgtctcacctccactgagaggttaactcaggaaaggtcgtgagggaatatgtaccccacaaccaccacatacaa

SEQ ID NO: 293177 - DNA, 673 bp, Homo sapiens
acacacgtgtgcgcgcacacgcacaactaaaaacgtgattctgatttgttggaaattcttccaacaggaagaatcactgtaagttgttactactaaattaacttggttttatttattttcttttctagccaatactgatgcaagaaaatatttcaattctcaacctgattaatgtactgcagagtctgttccactggggaaaaaatgcagagaggcattgcttcaaagccttgatccagattaaagtgatagagaccttaaaaaaaaaaaaaactgaaaacatgtattggtgatcactgtttcccttaaaatatacttcaagaaatgcaaaggaaaccatagaatttaaaaggaaaataaaaagtgctctcaggggatctgagaaaacagcaccaaatatattatttaaaaaattaaatattatttacaaaagtatattttacaagcaactgtttcttttatatatatccacttgaaaatctctttataaagggtcatctctttcgcacacactgatccaccagtaaaaatgcactctagcctatcctcgtgaactcaggaagaacactcagtcaggttcagctgacagcttgtgggtatcgagtttggctgtgtttggttcatgtcaaatcaatccatcagcagcctgagactaatgtcccgggtcccgagg

SEQ ID NO: 293178 - DNA, 616 bp, Homo sapiens
aaacaggtcactggaagaagataatatactgaaggacaaataaaagtcaagtgtagctgggcccagaatggccaatactgatgcaagaaaatatttcaattctcaacctgattaatgtactgcagagtctgttccactggggaaaaaatgcagagaggcattgcttcaaagccttgatccagattaaagtgatagagaccttaaaaaaaaaaaaaactgaaaacatgtattggtgatcactgtttcccttaaaatatacttcaagaaatgcaaaggaaaccatagaatttaaaaggaaaataaaaagtgctctcaggggatctgagaaaacagcaccaaatatattatttaaaaaattaaatattatttacaaaagtatattttacaagcaactgtttcttttatatatatccacttgaaaatctctttataaagggtcatctctttcgcacacactgatccaccagtaaaaatgcactctagcctatcctcgtgaactcaggaagaacactcagtcaggttcagctgacagcttgtgggtatcgagtttggctgtgtttggttcatgtcaaatcaatccatcagcagcctgagactaatgtcccgggtcccgagg

SEQ ID NO: 293179 - DNA, 706 bp, Homo sapiens
agtgcagtggcgcaatagctcactacagccttgaactcacgggctcaagcagtcttcctgcctcagcctcctgagtcctgggaccacaggcgcacgccaccatgccctgctaatatttttaagtttttgtagagatggcgtcttatcagccgtaatcaagccccctctccagggccatggcacacaggctggtcccggcagacaggctggctgcttcacctccccactgccgttgccacacaactcactcctgggacagtgcacctcctccacaccgagacatggagtccctgtcccaaagccacacctggctgccaggtgtcccaagccacctctctggacttggaaggaaatggggacactgtctcaggttggaacctgtaaggggctgacttgtgtccccactaattcacaggttgaagcctgaaccctcaggacctcagaatgtgactgtgtttggagatagcatctttaaggagggagttgaggtcactggggtgggccctaatccagtctgactggtgtctttatacaaggagatgattaggacagagacgtgcatagagagatgatgccatgaggacgcggggaggagacggcatcttcaggcctaggagagaggctcaggaggaaccaggcctgcccgcaccttggcctcagccacccagcctccaggactagcagactgggagctaacagccctttc

SEQ ID NO: 293180 - DNA, 460 bp, Homo sapiens
tccaggaccagctctccaggaggcccacattctttctgcgggaaccactccaaaggggcatgctgttccaggcagcccctcgcgcagacactccggctttgtcgagggcccacaacgcgtccccggtgatgttcatgcccacctcccagtagtgcctcccagaggagaaggccgtctggcccacagcacagggagcccccagtgcctcacctaagctgagctaccctgtcagcccacggccacacgcctgaggtcctgcaactcaggagaggcggagggaccccttccaggagatgattaggacagagacgtgcatagagagatgatgccatgaggacgcggggaggagacggcatcttcaggcctaggagagaggctcaggaggaaccaggcctgcccgcaccttggcctcagccacccagcctccaggactagcagactgggagctaacagccctttc

SEQ ID NO: 293181 - DNA, 821 bp, Homo sapiens
cccctcggctccttctcggtcacgcgcctgccccaacctctggctggcttcggagcctgcaggcactgaagggagtgcaggttcgctcctccgcggaagttcttccccggatgcacaggcgggagcccggtgtcggtgtacgaggatcccccggacgccgagcccacagcgctgccagccctcaccaccatagacctgcaggacctcgctgactgctcttcgctactcgggtccgacgcgccgcctggtggtgacctggccgcctcgcagaaccattcccaccaaacggaagcagacttcaatctgcaagatttcagagacacggtggatgatctcatttcagactcatcctctatgatgtcgcctaccctggccagcggagacttccccttctctccttgcgacatatcaccattcgggccctgcctctccccgccactggacccacgggccctgcagtcaccaccgctgcgccctccagacgtgcccccgcctgagcaatactggaaggaggtggcggaccagaaccagagagcgttgggagacgcgcttgttgagaataatcaactgcacgtgacattgacccagaaacaggaggagatcgcctcgctcaaggagcggaacgtgcagctgaaggaactcgccagccgaacccggcacctggcctcggtgctggataagctgatgatcacacagtcccgggattgtggggcggcggccgagcccttcctgctcaaggcgaaggccaaaaggagcctggaggagttggtcagcgctgcggggcaggattgcgcggaagtggacgccatcctgagggagat

SEQ ID NO: 293182 - DNA, 1008 bp, Homo sapiens
cccctcggctccttctcggtcacgcgcctgccccaacctctggctggcttcggagcctgcaggcactgaagggagtgcagggtgtggatcgctgccccagcccgggccgccgcctccgagcagtcggcacccggaggcaggaggcacaatgcaggcgtgcgggggcggcgcggccggccgtcgggccttcgacagcatctgccccaacagaatgctggcactgccgggccgggcgctgctctgcaagccggggaagccggagaggaagttcgctcctccgcggaagttcttccccggatgcacaggcgggagcccggtgtcggtgtacgaggatcccccggacgccgagcccacagcgctgccagccctcaccaccatagacctgcaggacctcgctgactgctcttcgctactcgggtccgacgcgccgcctggtggtgacctggccgcctcgcagaaccattcccaccaaacggaagcagacttcaatctgcaagatttcagagacacggtggatgatctcatttcagactcatcctctatgatgtcgcctaccctggccagcggagacttccccttctctccttgcgacatatcaccattcgggccctgcctctccccgccactggacccacgggccctgcagtcaccaccgctgcgccctccagacgtgcccccgcctgagcaatactggaaggaggtggcggaccagaaccagagagcgttgggagacgcgcttgttgagaataatcaactgcacgtgacattgacccagaaacaggaggagatcgcctcgctcaaggagcggaacgtgcagctgaaggaactcgccagccgaacccggcacctggcctcggtgctggataagctgatgatcacacagtcccgggattgtggggcggcggccgagcccttcctgctcaaggcgaaggccaaaaggagcctggaggagttggtcagcgctgcggggcaggattgcgcggaagtggacgccatcctgagggagat

SEQ ID NO: 293183 - DNA, 784 bp, Homo sapiens
cccctcggctccttctcggtcacgcgcctgccccaacctctggctggcttcggagcctgcaggcactgaagggagtgcagggtgtggatcgctgccccagcccgggccgccgcctccgagcagtcggcacccggaggcaggaggcacaatgcaggcgtgcgggggcggcgcggccggccgtcgggccttcgacagcatctgccccaacagaatgctggcactgccgggccgggcgctgctctgcaagccggggaagccggagaggaagttcgctcctccgcggaagttcttccccggatgcacaggcgggagcccggtgtcggtgtacgaggatcccccggacgccgagcccacagcgctgccagccctcaccaccatagacctgcaggacctcgctgactgctcttcgctactcgggtccgacgcgccgcctggtggtgacctggccgcctcgcagaaccattcccaccaaacggaagcagacttcaatctgcaagatttcagagacacggtggatgatctcatttcaggcaagtgcagtctcctggcagttaaataacagcgggggtgtcccccactcccaaatcagactagttcagatttcgtggtcgtgaaggtggtgaacccagccaactgtcaacgactctccagcaactcatcaaagagtcagccttttccatatttaggacatttctctcccccgtggagaagtcgaaccgctggatctacatagcgctttatctgggatcggtgtgagttctgggagagggagccctatgctgtg

SEQ ID NO: 293184 - DNA, 2214 bp, Homo sapiens
gtcacatggggtgcgcgcccagactccgacccggaggcggaaccggcagtgcagcccgaagccccgcagtccccgagcacgcgtggccatgcgtcccctgcgcccccgcgccgcgctgctggcgctcctggcctcgctcctggccgcgcccccggtggccccggccgaggccccgcacctggtgcaggtggacgcggcccgcgcgctgtggcccctgcggcgcttctggaggagcacaggcttctgccccccgctgccacacagccaggctgaccagtacgtcctcagctgggaccagcagctcaacctcgcctatgtgggcgccgtccctcaccgcggcatcaagcaggtccggacccactggctgctggagcttgtcaccaccagggggtccactggacggggcctgagctacaacttcacccacctggacgggtacctggaccttctcagggagaaccagctcctcccagggtttgagctgatgggcagcgcctcgggccacttcactgactttgaggacaagcagcaggtgtttgagtggaaggacttggtctccagcctggccaggagatacatcggtaggtacggactggcgcatgtttccaagtggaacttcgagacgtggaatgagccagaccaccacgactttgacaacgtctccatgaccatgcaaggcttcctgaactactacgatgcctgctcggagggtctgcgcgccgccagccccgccctgcggctgggaggccccggcgactccttccacaccccaccgcgatccccgctgagctggggcctcctgcgccactgccacgacggtaccaacttcttcactggggaggcgggcgtgcggctggactacatctccctccacaggaagggtgcgcgcagctccatctccatcctggagcaggagaaggtcgtcgcgcagcagatccggcagctcttccccaagttcgcggacacccccatttacaacgacgaggcggacccgctggtgggctggtccctgccacagccgtggagggcggacgtgacctacgcggccatggtggtgaaggtcatcgcgcagcatcagaacctgctactggccaacaccacctccgccttcccctacgcgctcctgagcaacgacaatgccttcctgagctaccacccgcaccccttcgcgcagcgcacgctcaccgcgcgcttccaggtcaacaacacccgcccgccgcacgtgcagctgttgcgcaagccggtgctcacggccatggggctgctggcgctgctggatgaggagcagctctgggccgaagtgtcgcaggccgggaccgtcctggacagcaaccacacggtgggcgtcctggccagcgcccaccgcccccagggcccggccgacgcctggcgcgccgcggtgctgatctacgcgagcgacgacacccgcgcccaccccaaccgcagcgtcgcggtgaccctgcggctgcgcggggtgccccccggcccgggcctggtctacgtcacgcgctacctggacaacgggctctgcagccccgacggcgagtggcggcgcctgggccggcccgtcttccccacggcagagcagttccggcgcatgcgcgcggctgaggacccggtggccgcggcgccccgccccttacccgccggcggccgcctgaccctgcgccccgcgctgcggctgccgtcgcttttgctggtgcacgtgtgtgcgcgccccgagaagccgcccgggcaggtcacgcggctccgcgccctgcccctgacccaagggcagctggttctggtctggtcggatgaacacgtgggctccaagtgcctgtggacatacgagatccagttctctcaggacggtaaggcgtacaccccggtcagcaggaagccatcgaccttcaacctctttgtgttcagcccagacacaggtgctgtctctggctcctaccgagttcgagccctggactactgggcccgaccaggccccttctcggaccctgtgccgtacctggaggtccctgtgccaagagggcccccatccccgggcaatccatgagcctgtgctgagccccagtgggttgcacctccaccggcagtcagcgagctggggctgcactgtgcccatgctgccctcccatcaccccctttgcaatatatttttatattttattattttcttttatatcttggtaccaacgccccctttaaagcggctttgca

SEQ ID NO: 293185 - DNA, 956 bp, Homo sapiens
gtcacatggggtgcgcgcccagactccgacccggaggcggaaccggcagtgcagcccgaagccccgcagtccccgagcacgcgtggccatgcgtcccctgcgcccccgcgccgcgctgctggcgctcctggcctcgctcctggccgcgcccccggtggccccggccgaggccccgcacctggtgcaggtggacgcggcccgcgcgctgtggcccctgcggcgcttctggaggagcacaggcttctgccccccgctgccacacagccaggctgaccagtacgtcctcagctgggaccagcagctcaacctcgcctatgtgggcgccgtccctcaccgcggcatcaagcaggtccggacccactggctgctggagcttgtcaccaccagagcctttgcactggcgatgccatctgctgcctggatgtcttcctgctggctggtcccgttgcatggtagccttaggtgtctcctcagagaggtccctcgctgaccatcaggctcctcactccctgtcgtatccccttcaccaaagattcccattccctgacgacgcctgtcccctcggaatgcaggcctcgtgggaattcagcccatccgcaagtgcagtggcagggcggcccccttcccccttgacgacgcctgtccccttggaatgcaggcctcgtgggaattcagcccatctgcaagtgcagtggcagggcggcccccttctcccttgaggacgcctgtcccctcgtaatgcaggcctcgtgggaattcagcccatctgcaagtgcagtggcagggcggcccccttctcccttgaggacgcctgtcccctcgtaatgcaggcctcgtgggaattcagcccatctgcaagtgcagtggcagggcggcccccttctcccttgaggacgcctgtcccctcggaatgcaggcctcgtgggaattcagccccatctgcaagtgcagtggca

SEQ ID NO: 293186 - DNA, 556 bp, Homo sapiens
gtcacatggggtgcgcgcccagactccgacccggaggcggaaccggcagtgcagcccgaagccccgcagtccccgagcacgcgtggccatgcgtcccctgcgcccccgcgccgcgctgctggcgctcctggcctcgctcctggccgcgcccccggtggccccggccgaggccccgcacctggtgcaggtggacgcggcccgcgcgctgtggcccctgcggcgcttctggaggagcacaggcttctgccccccgctgccacacagccaggctgaccagtacgtcctcagctgggaccagcagctcaacctcgcctatgtgggcgccgtccctcaccgcggcatcaagcaggtccggacccactggctgctggagcttgtcaccaccagggggtccactggacggggcctgagctacaacttcacccacctggacgggtacctggaccttctcagggagaaccagctcctcccaggtgagctgtgggctctgccctcccagcccgcctgcacccccttgccctggccaccctctccctcacccagcccctctgagtcc

SEQ ID NO: 293187 - DNA, 503 bp, Homo sapiens
aggctggtacggtcggaagtcttagatgcgtggccatgcgtcccctgcgcccccgcgccgcgctgctggcgctcctggcctcgctcctggccgcgcccccggtggccccggccgaggccccgcacctggtgcaggtggacgcggcccgcgcgctgtggcccctgcggcgcttctggaggagcacaggcttctgccccccgctgccacacagccaggctgaccagtacgtcctcagctgggaccagcagctcaacctcgcctatgtgggcgccgtccctcaccgcggcatcaagcaggtccggacccactggctgctggagcttgtcaccaccagggggtccactggacggggcctgagctacaacttcacccacctggacgggtacctggaccttctcagggagaaccagctcctcccaggtgagctgtgggctctgccctcccagcccgcctgcacccccttgccctggccaccctctccctcacccagcccctctgagtcc

SEQ ID NO: 293188 - DNA, 2401 bp, Homo sapiens
gtcacatggggtgcgcgcccagactccgacccggaggcggaaccggcagtgcagcccgaagccccgcagtccccgagcacgcgtggccatgcgtcccctgcgcccccgcgccgcgctgctggcgctcctggcctcgctcctggccgcgcccccggtggccccggccgaggccccgcacctggtgcaggtggacgcggcccgcgcgctgtggcccctgcggcgcttctggaggagcacaggcttctgccccccgctgccacacagccaggctgaccagtacgtcctcagctgggaccagcagctcaacctcgcctatgtgggcgccgtccctcaccgcggcatcaagcaggtccggacccactggctgctggagcttgtcaccaccagggggtccactggacggggcctgagctacaacttcacccacctggacgggtacctggaccttctcagggagaaccagctcctcccagggtttgagctgatgggcagcgcctcgggccacttcactgactttgaggacaagcagcaggtgtttgagtggaaggacttggtctccagcctggccaggagatacatcggtaggtacggactggcgcatgtttccaagtggaacttcgagacgtggaatgagccagaccaccacgactttgacaacgtctccatgaccatgcaaggcttcctgaactactacgatgcctgctcggagggtctgcgcgccgccagccccgccctgcggctgggaggccccggcgactccttccacaccccaccgcgatccccgctgagctggggcctcctgcgccactgccacgacggtaccaacttcttcactggggaggcgggcgtgcggctggactacatctccctccacaggaagggtgcgcgcagctccatctccatcctggagcaggagaaggtcgtcgcgcagcagatccggcagctcttccccaagttcgcggacacccccatttacaacgacgaggcggacccgctggtgggctggtccctgccacagccgtggagggcggacgtgacctacgcggccatggtggtgaaggtcatcgcgcagcatcagaacctgctactggccaacaccacctccgccttcccctacgcgctcctgagcaacgacaatgccttcctgagctaccacccgcaccccttcgcgcagcgcacgctcaccgcgcgcttccaggtcaacaacacccgcccgccgcacgtgcagctgttgcgcaagccggtgctcacggccatggggctgctggcgctgctggatgaggagcagctctgggccgaagtgtcgcaggccgggaccgtcctggacagcaaccacacggtgggcgtcctggccagcgcccaccgcccccagggcccggccgacgcctggcgcgccgcggtgctgatctacgcgagcgacgacacccgcgcccaccccaaccgcagcgtcgcggtgaccctgcggctgcgcggggtgccccccggcccgggcctggtctacgtcacgcgctacctggacaacgggctctgcagccccgacggcgagtggcggcgcctgggccggcccgtcttccccacggcagagcagttccggcgcatgcgcgcggctgaggtaggtgggccgcggaggggcgaggggccgggccgggccggggtcccgggggggtggggtccggggcgggggctccgaggcggtgtgggtgggaggtggagcggtgggccgggggcgttcgccctgaggtcgggccgagcgtccccagctcccctggagaaccctgaggaccggccactgcgcccaggacccggtggccgcggcgccccgccccttacccgccggcggccgcctgaccctgcgccccgcgctgcggctgccgtcgcttttgctggtgcacgtgtgtgcgcgccccgagaagccgcccgggcaggtcacgcggctccgcgccctgcccctgacccaagggcagctggttctggtctggtcggatgaacacgtgggctccaagtgcctgtggacatacgagatccagttctctcaggacggtaaggcgtacaccccggtcagcaggaagccatcgaccttcaacctctttgtgttcagcccagacacaggtgctgtctctggctcctaccgagttcgagccctggactactgggcccgaccaggccccttctcggaccctgtgccgtacctggaggtccctgtgccaagagggcccccatccccgggcaatccatgagcctgtgctgagccccagtgggttgcacctccaccggcagtcagcgagctggggctgcactgtgcccatgctgccctcccatcaccccctttgcaatatatttttatattttattattttcttttatatcttggtaccaacgccccctttaaagcggctttgca

SEQ ID NO: 293189 - DNA, 2230 bp, Homo sapiens
gcggcagtgcatgcccgacagccccgcaggtcccctgaggcacgcagtgtgccgatgcggtcccgctgactgcgcccctgctgcaatgtcggcatagctgtgtgctgcgtccatgtgcgctctgcgtccgtgtgcctgccaccctcctggtgtgcccctgtgcctgatgtgcccctgcgaccattggtgcatggttgcgacgctggcaccgcgctgcatgtgtgccccgtgctgtgcgcttctggaggagcacaggcttctgccccccgctgccacacagccaggctgaccagtacgtcctcagctgggaccagcagctcaacctcgcctatgtgggcgccgtccctcaccgcggcatcaagcaggtccggacccactggctgctggagcttgtcaccaccagggggtccactggacggggcctgagctacaacttcacccacctggacgggtacctggaccttctcagggagaaccagctcctcccagggtttgagctgatgggcagcgcctcgggccacttcactgactttgaggacaagcagcaggtgtttgagtggaaggacttggtctccagcctggccaggagatacatcggtaggtacggactggcgcatgtttccaagtggaacttcgagacgtggaatgagccagaccaccacgactttgacaacgtctccatgaccatgcaaggcttcctgaactactacgatgcctgctcggagggtctgcgcgccgccagccccgccctgcggctgggaggccccggcgactccttccacaccccaccgcgatccccgctgagctggggcctcctgcgccactgccacgacggtaccaacttcttcactggggaggcgggcgtgcggctggactacatctccctccacaggaagggtgcgcgcagctccatctccatcctggagcaggagaaggtcgtcgcgcagcagatccggcagctcttccccaagttcgcggacacccccatttacaacgacgaggcggacccgctggtgggctggtccctgccacagccgtggagggcggacgtgacctacgcggccatggtggtgaaggtcatcgcgcagcatcagaacctgctactggccaacaccacctccgccttcccctacgcgctcctgagcaacgacaatgccttcctgagctaccacccgcaccccttcgcgcagcgcacgctcaccgcgcgcttccaggtcaacaacacccgcccgccgcacgtgcagctgttgcgcaagccggtgctcacggccatggggctgctggcgctgctggatgaggagcagctctgggccgaagtgtcgcaggccgggaccgtcctggacagcaaccacacggtgggcgtcctggccagcgcccaccgcccccagggcccggccgacgcctggcgcgccgcggtgctgatctacgcgagcgacgacacccgcgcccaccccaaccgcagcgtcgcggtgaccctgcggctgcgcggggtgccccccggcccgggcctggtctacgtcacgcgctacctggacaacgggctctgcagccccgacggcgagtggcggcgcctgggccggcccgtcttccccacggcagagcagttccggcgcatgcgcgcggctgaggacccggtggccgcggcgccccgccccttacccgccggcggccgcctgaccctgcgccccgcgctgcggctgccgtcgcttttgctggtgcacgtgtgtgcgcgccccgagaagccgcccgggcaggtcacgcggctccgcgccctgcccctgacccaagggcagctggttctggtctggtcggatgaacacgtgggctccaagtgcctgtggacatacgagatccagttctctcaggacggtaaggcgtacaccccggtcagcaggaagccatcgaccttcaacctctttgtgttcagcccagacacaggtgctgtctctggctcctaccgagttcgagccctggactactgggcccgaccaggccccttctcggaccctgtgccgtacctggaggtccctgtgccaagagggcccccatccccgggcaatccatgagcctgtgctgagccccagtgggttgcacctccaccggcagtcagcgagctggggctgcactgtgcccatgctgccctcccatcaccccctttgcaatatatttttatattttattattttcttttatatcttggtaccaacgccccctttaaagcggctttgca

SEQ ID NO: 293190 - DNA, 2233 bp, Homo sapiens
ctcgcccacccagggccggggattggtgctgggccttctcctggcagcgcgggccccagccccctgcccggtatggatggacgctgggccctgctggatccagaatccatcgtgaggtgagatgggattacgacaccaagcccatgccatggggtgtgctgaggccagcagtgctgaggggcggcgtggcggcaccctgtccaggctcagctccggcctattggctctgcggttcctggctgaaaaccaccctgtagcctcctgaagctcacctccccaacggggcaggaacaggctgggctgccaccacgcacatgtgcctaccgtcagaatgtcacagtcactggacacaggtgcaggcaagcctgagtccagctgctccgtgtccacctccctggctccccagggggtccactggacggggcctgagctacaacttcacccacctggacgggtacctggaccttctcagggagaaccagctcctcccagggtttgagctgatgggcagcgcctcgggccacttcactgactttgaggacaagcagcaggtgtttgagtggaaggacttggtctccagcctggccaggagatacatcggtaggtacggactggcgcatgtttccaagtggaacttcgagacgtggaatgagccagaccaccacgactttgacaacgtctccatgaccatgcaaggcttcctgaactactacgatgcctgctcggagggtctgcgcgccgccagccccgccctgcggctgggaggccccggcgactccttccacaccccaccgcgatccccgctgagctggggcctcctgcgccactgccacgacggtaccaacttcttcactggggaggcgggcgtgcggctggactacatctccctccacaggaagggtgcgcgcagctccatctccatcctggagcaggagaaggtcgtcgcgcagcagatccggcagctcttccccaagttcgcggacacccccatttacaacgacgaggcggacccgctggtgggctggtccctgccacagccgtggagggcggacgtgacctacgcggccatggtggtgaaggtcatcgcgcagcatcagaacctgctactggccaacaccacctccgccttcccctacgcgctcctgagcaacgacaatgccttcctgagctaccacccgcaccccttcgcgcagcgcacgctcaccgcgcgcttccaggtcaacaacacccgcccgccgcacgtgcagctgttgcgcaagccggtgctcacggccatggggctgctggcgctgctggatgaggagcagctctgggccgaagtgtcgcaggccgggaccgtcctggacagcaaccacacggtgggcgtcctggccagcgcccaccgcccccagggcccggccgacgcctggcgcgccgcggtgctgatctacgcgagcgacgacacccgcgcccaccccaaccgcagcgtcgcggtgaccctgcggctgcgcggggtgccccccggcccgggcctggtctacgtcacgcgctacctggacaacgggctctgcagccccgacggcgagtggcggcgcctgggccggcccgtcttccccacggcagagcagttccggcgcatgcgcgcggctgaggacccggtggccgcggcgccccgccccttacccgccggcggccgcctgaccctgcgccccgcgctgcggctgccgtcgcttttgctggtgcacgtgtgtgcgcgccccgagaagccgcccgggcaggtcacgcggctccgcgccctgcccctgacccaagggcagctggttctggtctggtcggatgaacacgtgggctccaagtgcctgtggacatacgagatccagttctctcaggacggtaaggcgtacaccccggtcagcaggaagccatcgaccttcaacctctttgtgttcagcccagacacaggtgctgtctctggctcctaccgagttcgagccctggactactgggcccgaccaggccccttctcggaccctgtgccgtacctggaggtccctgtgccaagagggcccccatccccgggcaatccatgagcctgtgctgagccccagtgggttgcacctccaccggcagtcagcgagctggggctgcactgtgcccatgctgccctcccatcaccccctttgcaatatatttttatattttattattttcttttatatcttggtaccaacgccccctttaaagcggctttgca

SEQ ID NO: 293191 - DNA, 1943 bp, Homo sapiens
ctcgcccacccagggccggggattggtgctgggccttctcctggcagcgcgggccccagccccctgcccggtatggatggacgctgggccctgctggatccagaatccatcgtgagggggtccactggacggggcctgagctacaacttcacccacctggacgggtacctggaccttctcagggagaaccagctcctcccagggtttgagctgatgggcagcgcctcgggccacttcactgactttgaggacaagcagcaggtgtttgagtggaaggacttggtctccagcctggccaggagatacatcggtaggtacggactggcgcatgtttccaagtggaacttcgagacgtggaatgagccagaccaccacgactttgacaacgtctccatgaccatgcaaggcttcctgaactactacgatgcctgctcggagggtctgcgcgccgccagccccgccctgcggctgggaggccccggcgactccttccacaccccaccgcgatccccgctgagctggggcctcctgcgccactgccacgacggtaccaacttcttcactggggaggcgggcgtgcggctggactacatctccctccacaggaagggtgcgcgcagctccatctccatcctggagcaggagaaggtcgtcgcgcagcagatccggcagctcttccccaagttcgcggacacccccatttacaacgacgaggcggacccgctggtgggctggtccctgccacagccgtggagggcggacgtgacctacgcggccatggtggtgaaggtcatcgcgcagcatcagaacctgctactggccaacaccacctccgccttcccctacgcgctcctgagcaacgacaatgccttcctgagctaccacccgcaccccttcgcgcagcgcacgctcaccgcgcgcttccaggtcaacaacacccgcccgccgcacgtgcagctgttgcgcaagccggtgctcacggccatggggctgctggcgctgctggatgaggagcagctctgggccgaagtgtcgcaggccgggaccgtcctggacagcaaccacacggtgggcgtcctggccagcgcccaccgcccccagggcccggccgacgcctggcgcgccgcggtgctgatctacgcgagcgacgacacccgcgcccaccccaaccgcagcgtcgcggtgaccctgcggctgcgcggggtgccccccggcccgggcctggtctacgtcacgcgctacctggacaacgggctctgcagccccgacggcgagtggcggcgcctgggccggcccgtcttccccacggcagagcagttccggcgcatgcgcgcggctgaggacccggtggccgcggcgccccgccccttacccgccggcggccgcctgaccctgcgccccgcgctgcggctgccgtcgcttttgctggtgcacgtgtgtgcgcgccccgagaagccgcccgggcaggtcacgcggctccgcgccctgcccctgacccaagggcagctggttctggtctggtcggatgaacacgtgggctccaagtgcctgtggacatacgagatccagttctctcaggacggtaaggcgtacaccccggtcagcaggaagccatcgaccttcaacctctttgtgttcagcccagacacaggtgctgtctctggctcctaccgagttcgagccctggactactgggcccgaccaggccccttctcggaccctgtgccgtacctggaggtccctgtgccaagagggcccccatccccgggcaatccatgagcctgtgctgagccccagtgggttgcacctccaccggcagtcagcgagctggggctgcactgtgcccatgctgccctcccatcaccccctttgcaatatatttttatattttattattttcttttatatcttggtaccaacgccccctttaaagcggctttgca

SEQ ID NO: 293192 - DNA, 1670 bp, Homo sapiens
agattcacctgtgctggggggacagcaaggctcctctgtaggtacggactggcgcatgtttccaagtggaacttcgagacgtggaatgagccagaccaccacgactttgacaacgtctccatgaccatgcaaggcttcctgaactactacgatgcctgctcggagggtctgcgcgccgccagccccgccctgcggctgggaggccccggcgactccttccacaccccaccgcgatccccgctgagctggggcctcctgcgccactgccacgacggtaccaacttcttcactggggaggcgggcgtgcggctggactacatctccctccacaggaagggtgcgcgcagctccatctccatcctggagcaggagaaggtcgtcgcgcagcagatccggcagctcttccccaagttcgcggacacccccatttacaacgacgaggcggacccgctggtgggctggtccctgccacagccgtggagggcggacgtgacctacgcggccatggtggtgaaggtcatcgcgcagcatcagaacctgctactggccaacaccacctccgccttcccctacgcgctcctgagcaacgacaatgccttcctgagctaccacccgcaccccttcgcgcagcgcacgctcaccgcgcgcttccaggtcaacaacacccgcccgccgcacgtgcagctgttgcgcaagccggtgctcacggccatggggctgctggcgctgctggatgaggagcagctctgggccgaagtgtcgcaggccgggaccgtcctggacagcaaccacacggtgggcgtcctggccagcgcccaccgcccccagggcccggccgacgcctggcgcgccgcggtgctgatctacgcgagcgacgacacccgcgcccaccccaaccgcagcgtcgcggtgaccctgcggctgcgcggggtgccccccggcccgggcctggtctacgtcacgcgctacctggacaacgggctctgcagccccgacggcgagtggcggcgcctgggccggcccgtcttccccacggcagagcagttccggcgcatgcgcgcggctgaggacccggtggccgcggcgccccgccccttacccgccggcggccgcctgaccctgcgccccgcgctgcggctgccgtcgcttttgctggtgcacgtgtgtgcgcgccccgagaagccgcccgggcaggtcacgcggctccgcgccctgcccctgacccaagggcagctggttctggtctggtcggatgaacacgtgggctccaagtgcctgtggacatacgagatccagttctctcaggacggtaaggcgtacaccccggtcagcaggaagccatcgaccttcaacctctttgtgttcagcccagacacaggtgctgtctctggctcctaccgagttcgagccctggactactgggcccgaccaggccccttctcggaccctgtgccgtacctggaggtccctgtgccaagagggcccccatccccgggcaatccatgagcctgtgctgagccccagtgggttgcacctccaccggcagtcagcgagctggggctgcactgtgcccatgctgccctcccatcaccccctttgcaatatatttttatattttattattttcttttatatcttggtaccaacgccccctttaaagcggctttgca

SEQ ID NO: 293193 - DNA, 2089 bp, Homo sapiens
cctgtgtaggatctgtttattcacagaccgcgccgggcagtcctgggcttgaacgtgtgtgtcagccgcgctgccagccatgctgaggctcgggactgagccgcccctttgttgtccccagccccccgctgccacacagccaggctgaccagtacgtcctcagctgggaccagcagctcaacctcgcctatgtgggcgccgtccctcaccgcggcatcaagcaggtccggacccactggctgctggagcttgtcaccaccagggggtccactggacggggcctgagctacaacttcacccacctggacgggtacctggaccttctcagggagaaccagctcctcccagggtttgagctgatgggcagcgcctcgggccacttcactgactttgaggacaagcagcaggtgtttgagtggaaggacttggtctccagcctggccaggagatacatcggtaggtacggactggcgcatgtttccaagtggaacttcgagacgtggaatgagccagaccaccacgactttgacaacgtctccatgaccatgcaaggcttcctgaactactacgatgcctgctcggagggtctgcgcgccgccagccccgccctgcggctgggaggccccggcgactccttccacaccccaccgcgatccccgctgagctggggcctcctgcgccactgccacgacggtaccaacttcttcactggggaggcgggcgtgcggctggactacatctccctccacaggaagggtgcgcgcagctccatctccatcctggagcaggagaaggtcgtcgcgcagcagatccggcagctcttccccaagttcgcggacacccccatttacaacgacgaggcggacccgctggtgggctggtccctgccacagccgtggagggcggacgtgacctacgcggccatggtggtgaaggtcatcgcgcagcatcagaacctgctactggccaacaccacctccgccttcccctacgcgctcctgagcaacgacaatgccttcctgagctaccacccgcaccccttcgcgcagcgcacgctcaccgcgcgcttccaggtcaacaacacccgcccgccgcacgtgcagctgttgcgcaagccggtgctcacggccatggggctgctggcgctgctggatgaggagcagctctgggccgaagtgtcgcaggccgggaccgtcctggacagcaaccacacggtgggcgtcctggccagcgcccaccgcccccagggcccggccgacgcctggcgcgccgcggtgctgatctacgcgagcgacgacacccgcgcccaccccaaccgcagcgtcgcggtgaccctgcggctgcgcggggtgccccccggcccgggcctggtctacgtcacgcgctacctggacaacgggctctgcagccccgacggcgagtggcggcgcctgggccggcccgtcttccccacggcagagcagttccggcgcatgcgcgcggctgaggacccggtggccgcggcgccccgccccttacccgccggcggccgcctgaccctgcgccccgcgctgcggctgccgtcgcttttgctggtgcacgtgtgtgcgcgccccgagaagccgcccgggcaggtcacgcggctccgcgccctgcccctgacccaagggcagctggttctggtctggtcggatgaacacgtgggctccaagtgcctgtggacatacgagatccagttctctcaggacggtaaggcgtacaccccggtcagcaggaagccatcgaccttcaacctctttgtgttcagcccagacacaggtgctgtctctggctcctaccgagttcgagccctggactactgggcccgaccaggccccttctcggaccctgtgccgtacctggaggtccctgtgccaagagggcccccatccccgggcaatccatgagcctgtgctgagccccagtgggttgcacctccaccggcagtcagcgagctggggctgcactgtgcccatgctgccctcccatcaccccctttgcaatatatttttatattttattattttcttttatatcttggtaccaacgccccctttaaagcggctttgca

SEQ ID NO: 293194 - DNA, 1395 bp, Homo sapiens
ttcgattcgagctcgtacccgaacggtgatgcggttggactacatctccctccacaggaagggtgcgcgcagctccatctccatcctggagcaggagaaggtcgtcgcgcagcagatccggcagctcttccccaagttcgcggacacccccatttacaacgacgaggcggacccgctggtgggctggtccctgccacagccgtggagggcggacgtgacctacgcggccatggtggtgaaggtcatcgcgcagcatcagaacctgctactggccaacaccacctccgccttcccctacgcgctcctgagcaacgacaatgccttcctgagctaccacccgcaccccttcgcgcagcgcacgctcaccgcgcgcttccaggtcaacaacacccgcccgccgcacgtgcagctgttgcgcaagccggtgctcacggccatggggctgctggcgctgctggatgaggagcagctctgggccgaagtgtcgcaggccgggaccgtcctggacagcaaccacacggtgggcgtcctggccagcgcccaccgcccccagggcccggccgacgcctggcgcgccgcggtgctgatctacgcgagcgacgacacccgcgcccaccccaaccgcagcgtcgcggtgaccctgcggctgcgcggggtgccccccggcccgggcctggtctacgtcacgcgctacctggacaacgggctctgcagccccgacggcgagtggcggcgcctgggccggcccgtcttccccacggcagagcagttccggcgcatgcgcgcggctgaggacccggtggccgcggcgccccgccccttacccgccggcggccgcctgaccctgcgccccgcgctgcggctgccgtcgcttttgctggtgcacgtgtgtgcgcgccccgagaagccgcccgggcaggtcacgcggctccgcgccctgcccctgacccaagggcagctggttctggtctggtcggatgaacacgtgggctccaagtgcctgtggacatacgagatccagttctctcaggacggtaaggcgtacaccccggtcagcaggaagccatcgaccttcaacctctttgtgttcagcccagacacaggtgctgtctctggctcctaccgagttcgagccctggactactgggcccgaccaggccccttctcggaccctgtgccgtacctggaggtccctgtgccaagagggcccccatccccgggcaatccatgagcctgtgctgagccccagtgggttgcacctccaccggcagtcagcgagctggggctgcactgtgcccatgctgccctcccatcaccccctttgcaatatatttttatattttattattttcttttatatcttggtaccaacgccccctttaaagcggctttgca

SEQ ID NO: 293195 - DNA, 950 bp, Homo sapiens
cggcacgaggagttctctcaggacggtaaggcgtacaccccggtcagcaggaccgtcctggacagcaaccacacggtgggcgtcctggccagcgcccaccgcccccagggcccggccgacgcctggcgcgccgcggtgctgatctacgcgagcgacgacacccgcgcccaccccaaccgcagcgtcgcggtgaccctgcggctgcgcggggtgccccccggcccgggcctggtctacgtcacgcgctacctggacaacgggctctgcagccccgacggcgagtggcggcgcctgggccggcccgtcttccccacggcagagcagttccggcgcatgcgcgcggctgaggacccggtggccgcggcgccccgccccttacccgccggcggccgcctgaccctgcgccccgcgctgcggctgccgtcgcttttgctggtgcacgtgtgtgcgcgccccgagaagccgcccgggcaggtcacgcggctccgcgccctgcccctgacccaagggcagctggttctggtctggtcggatgaacacgtgggctccaagtgcctgtggacatacgagatccagttctctcaggacggtaaggcgtacaccccggtcagcaggaagccatcgaccttcaacctctttgtgttcagcccagacacaggtgctgtctctggctcctaccgagttcgagccctggactactgggcccgaccaggccccttctcggaccctgtgccgtacctggaggtccctgtgccaagagggcccccatccccgggcaatccatgagcctgtgctgagccccagtgggttgcacctccaccggcagtcagcgagctggggctgcactgtgcccatgctgccctcccatcaccccctttgcaatatatttttatattttattattttcttttatatcttggtaccaacgccccctttaaagcggctttgca

SEQ ID NO: 293196 - DNA, 988 bp, Homo sapiens
aggctggtacggtcggaagtcttagatgcgtggccatgcgtcccctgcgcccccgcgccgcgctgctggcgctcctggcctcgctcctgaccgtcctggacagcaaccacacggtgggcgtcctggccagcgcccaccgcccccagggcccggccgacgcctggcgcgccgcggtgctgatctacgcgagcgacgacacccgcgcccaccccaaccgcagcgtcgcggtgaccctgcggctgcgcggggtgccccccggcccgggcctggtctacgtcacgcgctacctggacaacgggctctgcagccccgacggcgagtggcggcgcctgggccggcccgtcttccccacggcagagcagttccggcgcatgcgcgcggctgaggacccggtggccgcggcgccccgccccttacccgccggcggccgcctgaccctgcgccccgcgctgcggctgccgtcgcttttgctggtgcacgtgtgtgcgcgccccgagaagccgcccgggcaggtcacgcggctccgcgccctgcccctgacccaagggcagctggttctggtctggtcggatgaacacgtgggctccaagtgcctgtggacatacgagatccagttctctcaggacggtaaggcgtacaccccggtcagcaggaagccatcgaccttcaacctctttgtgttcagcccagacacaggtgctgtctctggctcctaccgagttcgagccctggactactgggcccgaccaggccccttctcggaccctgtgccgtacctggaggtccctgtgccaagagggcccccatccccgggcaatccatgagcctgtgctgagccccagtgggttgcacctccaccggcagtcagcgagctggggctgcactgtgcccatgctgccctcccatcaccccctttgcaatatatttttatattttattattttcttttatatcttggtaccaacgccccctttaaagcggctttgca

SEQ ID NO: 293197 - DNA, 1914 bp, Homo sapiens
gtcacatggggtgcgcgcccagactccgacccggaggcggaaccggcagtgcagcccgaagccccgcagtccccgagcacgcgtggccatgcgtcccctgcgcccccgcgccgcgctgctggcgctcctggcctcgctcctggccgcgcccccggtggccccggccgaggccccgcacctggtgcaggtggacgcggcccgcgcgctgtggcccctgcggcgcttctggaggagcacaggcttctgccccccgctgccacacagccaggctgaccagtacgtcctcagctgggaccagcagctcaacctcgcctatgtgggcgccgtccctcaccgcggcatcaagcaggtccggacccactggctgctggagcttgtcaccaccagggggtccactggacggggcctgagctacaacttcacccacctggacgggtacctggaccttctcagggagaaccagctcctcccagggtttgagctgatgggcagcgcctcgggccacttcactgactttgaggacaagcagcaggtgtttgagtggaaggacttggtctccagcctggccaggagatacatcggtaggtacggactggcgcatgtttccaagtggaacttcgagacgtggaatgagccagaccaccacgactttgacaacgtctccatgaccatgcaaggcttcctgaactactacgatgcctgctcggagggtctgcgcgccgccagccccgccctgcggctgggaggccccggcgactccttccacaccccaccgcgatccccgctgagctggggcctcctgcgccactgccacgacggtaccaacttcttcactggggaggcgggcgtgcggctggactacatctccctccacaggaagggtgcgcgcagctccatctccatcctggagcaggagaaggtcgtcgcgcagcagatccggcagctcttccccaagttcgcggacacccccatttacaacgacgaggcggacccgctggtgggctggtccctgccacagccgtggagggcggacgtgacctacgcggccatggtggtgaaggtcatcgcgcagcatcagaacctgctactggccaacaccacctccgccttcccctacgcgctcctgagcaacgacaatgccttcctgagctaccacccgcaccccttcgcgcagcgcacgctcaccgcgcgcttccaggtcaacaacacccgcccgccgcacgtgcagctgttgcgcaagccggtgctcacggccatggggctgctggcgctgctggatgaggagcagctctgggccgaagtgtcgcaggccgggaccgtcctggacagcaaccacacggtgggcgtcctggccagcgcccaccgcccccagggcccggccgacgcctggcgcgccgcggtgctgatctacgcgagcgacgacacccgcgcccaccccaaccgcagcgtcgcggtgaccctgcggctgcgcggggtgccccccggcccgggcctggtctacgtcacgcgctacctggacaacgggctctgcagccccgacggcgagtggcggcgcctgggccggcccgtcttccccacggcagagcagttccggcgcatgcgcgcggctgaggacccggtggccgcggcgccccgccccttacccgccggcggccgcctgaccctgcgccccgcgctgcggctgccgtcgcttttgctggtgcacgtgtgtgcgcgccccgagaagccgcccgggcaggtcacgcggctccgcgccctgcccctgacccaagggcagctggttctggtctggtcggatgaacacgtgggctccaagtgcgtgagtggggccgcccctccctctgcctggtcctaggcaggtccctgggtcccgaccccttcacccatgcggtcactcgggccacttgccgtggc

SEQ ID NO: 293198 - DNA, 771 bp, Homo sapiens
gtcacatggggtgcgcgcccagactccgacccggaggcggaaccggcagtgcagcccgaagccccgcagtccccgagcacgcgtggccatgcgtcccctgcgcccccgcgccgcgctgctggcgctcctggcctcgctcctggccgcgcccccggtggccccggccgaggccccgcacctggtgcaggtggacgcggcccgcgcgctgtggcccctgcggcgcttctggaggagcacaggcttctgccccccgctgccacacagccaggctgaccagtacgtcctcagctgggaccagcagctcaacctcgcctatgtgggcgccgtccctcaccgcggcatcaagcaggtccggacccactggctgctggagcttgtcaccaccagggggtccactggacggggcctgagctacaacttcacccacctggacgggtacctggaccttctcagggagaaccagctcctcccagggtttgagctgatgggcagcgcctcgggccacttcactgactttgaggacaagcagcaggtgtttgagtggaaggacttggtctccagcctggccaggagatacatcggtgggcgagcgcaggccctggggccctggccggggcgggggtactcctgggcaggttgcacccctatcacgcaggctgctgcctggtcaggagatacattggtgggcaggcgcaggcccttgtggggggatgggggtgacaagggataggttggtggtcggcgcaggccctggggccccaggctgggggg

SEQ ID NO: 293199 - DNA, 780 bp, Homo sapiens
gtcacatggggtgcgcgcccagactccgacccggaggcggaaccggcagtgcagcccgaagccccgcagtccccgagcacgcgtggccatgcgtcccctgcgcccccgcgccgcgctgctggcgctcctggcctcgctcctggccgcgcccccggtggccccggccgaggccccgcacctggtgcaggtggacgcggcccgcgcgctgtggcccctgcggcgcttctggaggagcacaggcttctgccccccgctgccacacagccaggctgaccagtacgtcctcagctgggaccagcagctcaacctcgcctatgtgggcgccgtccctcaccgcggcatcaagcaggtccggacccactggctgctggagcttgtcaccaccagccatgcaccctgcgtccagccccgtgaggctgtagagtgactgcaggaagaagtccttgttggcatagtacagcggccccccaaagcggaacacccgcacgccgggctcagggacgaggccctcgaactctgtggcatcctcgtagaaggccgtgtccccgatgcgggccagcagggcggtgcgtgggcgttgggtgcggccggccaggctgagcagcgagaggatgacgccagccagcagcccggcctctgtgctgaccagcatacaggtggccgcggtgcctgcccagaccagcgcgtcagccgggctcatccgccacagccgcgggaggtcccacaccttgcgcagggccccccgcaggctgaccacgatgacgcaggccagcacgcttc

SEQ ID NO: 293200 - DNA, 464 bp, Homo sapiens
attcctggccctaagggtcattttattagtcactgaacgcacgggcagcgcctggatcctgcgcccgggcagtcctgggcttgaacgtgtgtgtcagccgcgctgccagccatgctgaggctcgggactgagccgcccctttgttgtccccagccccccgctgccacacagccaggctgaccagtacgtcctcagctgggaccagcagctcaacctcgcctatgtgggcgccgtccctcaccgcggcatcaagcaggtccggacccactggctgctggagcttgtcaccaccaggtgggcggcgggcagggtctgggcgtcccagagccccttacagaggcacagatgggaggggagggctgggggctgctcggaagaccccttgttcccccacctcccgccgaagcaccctgttggggagagcgtgtccttgctggctgtgctggggtgagggctgtgtgctg

SEQ ID NO: 293201 - DNA, 995 bp, Homo sapiens
gggaggcgtgagccaccgcgcctgtccaggaatcagttttttccaacaagtttttggactccactttgagaaatcctgacctgcactatgcctgaaacactccaaagggggtgctgatctggagacagatctgtcctgggacctgtttcagccctgtcagctcctggtggctgagttgaagggtgtggcccaaaaggcagggcaaagctagcttctgggttccttcagcccctgcaaggtttgggactctgtccacaggtccagacccagtacttattatgaactgttgggggtgcatcctggtgccagcactgaggaagttaaacgagctttcttctccaagtccaaagagctgcacccagaccgggaccctgggaacccaagcctgcacagccgctttgtggagctgagcgaggcataccgtgtgctcagccgtgagcagagccgccgcagctatgatgaccagctccgctcaggtagtcccccaaagtctccacgaaccacagtccatgacaagtctgcccaccaaacacacagctcctggacaccccccaacgcacagtactggtcccagtttcacagcgtgaggccacaggggccccagttgaggcagcagcaacacaaacaaaacaaacaagtgctggggtactgcctcctcctcatgctggcgggcatgggcctgcactacattgccttcaggaaggtgaagcagatgcaccttaacttcatggatgaaaaggatcggatcatcacagccttctacaacgaagcccgggcacgggccagggccaacagaggcatccttcagcaggagcgacaacggctagggcagcggcagccgccaccatccgagccaacccaaggccccgagatcgtgccccggggcgccggcccctgaggggctcacctggatggggcctgcagtgcgttcccgctttgcttccttccctggacggcccgctccccgaaacgcgcgcaataaagtgattcgcaga

SEQ ID NO: 293202 - DNA, 1345 bp, Homo sapiens
gggaggcgtgagccaccgcgcctgtccaggaatcagttttttccaacaagtttttggactccactttgagaaatcctgacctgcactatgcctgaaacactccaaagggggtgctgatctggagacagatctgtcctgggacctgtttcagccctgtcagctcctggtggctgagttgaagggtgtggcccaaaaggcagggcaaagctagcttctgggttccttcagcccctgcaaggtttgggactctgtccacaggtccagacccagtacttattatgaactgttgggggtgcatcctggtgccagcactgaggaagttaaacgagctttcttctccaagtccaaagaggtacccgtacccctgaggtggggagggggagcaggaactttgagccagtgggggtgtgcttcaaattcccaggagtagaccagcatctctggtgggtgccacattttttcagccctcatagggagtggcaggtgctcaatggtaggggaaaggctgtgggcaggagccaggggtcctgtctgatgggctgggcttggttttcttgacctgcctgcctgctcttgagaaacctggaccagggcatatggtgaatgcagggggctggcaggtggggagggcttgaacacaggaggaagcaggagtccatgctctctggccttctgaggagtgggcaggcctgagtgagggtcactgaccaggcagggcctctgggtatgactggagccctggtgggtggatgtcatcagcatgggtcctggggagggacaggcaaagggagataaggggagtcctgccccaccccagctgcacccagaccgggaccctgggaacccaagcctgcacagccgctttgtggagctgagcgaggcataccgtgtgctcagccgtgagcagagccgccgcagctatgatgaccagctccgctcaggtagtcccccaaagtctccacgaaccacagtccatgacaagtctgcccaccaaacacacagctcctggacaccccccaacgcacagtactggtcccagtttcacagcgtgaggccacaggggccccagttgaggcagcagcaacacaaacaaaacaaacaagtgctggggtactgcctcctcctcatgctggcgggcatgggcctgcactacattgccttcaggtgatgcctgttctccccggggtgatgggcagagggcaggagggtgggtgaattccagtgtggtcagccagtcctccacagcacctcgtggcccgtactcttgtgtctctcaagctaagagctgcttgaagttggtctctggagcctctccttacttattaaaggcagcgctgcaccaaga

SEQ ID NO: 293203 - DNA, 766 bp, Homo sapiens
agagatggggtttcaccatattggccaggctggtctcaaactcctgacctcaggtgatccacccgcctcagcctcccaaagtactgggattacaggtgagagctaccgcgcctggccacaaagccgattttctatagcagatacctaaaggccagtgcccactgctagcagcctgcctagttcagtgatggagttagacgcataccctttctagtcttctgggaggagcacccccatgtccacagctgctgtcacacctcaaagtgaccagggacttcggatgccattggaccctagacaagccagggccactctgagccctccctatctatcacaggaagggttagactgaggttcctaaccctgtgtaagggtaaaaagctgtgaggcccctagagtggggtggaagggggcaggacttcagggacagcaggaattggattcccagggttaattgtgacccattgcaggaaggtgaagcagatgcaccttaacttcatggatgaaaaggatcggatcatcacagccttctacaacgaagcccgggcacgggccagggccaacagaggcatccttcagcaggagcgacaacggctagggcagcggcagccgccaccatccgagccaacccaaggccccgagatcgtgccccggggcgccggcccctgaggggctcacctggatggggcctgcagtgcgttcccgctttgcttccttccctggacggcccgctccccgaaacgcgcgcaataaagtgattcgcaga

SEQ ID NO: 293204 - DNA, 552 bp, Homo sapiens
gcggggggccggcccggttgttcaatgggtttctgtttgccctacgtgctgagttagttgtggtctctactccgtgtcaggaggctcccaggtttgtctcaggtaaccctcgccttccctgctgaggatcagagatagagaagacccccaaggtcatacaccgatttaagcggcagaggaggaagtttgagtccaggtcaaacccaacgctcttaccacagctctagtggtttccaagcatcgctgtatcactgtgcataaccctctgtggggggtgggagatggggaggtgtcgggtacaaaatccagattcctgggctctgctctggagattctgaacttttttttgagatggagtttcgctcgttgcccaggctggagtgcaatggagcaatctcggctcaccacaacctccgcctcccgggttcaagcgattctcctgcctcagcctcccgagtagctgggattacgggcatgcaccaccacgcccggctaattttgtatttttaggagagacagggtttctccatgttagtcaggctggtcttgaac

SEQ ID NO: 293205 - DNA, 316 bp, Homo sapiens
gcagtaagggcggcatggcggcgggcgggcagctgggaaaggaggctaccaagagcgcattggaccaggatggggctagacttcaagcacccgggggcagagggaagggccaacagaggcatccttcagcaggagcgacaacggctagggcagcggcagccgccaccatccgagccaacccaaggccccgagatcgtgccccggggcgccggcccctgaggggctcacctggatggggcctgcagtgcgttcccgctttgcttccttccctggacggcccgctccccgaaacgcgcgcaataaagtgattcgcaga

SEQ ID NO: 293206 - DNA, 1376 bp, Homo sapiens
ccggggcggaagcagctccgtaagatatacctcgctgcagaggggagcaacagcggaacggagacacggtggccgggccgaaaacgtcacaaagccgcagagagcgggctctgtcccgcccgctccccaggtggacgtggtcttggcatccacgccaatgagaatgtgagggcggggcctgaatagacgcaggaaatggcgacggccgcgggtctgtgagcagcgggggcggggcctggttgtggcccctccttctcccgtccccaagttccctgggtgggaacggggtcttggggtccctggctgggtggccagaccccgaagccagcgctgggaagggctgcggatgcccgggtcagaggaaggggcaggtccaaggacacgcgggtctggtcctgggcaagaaccgccccctctccgggcctgcttcagtcttcctttgcagaacaacgggccaggccccttccctctgcccccgggtgcttgaagtctagccccatcctggtccaatgcgctcttggtagcctcctttcccagctgcccgcccgccgccatgccgcccttactgcccctgcgcctgtgccggctgtggccccgcaaccctccctcccggctcctcggagcggccgccgggcagcggtccagacccagtacttattatgaactgttgggggtgcatcctggtgccagcactgaggaagttaaacgagctttcttctccaagtccaaagagctgcacccagaccgggaccctgggaacccaagcctgcacagccgctttgtggagctgagcgaggcataccgtgtgctcagccgtgagcagagccgccgcagctatgatgaccagctccgctcaggtagtcccccaaagtctccacgaaccacagtccatgacaagtctgcccaccaaacacacagctcctggacaccccccaacgcacagtactggtcccagtttcacagcgtgaggccacaggggccccagttgaggcagcagcaacacaaacaaaacaaacaagtgctggggtactgcctcctcctcatgctggcgggcatgggcctgcactacattgccttcaggaaggtgaagcagatgcaccttaacttcatggatgaaaaggatcggatcatcacagccttctacaacgaagcccgggcacgggccagggccaacagaggcatccttcagcaggagcgacaacggctagggcagcggcagccgccaccatccgagccaacccaaggccccgagatcgtgccccggggcgccggcccctgaggggctcacctggatggggcctgcagtgcgttcccgctttgcttccttccctggacggcccgctccccgaaacgcgcgcaataaagtgattcgcaga

SEQ ID NO: 293207 - DNA, 1487 bp, Homo sapiens
ccggggcggaagcagctccgtaagatatacctcgctgcagaggggagcaacagcggaacggagacacggtggccgggccgaaaacgtcacaaagccgcagagagcgggctctgtcccgcccgctccccaggtgggcgcccgcgcctgtccagcgagtccgcaggctgggggaccggaggcaccaaaggccaatagacatgtaggggcggggtctccaccgattttttttttttcctgacaggtggacgtggtcttggcatccacgccaatgagaatgtgagggcggggcctgaatagacgcaggaaatggcgacggccgcgggtctgtgagcagcgggggcggggcctggttgtggcccctccttctcccgtccccaagttccctgggtgggaacggggtcttggggtccctggctgggtggccagaccccgaagccagcgctgggaagggctgcggatgcccgggtcagaggaaggggcaggtccaaggacacgcgggtctggtcctgggcaagaaccgccccctctccgggcctgcttcagtcttcctttgcagaacaacgggccaggccccttccctctgcccccgggtgcttgaagtctagccccatcctggtccaatgcgctcttggtagcctcctttcccagctgcccgcccgccgccatgccgcccttactgcccctgcgcctgtgccggctgtggccccgcaaccctccctcccggctcctcggagcggccgccgggcagcggtccagacccagtacttattatgaactgttgggggtgcatcctggtgccagcactgaggaagttaaacgagctttcttctccaagtccaaagagctgcacccagaccgggaccctgggaacccaagcctgcacagccgctttgtggagctgagcgaggcataccgtgtgctcagccgtgagcagagccgccgcagctatgatgaccagctccgctcaggtagtcccccaaagtctccacgaaccacagtccatgacaagtctgcccaccaaacacacagctcctggacaccccccaacgcacagtactggtcccagtttcacagcgtgaggccacaggggccccagttgaggcagcagcaacacaaacaaaacaaacaagtgctggggtactgcctcctcctcatgctggcgggcatgggcctgcactacattgccttcaggaaggtgaagcagatgcaccttaacttcatggatgaaaaggatcggatcatcacagccttctacaacgaagcccgggcacgggccagggccaacagaggcatccttcagcaggagcgacaacggctagggcagcggcagccgccaccatccgagccaacccaaggccccgagatcgtgccccggggcgccggcccctgaggggctcacctggatggggcctgcagtgcgttcccgctttgcttccttccctggacggcccgctccccgaaacgcgcgcaataaagtgattcgcaga

SEQ ID NO: 293208 - DNA, 1124 bp, Homo sapiens
  misc_feature (32)..(32): n is a, c, g, or t
  misc_feature (67)..(67): n is a, c, g, or t
  misc_feature (74)..(74): n is a, c, g, or t
  misc_feature (109)..(109): n is a, c, g, or t
  misc_feature (118)..(118): n is a, c, g, or t
  misc_feature (204)..(204): n is a, c, g, or t
ttttctccgaatcactttattgcgcgcgtttnggggagcgggccgtccagggaaggaagcaaagcgngaacganctgcaggccccatccaggtgagcccctcagggcgngacgcccgnggcacgatctcggggccttgggttggctcggatggtggcggctgcgctgccctagccgttgtcgctcctgctgaaggatgcctctnttgccccttccctctgcccccgggtgcttgaagtctagccccatcctggtccaatgcgctcttggtagcctcctttcccagctgcccgcccgccgccatgccgcccttactgcccctgcgcctgtgccggctgtggccccgcaaccctccctcccggctcctcggagcggccgccgggcagcggtccagacccagtacttattatgaactgttgggggtgcatcctggtgccagcactgaggaagttaaacgagctttcttctccaagtccaaagagctgcacccagaccgggaccctgggaacccaagcctgcacagccgctttgtggagctgagcgaggcataccgtgtgctcagccgtgagcagagccgccgcagctatgatgaccagctccgctcaggtagtcccccaaagtctccacgaaccacagtccatgacaagtctgcccaccaaacacacagctcctggacaccccccaacgcacagtactggtcccagtttcacagcgtgaggccacaggggccccagttgaggcagcagcaacacaaacaaaacaaacaagtgctggggtactgcctcctcctcatgctggcgggcatgggcctgcactacattgccttcaggaaggtgaagcagatgcaccttaacttcatggatgaaaaggatcggatcatcacagccttctacaacgaagcccgggcacgggccagggccaacagaggcatccttcagcaggagcgacaacggctagggcagcggcagccgccaccatccgagccaacccaaggccccgagatcgtgccccggggcgccggcccctgaggggctcacctggatggggcctgcagtgcgttcccgctttgcttccttccctggacggcccgctccccgaaacgcgcgcaataaagtgattcgcaga

SEQ ID NO: 293209 - DNA, 1468 bp, Homo sapiens
ccggggcggaagcagctccgtaagatatacctcgctgcagaggggagcaacagcggaacggagacacggtggccgggccgaaaacgtcacaaagccgcagagagcgggctctgtcccgcccgctccccaggtggacgtggtcttggcatccacgccaatgagaatgtgagggcggggcctgaatagacgcaggaaatggcgacggccgcgggtctgtgagcagcgggggcggggcctggttgtggcccctccttctcccgtccccaagttccctgggtgggaacggggtcttggggtccctggctgggtggccagaccccgaagccagcgctgggaagggctgcggatgcccgggtcagaggaaggggcaggtccaaggacacgcgggtctggtcctgggcaagaaccgccccctctccgggcctgcttcagtcttcctttgcagaacaacgggccaggccccttccctctgcccccgggtgcttgaagtctagccccatcctggtccaatgcgctcttggtagcctcctttcccagctgcccgcccgccgccatgccgcccttactgcccctgcgcctgtgccggctgtggccccgcaaccctccctcccggctcctcggagcggccgccgggcagcggtccagacccagtacttattatgaactgttgggggtgcatcctggtgccagcactgaggaagttaaacgagctttcttctccaagtccaaagagctgcacccagaccgggaccctgggaacccaagcctgcacagccgctttgtggagctgagcgaggcataccgtgtgctcagccgtgagcagagccgccgcagctatgatgaccagctccgctcaggtagtcccccaaagtctccacgaaccacagtccatgacaagtctgcccaccaaacacacagctcctggacaccccccaacgcacagtactggtcccagtttcacagcgtgaggccacaggggccccagttgaggcagcagcaacacaaacaaaacaaacaagtgctggggtactgcctcctcctcatgctggcgggcatgggcctgcactacattgccttcaggaaggtgaagcagatgcaccttaacttcatggatgaaaaggatcggatcatcacagccttctacaacgaagcccgggcacgggccaggtctgtccctgctctattctgctccctgctccctgtccaggaaccacacttcgggatccctatcccaaccacccaggtgccctctcctccagggccaacagaggcatccttcagcaggagcgacaacggctagggcagcggcagccgccaccatccgagccaacccaaggccccgagatcgtgccccggggcgccggcccctgaggggctcacctggatggggcctgcagtgcgttcccgctttgcttccttccctggacggcccgctccccgaaacgcgcgcaataaagtgattcgcaga

SEQ ID NO: 293210 - DNA, 1841 bp, Homo sapiens
ccggggcggaagcagctccgtaagatatacctcgctgcagaggggagcaacagcggaacggagacacggtggccgggccgaaaacgtcacaaagccgcagagagcgggctctgtcccgcccgctccccaggtggacgtggtcttggcatccacgccaatgagaatgtgagggcggggcctgaatagacgcaggaaatggcgacggccgcgggtctgtgagcagcgggggcggggcctggttgtggcccctccttctcccgtccccaagttccctgggtgggaacggggtcttggggtccctggctgggtggccagaccccgaagccagcgctgggaagggctgcggatgcccgggtcagaggaaggggcaggtccaaggacacgcgggtctggtcctgggcaagaaccgccccctctccgggcctgcttcagtcttcctttgcagaacaacgggccaggccccttccctctgcccccgggtgcttgaagtctagccccatcctggtccaatgcgctcttggtagcctcctttcccagctgcccgcccgccgccatgccgcccttactgcccctgcgcctgtgccggctgtggccccgcaaccctccctcccggctcctcggagcggccgccgggcagcggtccagacccagtacttattatgaactgttgggggtgcatcctggtgccagcactgaggaagttaaacgagctttcttctccaagtccaaagaggtacccgtacccctgaggtggggagggggagcaggaactttgagccagtgggggtgtgcttcaaattcccaggagtagaccagcatctctggtgggtgccacattttttcagccctcatagggagtggcaggtgctcaatggtaggggaaaggctgtgggcaggagccaggggtcctgtctgatgggctgggcttggttttcttgacctgcctgcctgctcttgagaaacctggaccagggcatatggtgaatgcagggggctggcaggtggggagggcttgaacacaggaggaagcaggagtccatgctctctggccttctgaggagtgggcaggcctgagtgagggtcactgaccaggcagggcctctgggtatgactggagccctggtgggtggatgtcatcagcatgggtcctggggagggacaggcaaagggagataaggggagtcctgccccaccccagctgcacccagaccgggaccctgggaacccaagcctgcacagccgctttgtggagctgagcgaggcataccgtgtgctcagccgtgagcagagccgccgcagctatgatgaccagctccgctcaggtagtcccccaaagtctccacgaaccacagtccatgacaagtctgcccaccaaacacacagctcctggacaccccccaacgcacagtactggtcccagtttcacagcgtgaggccacaggggccccagttgaggcagcagcaacacaaacaaaacaaacaagtgctggggtactgcctcctcctcatgctggcgggcatgggcctgcactacattgccttcaggaaggtgaagcagatgcaccttaacttcatggatgaaaaggatcggatcatcacagccttctacaacgaagcccgggcacgggccagggccaacagaggcatccttcagcaggagcgacaacggctagggcagcggcagccgccaccatccgagccaacccaaggccccgagatcgtgccccggggcgccggcccctgaggggctcacctggatggggcctgcagtgcgttcccgctttgcttccttccctggacggcccgctccccgaaacgcgcgcaataaagtgattcgcaga

SEQ ID NO: 293211 - DNA, 1296 bp, Homo sapiens
ccggggcggaagcagctccgtaagatatacctcgctgcagaggggagcaacagcggaacggagacacggtggccgggccgaaaacgtcacaaagccgcagagagcgggctctgtcccgcccgctccccaggtggacgtggtcttggcatccacgccaatgagaatgtgagggcggggcctgaatagacgcaggaaatggcgacggccgcgggtctgtgagcagcgggggcggggcctggttgtggcccctccttctcccgtccccaagttccctgggtgggaacggggtcttggggtccctggctgggtggccagaccccgaagccagcgctgggaagggctgcggatgcccgggtcagaggaaggggcaggtccaaggacacgcgggtctggtcctgggcaagaaccgccccctctccgggcctgcttcagtcttcctttgcagaacaacgggccaggccccttccctctgcccccgggtgcttgaagtctagccccatcctggtccaatgcgctcttggtagcctcctttcccagctgcccgcccgccgccatgccgcccttactgcccctgcgcctgtgccggctgtggccccgcaaccctccctcccggctcctcggagcggccgccgggcagcggtccagacccagtacttattatgaactgttgggggtgcatcctggtgccagcactgaggaagttaaacgagctttcttctccaagtccaaagagccgtgagcagagccgccgcagctatgatgaccagctccgctcaggtagtcccccaaagtctccacgaaccacagtccatgacaagtctgcccaccaaacacacagctcctggacaccccccaacgcacagtactggtcccagtttcacagcgtgaggccacaggggccccagttgaggcagcagcaacacaaacaaaacaaacaagtgctggggtactgcctcctcctcatgctggcgggcatgggcctgcactacattgccttcaggaaggtgaagcagatgcaccttaacttcatggatgaaaaggatcggatcatcacagccttctacaacgaagcccgggcacgggccagggccaacagaggcatccttcagcaggagcgacaacggctagggcagcggcagccgccaccatccgagccaacccaaggccccgagatcgtgccccggggcgccggcccctgaggggctcacctggatggggcctgcagtgcgttcccgctttgcttccttccctggacggcccgctccccgaaacgcgcgcaataaagtgattcgcaga

SEQ ID NO: 293212 - DNA, 933 bp, Homo sapiens
gcggggggccggcccggttgttcaatgggtttctgtttgccctacgtgctgagttagttgtggtctctactccgtgtcaggaggctcccaggtttgtctcaggtaaccctcgccttccctgctgaggatcagagatagagaagacccccaaggtcatacaccgatttaagcggcagaggaggaagtttgagtccaggtccagacccagtacttattatgaactgttgggggtgcatcctggtgccagcactgaggaagttaaacgagctttcttctccaagtccaaagagctgcacccagaccgggaccctgggaacccaagcctgcacagccgctttgtggagctgagcgaggcataccgtgtgctcagccgtgagcagagccgccgcagctatgatgaccagctccgctcaggtagtcccccaaagtctccacgaaccacagtccatgacaagtctgcccaccaaacacacagctcctggacaccccccaacgcacagtactggtcccagtttcacagcgtgaggccacaggggccccagttgaggcagcagcaacacaaacaaaacaaacaagtgctggggtactgcctcctcctcatgctggcgggcatgggcctgcactacattgccttcaggaaggtgaagcagatgcaccttaacttcatggatgaaaaggatcggatcatcacagccttctacaacgaagcccgggcacgggccagggccaacagaggcatccttcagcaggagcgacaacggctagggcagcggcagccgccaccatccgagccaacccaaggccccgagatcgtgccccggggcgccggcccctgaggggctcacctggatggggcctgcagtgcgttcccgctttgcttccttccctggacggcccgctccccgaaacgcgcgcaataaagtgattcgcaga

SEQ ID NO: 293213 - DNA, 1317 bp, Homo sapiens
ccggggcggaagcagctccgtaagatatacctcgctgcagaggggagcaacagcggaacggagacacggtggccgggccgaaaacgtcacaaagccgcagagagcgggctctgtcccgcccgctccccaggtggacgtggtcttggcatccacgccaatgagaatgtgagggcggggcctgaatagacgcaggaaatggcgacggccgcgggtctgtgagcagcgggggcggggcctggttgtggcccctccttctcccgtccccaagttccctgggtgggaacggggtcttggggtccctggctgggtggccagaccccgaagccagcgctgggaagggctgcggatgcccgggtcagaggaaggggcaggtccaaggacacgcgggtctggtcctgggcaagaaccgccccctctccgggcctgcttcagtcttcctttgcagaacaacgggccaggccccttccctctgcccccgggtgcttgaagtctagccccatcctggtccaatgcgctcttggtagcctcctttcccagctgcccgcccgccgccatgccgcccttactgcccctgcgcctgtgccggctgtggccccgcaaccctccctcccggctcctcggagcggccgccgggcagcggtccagacccagtacttattatgaactgttgggggtgcatcctggtgccagcactgaggaagttaaacgagctttcttctccaagtccaaagagctgcacccagaccgggaccctgggaacccaagcctgcacagccgctttgtggagctgagcgaggcataccgtgtgctcagccgtgagcagagccgccgcagctatgatgaccagctccgctcaggtagtcccccaaagtctccacgaaccacagtccatgacaagtctgcccaccaaacacacagctcctggacaccccccaacgcacagtactggtcccagtttcacagcgtgaggccacaggggccccagttgaggcagcagcaacacaaacaaaacaaacaagtgctggggtactgcctcctcctcatgctggcgggcatgggcctgcactacattgccttcaggaaggtgaagcagatgcaccttaacttcatggatgaaaaggatcggatcatcacagccttctacaacgaagcccgggcacgggccaggcccaacacggtgcgttggcccaacacggtgcgttggcccaacacggtgcgttggcccaacacggtgcgttggcccaacacggtgcgttggcccaacacggtgcgttgagccaacacggtgcgttgagccaacatggtgcgtatgaccaa

SEQ ID NO: 293214 - DNA, 1261 bp, Homo sapiens
ccggggcggaagcagctccgtaagatatacctcgctgcagaggggagcaacagcggaacggagacacggtggccgggccgaaaacgtcacaaagccgcagagagcgggctctgtcccgcccgctccccaggtggacgtggtcttggcatccacgccaatgagaatgtgagggcggggcctgaatagacgcaggaaatggcgacggccgcgggtctgtgagcagcgggggcggggcctggttgtggcccctccttctcccgtccccaagttccctgggtgggaacggggtcttggggtccctggctgggtggccagaccccgaagccagcgctgggaagggctgcggatgcccgggtcagaggaaggggcaggtccaaggacacgcgggtctggtcctgggcaagaaccgccccctctccgggcctgcttcagtcttcctttgcagaacaacgggccaggccccttccctctgcccccgggtgcttgaagtctagccccatcctggtccaatgcgctcttggtagcctcctttcccagctgcccgcccgccgccatgccgcccttactgcccctgcgcctgtgccggctgtggccccgcaaccctccctcccggctcctcggagcggccgccgggcagcggtccagacccagtacttattatgaactgttgggggtgcatcctggtgccagcactgaggaagttaaacgagctttcttctccaagtccaaagagctgcacccagaccgggaccctgggaacccaagcctgcacagccgctttgtggagctgagcgaggcataccgtgtgctcagccgtgagcagagccgccgcagctatgatgaccagctccgctcaggtagtcccccaaagtctccacgaaccacagtccatgacaagtctgcccaccaaacacacagctcctggacaccccccaacgcacagtactggtcccagtttcacagcgtgaggccacaggggccccagttgaggcagcagcaacacaaacaaaacaaacaagtgctggggtactgcctcctcctcatgctggcgggcatgggcctgcactacattgccttcaggtgatgcctgttctccccggggtgatgggcagagggcaggagggtgggtgaattccagtgtggtcagccagtcctccacagcacctcgtggcccgtactcttgtgtctctcaagctaagagctgcttgaagttggtctctggagcctctccttacttattaaaggcagcgctgcaccaaga

SEQ ID NO: 293215 - DNA, 1281 bp, Homo sapiens
ccggggcggaagcagctccgtaagatatacctcgctgcagaggggagcaacagcggaacggagacacggtggccgggccgaaaacgtcacaaagccgcagagagcgggctctgtcccgcccgctccccaggtggacgtggtcttggcatccacgccaatgagaatgtgagggcggggcctgaatagacgcaggaaatggcgacggccgcgggtctgtgagcagcgggggcggggcctggttgtggcccctccttctcccgtccccaagttccctgggtgggaacggggtcttggggtccctggctgggtggccagaccccgaagccagcgctgggaagggctgcggatgcccgggtcagaggaaggggcaggtccaaggacacgcgggtctggtcctgggcaagaaccgccccctctccgggcctgcttcagtcttcctttgcagaacaacgggccaggccccttccctctgcccccgggtgcttgaagtctagccccatcctggtccaatgcgctcttggtagcctcctttcccagctgcccgcccgccgccatgccgcccttactgcccctgcgcctgtgccggctgtggccccgcaaccctccctcccggctcctcggagcggccgccgggcagcggtccagacccagtacttattatgaactgttgggggtgcatcctggtgccagcactgaggaagttaaacgagctttcttctccaagtccaaagagctgcacccagaccgggaccctgggaacccaagcctgcacagccgctttgtggagctgagcgaggcataccgtgtgctcagccgtgagcagagccgccgcagctatgatgaccagctccgctcaggtagtcccccaaagtctccacgaaccacagtccatgacaagtctgcccaccaaacacacagctcctggacaccccccaacgcacagtactggtcccagtttcacagcgtgaggccacaggggccccagttgaggcagcagcaacacaaacaaaacaaacaagtgctggggtactgcctcctcctcatgctggcgggcatgggcctgcactacattgccttcaggtgatgcctgttctccccggggtgatgggcagagggcaggagggtgggtgaattccagtgtggtcagccagtcctccacagcacctcgtggcccgtactcttgtgtctctcaagctaagagctgcttgaagttggtctctggagcctctccttacttattaaaggcagcgctgcaccaagaaaaaaaaaaaaaagtcgacg

SEQ ID NO: 293216 - DNA, 1322 bp, Homo sapiens
ccggggcggaagcagctccgtaagatatacctcgctgcagaggggagcaacagcggaacggagacacggtggccgggccgaaaacgtcacaaagccgcagagagcgggctctgtcccgcccgctccccaggtggacgtggtcttggcatccacgccaatgagaatgtgagggcggggcctgaatagacgcaggaaatggcgacggccgcgggtctgtgagcagcgggggcggggcctggttgtggcccctccttctcccgtccccaagttccctgggtgggaacggggtcttggggtccctggctgggtggccagaccccgaagccagcgctgggaagggctgcggatgcccgggtcagaggaaggggcaggtccaaggacacgcgggtctggtcctgggcaagaaccgccccctctccgggcctgcttcagtcttcctttgcagaacaacgggccaggccccttccctctgcccccgggtgcttgaagtctagccccatcctggtccaatgcgctcttggtagcctcctttcccagctgcccgcccgccgccatgccgcccttactgcccctgcgcctgtgccggctgtggccccgcaaccctccctcccggctcctcggagcggccgccgggcagcggtccagacccagtacttattatgaactgttgggggtgcatcctggtgccagcactgaggaagttaaacgagctttcttctccaagtccaaagagctgcacccagaccgggaccctgggaacccaagcctgcacagccgctttgtggagctgagcgaggcataccgtgtgctcagccgtgagcagagccgccgcagctatgatgaccagctccgctcaggtagtcccccaaagtctccacgaaccacagtccatgacaagtctgcccaccaaacacacagacaggggccccagttgaggcagcagcaacacaaacaaaacaaacaagtgctggggtactgcctcctcctcatgctggcgggcatgggcctgcactacattgccttcaggaaggtgaagcagatgcaccttaacttcatggatgaaaaggatcggatcatcacagccttctacaacgaagcccgggcacgggccagggccaacagaggcatccttcagcaggagcgacaacggctagggcagcggcagccgccaccatccgagccaacccaaggccccgagatcgtgccccggggcgccggcccctgaggggctcacctggatggggcctgcagtgcgttcccgctttgcttccttccctggacggcccgctccccgaaacgcgcgcaataaagtgattcgcaga

SEQ ID NO: 293217 - DNA, 1282 bp, Homo sapiens
ccggggcggaagcagctccgtaagatatacctcgctgcagaggggagcaacagcggaacggagacacggtggccgggccgaaaacgtcacaaagccgcagagagcgggctctgtcccgcccgctccccaggtggacgtggtcttggcatccacgccaatgagaatgtgagggcggggcctgaatagacgcaggaaatggcgacggccgcgggtctgtgagcagcgggggcggggcctggttgtggcccctccttctcccgtccccaagttccctgggtgggaacggggtcttggggtccctggctgggtggccagaccccgaagccagcgctgggaagggctgcggatgcccgggtcagaggaaggggcaggtccaaggacacgcgggtctggtcctgggcaagaaccgccccctctccgggcctgcttcagtcttcctttgcagaacaacgggccaggccccttccctctgcccccgggtgcttgaagtctagccccatcctggtccaatgcgctcttggtagcctcctttcccagctgcccgcccgccgccatgccgcccttactgcccctgcgcctgtgccggctgtggccccgcaaccctccctcccggctcctcggagcggccgccgggcagcggtccagacccagtacttattatgaactgttgggggtgcatcctggtgccagcactgaggaagttaaacgagctttcttctccaagtccaaagagctgcacccagaccgggaccctgggaacccaagcctgcacagccgctttgtggagctgagcgaggcataccgtgtgctcagccgtgagcagagccgccgcagctatgatgaccagctccgctcaggtagtcccccaaagtctccacacaggggccccagttgaggcagcagcaacacaaacaaaacaaacaagtgctggggtactgcctcctcctcatgctggcgggcatgggcctgcactacattgccttcaggaaggtgaagcagatgcaccttaacttcatggatgaaaaggatcggatcatcacagccttctacaacgaagcccgggcacgggccagggccaacagaggcatccttcagcaggagcgacaacggctagggcagcggcagccgccaccatccgagccaacccaaggccccgagatcgtgccccggggcgccggcccctgaggggctcacctggatggggcctgcagtgcgttcccgctttgcttccttccctggacggcccgctccccgaaacgcgcgcaataaagtgattcgcaga

SEQ ID NO: 293218 - DNA, 1179 bp, Homo sapiens
ccggggcggaagcagctccgtaagatatacctcgctgcagaggggagcaacagcggaacggagacacggtggccgggccgaaaacgtcacaaagccgcagagagcgggctctgtcccgcccgctccccaggtggacgtggtcttggcatccacgccaatgagaatgtgagggcggggcctgaatagacgcaggaaatggcgacggccgcgggtctgtgagcagcgggggcggggcctggttgtggcccctccttctcccgtccccaagttccctgggtgggaacggggtcttggggtccctggctgggtggccagaccccgaagccagcgctgggaagggctgcggatgcccgggtcagaggaaggggcaggtccaaggacacgcgggtctggtcctgggcaagaaccgccccctctccgggcctgcttcagtcttcctttgcagaacaacgggccaggccccttccctctgcccccgggtgcttgaagtctagccccatcctggtccaatgcgctcttggtagcctcctttcccagctgcccgcccgccgccatgccgcccttactgcccctgcgcctgtgccggctgtggccccgcaaccctccctcccggctcctcggagcggccgccgggcagcggtccagacccagtacttattatgaactgttgggggtgcatcctggtgccagcactgaggaagttaaacgagctttcttctccaagtccaaagagctgcacccagaccgggaccctgggaacccaagcctgcacagcacaggggccccagttgaggcagcagcaacacaaacaaaacaaacaagtgctggggtactgcctcctcctcatgctggcgggcatgggcctgcactacattgccttcaggaaggtgaagcagatgcaccttaacttcatggatgaaaaggatcggatcatcacagccttctacaacgaagcccgggcacgggccagggccaacagaggcatccttcagcaggagcgacaacggctagggcagcggcagccgccaccatccgagccaacccaaggccccgagatcgtgccccggggcgccggcccctgaggggctcacctggatggggcctgcagtgcgttcccgctttgcttccttccctggacggcccgctccccgaaacgcgcgcaataaagtgattcgcaga

SEQ ID NO: 293219 - DNA, 1121 bp, Homo sapiens
ccggggcggaagcagctccgtaagatatacctcgctgcagaggggagcaacagcggaacggagacacggtggccgggccgaaaacgtcacaaagccgcagagagcgggctctgtcccgcccgctccccaggtggacgtggtcttggcatccacgccaatgagaatgtgagggcggggcctgaatagacgcaggaaatggcgacggccgcgggtctgtgagcagcgggggcggggcctggttgtggcccctccttctcccgtccccaagttccctgggtgggaacggggtcttggggtccctggctgggtggccagaccccgaagccagcgctgggaagggctgcggatgcccgggtcagaggaaggggcaggtccaaggacacgcgggtctggtcctgggcaagaaccgccccctctccgggcctgcttcagtcttcctttgcagaacaacgggccaggccccttccctctgcccccgggtgcttgaagtctagccccatcctggtccaatgcgctcttggtagcctcctttcccagctgcccgcccgccgccatgccgcccttactgcccctgcgcctgtgccggctgtggccccgcaaccctccctcccggctcctcggagcggccgccgggcagcggtccagacccagtacttattatgaactgttgggggtgcatcctggtgccagcactgaggaagttaaacgagctttcttctccaagtccaaagaggaaggtgaagcagatgcaccttaacttcatggatgaaaaggatcggatcatcacagccttctacaacgaagcccgggcacgggccaggtctgtccctgctctattctgctccctgctccctgtccaggaaccacacttcgggatccctatcccaaccacccaggtgccctctcctccagggccaacagaggcatccttcagcaggagcgacaacggctagggcagcggcagccgccaccatccgagccaacccaaggccccgagatcgtgccccggggcgccggcccctgaggggctcacctggatggggcctgcagtgcgttcccgctttgcttccttccctggacggcccgctccccgaaacgcgcgcaataaagtgattcgcaga

SEQ ID NO: 293220 - DNA, 1193 bp, Homo sapiens
ccggggcggaagcagctccgtaagatatacctcgctgcagaggggagcaacagcggaacggagacacggtggccgggccgaaaacgtcacaaagccgcagagagcgggctctgtcccgcccgctccccaggtggacgtggtcttggcatccacgccaatgagaatgtgagggcggggcctgaatagacgcaggaaatggcgacggccgcgggtctgtgagcagcgggggcggggcctggttgtggcccctccttctcccgtccccaagttccctgggtgggaacggggtcttggggtccctggctgggtggccagaccccgaagccagcgctgggaagggctgcggatgcccgggtcagaggaaggggcaggtccaaggacacgcgggtctggtcctgggcaagaaccgccccctctccgggcctgcttcagtcttcctttgcagaacaacgggccaggccccttccctctgcccccgggtgcttgaagtctagccccatcctggtccaatgcgctcttggtagcctcctttcccagctgcccgcccgccgccatgccgcccttactgcccctgcgcctgtgccggctgtggccccgcaaccctccctcccggctcctcggagcggccgccgggcagcggtccagacccagtacttattatgaactgttgggggtgcatcctggtgccagcactgaggaagttaaacgagctttcttctccaagtccaaagagcaggcaaagggagataaggggagtcctgccccaccccagctgcacccagaccgggaccctgggaacccaagcctgcacagccaacacaaacaaaacaaacaagtgctggggtactgcctcctcctcatgctggcgggcatgggcctgcactacattgccttcaggaaggtgaagcagatgcaccttaacttcatggatgaaaaggatcggatcatcacagccttctacaacgaagcccgggcacgggccagggccaacagaggcatccttcagcaggagcgacaacggctagggcagcggcagccgccaccatccgagccaacccaaggccccgagatcgtgccccggggcgccggcccctgaggggctcacctggatggggcctgcagtgcgttcccgctttgcttccttccctggacggcccgctccccgaaacgcgcgcaataaagtgattcgcaga

SEQ ID NO: 293221 - DNA, 935 bp, Homo sapiens
ccggggcggaagcagctccgtaagatatacctcgctgcagaggggagcaacagcggaacggagacacggtggccgggccgaaaacgtcacaaagccgcagagagcgggctctgtcccgcccgctccccaggtggacgtggtcttggcatccacgccaatgagaatgtgagggcggggcctgaatagacgcaggaaatggcgacggccgcgggtctgtgagcagcgggggcggggcctggttgtggcccctccttctcccgtccccaagttccctgggtgggaacggggtcttggggtccctggctgggtggccagaccccgaagccagcgctgggaagggctgcggatgcccgggtcagaggaaggggcaggtccaaggacacgcgggtctggtcctgggcaagaaccgccccctctccgggcctgcttcagtcttcctttgcagaacaacgggccaggccccttccctctgcccccgggtgcttgaagtctagccccatcctggtccaatgcgctcttggtagcctcctttcccagctgcccgcccgccgccatgccgcccttactgcccctgcgcctgtgccggctgtggccccgcaaccctccctcccggctcctcggagcggccgccgggcagcggaaggtgaagcagatgcaccttaacttcatggatgaaaaggatcggatcatcacagccttctacaacgaagcccgggcacgggccagggccaacagaggcatccttcagcaggagcgacaacggctagggcagcggcagccgccaccatccgagccaacccaaggccccgagatcgtgccccggggcgccggcccctgaggggctcacctggatggggcctgcagtgcgttcccgctttgcttccttccctggacggcccgctccccgaaacgcgcgcaataaagtgattcgcaga

SEQ ID NO: 293222 - DNA, 1300 bp, Homo sapiens
ccggggcggaagcagctccgtaagatatacctcgctgcagaggggagcaacagcggaacggagacacggtggccgggccgaaaacgtcacaaagccgcagagagcgggctctgtcccgcccgctccccaggtggacgtggtcttggcatccacgccaatgagaatgtgagggcggggcctgaatagacgcaggaaatggcgacggccgcgggtctgtgagcagcgggggcggggcctggttgtggcccctccttctcccgtccccaagttccctgggtgggaacggggtcttggggtccctggctgggtggccagaccccgaagccagcgctgggaagggctgcggatgcccgggtcagaggaaggggcaggtccaaggacacgcgggtctggtcctgggcaagaaccgccccctctccgggcctgcttcagtcttcctttgcagaacaacgggccaggccccttccctctgcccccgggtgcttgaagtctagccccatcctggtccaatgcgctcttggtagcctcctttcccagctgcccgcccgccgccatgccgcccttactgcccctgcgcctgtgccggctgtggccccgcaaccctccctcccggctcctcggagcggccgccgggcagcggtccagacccagtacttattatgaactgttgggggtgcatcctggtgccagcactgaggaagttaaacgagctttcttctccaagtccaaagagcaggcaaagggagataaggggagtcctgccccaccccagctgcacccagaccgggaccctgggaacccaagcctgcacagccgctttgtggagctgagcgaggcataccgtgtgctcagccgtgagcagagccgccgcagctatgatgaccagctccgctcaggtagtcccccaaagtctccacgaaccacagtccatgacaagtctgcccaccaaacacacagctcctggacaccccccaacgcacagtactggtcccagtttcacagcgtgaggccacaggggccccagttgaggcagcagcaacacaaacaaaacaaacaagtgctggggtactgcctcctcctcatgctggcgggcatgggcctgcactacattgccttcaggtgatgcctgttctccccggggtgatgggcagagggcaggagggtgggtgaattccagtgtggtcagccagtcctccacagcacctcgtggcccgtactcttgtgtctctcaagctaagagctgcttgaagttggtctctggagcctctccttacttattaaaggcagcgctgcaccaaga

SEQ ID NO: 293223 - DNA, 1320 bp, Homo sapiens
ccggggcggaagcagctccgtaagatatacctcgctgcagaggggagcaacagcggaacggagacacggtggccgggccgaaaacgtcacaaagccgcagagagcgggctctgtcccgcccgctccccaggtggacgtggtcttggcatccacgccaatgagaatgtgagggcggggcctgaatagacgcaggaaatggcgacggccgcgggtctgtgagcagcgggggcggggcctggttgtggcccctccttctcccgtccccaagttccctgggtgggaacggggtcttggggtccctggctgggtggccagaccccgaagccagcgctgggaagggctgcggatgcccgggtcagaggaaggggcaggtccaaggacacgcgggtctggtcctgggcaagaaccgccccctctccgggcctgcttcagtcttcctttgcagaacaacgggccaggccccttccctctgcccccgggtgcttgaagtctagccccatcctggtccaatgcgctcttggtagcctcctttcccagctgcccgcccgccgccatgccgcccttactgcccctgcgcctgtgccggctgtggccccgcaaccctccctcccggctcctcggagcggccgccgggcagcggtccagacccagtacttattatgaactgttgggggtgcatcctggtgccagcactgaggaagttaaacgagctttcttctccaagtccaaagagcaggcaaagggagataaggggagtcctgccccaccccagctgcacccagaccgggaccctgggaacccaagcctgcacagccgctttgtggagctgagcgaggcataccgtgtgctcagccgtgagcagagccgccgcagctatgatgaccagctccgctcaggtagtcccccaaagtctccacgaaccacagtccatgacaagtctgcccaccaaacacacagctcctggacaccccccaacgcacagtactggtcccagtttcacagcgtgaggccacaggggccccagttgaggcagcagcaacacaaacaaaacaaacaagtgctggggtactgcctcctcctcatgctggcgggcatgggcctgcactacattgccttcaggtgatgcctgttctccccggggtgatgggcagagggcaggagggtgggtgaattccagtgtggtcagccagtcctccacagcacctcgtggcccgtactcttgtgtctctcaagctaagagctgcttgaagttggtctctggagcctctccttacttattaaaggcagcgctgcaccaagaaaaaaaaaaaaaagtcgacg

SEQ ID NO: 293224 - DNA, 648 bp, Homo sapiens
ccggggcggaagcagctccgtaagatatacctcgctgcagaggggagcaacagcggaacggagacacggtggccgggccgaaaacgtcacaaagccgcagagagcgggctctgtcccgcccgctccccaggtggacgtggtcttggcatccacgccaatgagaatgtgagggcggggcctgaatagacgcaggaaatggcgacggccgcgggtctgtgagcagcgggggcggggcctggttgtggcccctccttctcccgtccccaagttccctgggtgggaacggggtcttggggtccctggctgggtggccagaccccgaagccagcgctgggaagggctgcggatgcccgggtcagaggaaggggcaggtccaaggacacgcgggtctggtcctgggcaagaaccgccccctctccgggcctgcttcagtcttcctttgcagaacaacgggccaggccccttccctctgcccccgggtgcttgaagtctagccccatcctggtccaatgcgctcttggtagcctcctttcccagctgcccgcccgccgccatgccgcccttactgcccctgcgcctgtgccggctgtggccccgcaaccctccctccccgctccccgaaacgcgcgcaataaagtgattcgcaga

SEQ ID NO: 293225 - DNA, 1431 bp, Homo sapiens
  misc_feature (820)..(820): n is a, c, g, or t
ccggggcggaagcagctccgtaagatatacctcgctgcagaggggagcaacagcggaacggagacacggtggccgggccgaaaacgtcacaaagccgcagagagcgggctctgtcccgcccgctccccaggtgggcgcccgcgcctgtccagcgagtccgcaggctgggggaccggaggcaccaaaggccaatagacatgtaggggcggggtctccaccgattttttttttttcctgacaggtggacgtggtcttggcatccacgccaatgagaatgtgagggcggggcctgaatagacgcaggaaatggcgacggccgcgggtctgtgagcagcgggggcggggcctggttgtggcccctccttctcccgtccccaagttccctgggtgggaacggggtcttggggtccctggctgggtggccagaccccgaagccagcgctgggaagggctgcggatgcccgggtcagaggaaggggcaggtccaaggacacgcgggtctggtcctgggcaagaaccgccccctcgacgaccatagccaggagcgagacatgccaggactgagacaacggagcctaatgcgccgatacccacaggcccccaagagatcaaaatatatactcgcagagccaaatgctaataacacggctaaatgatcgcaccaagactcgcaacaaggccaccgcttgcatcataccaggcgcgagacaatctgcgcatcttccattatgccatgtataagtgcccttcattgtgctgccctacgccggtcaccagttaggctggtctaccggattatgggatgccaaatcctggaacnatatagatatgaggtaatattaatgatatcaggccttatgggagccgaacactgggaatagagtatgaagcctgagcgaagacatctgcaaagcgcattggacggcaggggagcgctggagccaagaatgcctggtaaaccgcatgtcggcggcacaagccagcttgagataatcgttatgcaggggcaaatcagagaaatggcattcccatatatcaaaatggcaccattaacgaatgaagatatcctgtccatttttgcaaattgaatattccctgaattggatcttccacatgaccgattaattcaggggactgaaaacaagtgcccatttcaattcacacttttcacccattttgctcgcgcttgcgtaaacatctttcgatagactaaaagaccgctatttggactgcgtttcaaagttgtttccactttgagtggcgcccctattaaatatatttcaaacaaggcatttactaaagctggtagattggttgggtttattgggaaaaacggatctggtgacggatcataactggttctgagcgagaggccggtttccaacattatccgacttggaaaggagatggcctaattccttctaattggag

SEQ ID NO: 293226 - DNA, 394 bp, Homo sapiens
gggttctgaaccaggagacagaagagaaatgaatggatgtctgcatcgcttcagagaaaggactgtgatagaagaatacaaatcagtggaagcagccaatgaagttgaggatcagtgtggattccatgcctgtttatttgccccagtcaaaatacagttttgatttcatttccccctaaaatggaattaaaacgtcacaagcaagtgagcatcaaagtatctccagtcctcgcagccagagccctatgctgaaaactcacctccagctgtccttcttcagtgcaggcatgcagtttaaagtgcgtgatgctgatggctgtgataacgtgccccttcctcctggagtcacaggcacagtggggaaagatgatttcattgtagccctcacaagtcc

SEQ ID NO: 293227 - DNA, 399 bp, Homo sapiens
gcgtggcctgccaccatcttgggagctctaagaacaaagacccgcccataacaccctctctactaaaagtaaaaaattagccagccctggtggcaggaacctgtaatccagctactggggaggctgaggcaggagaattgcttgaacccgggaggcggaagttgcagtgagctgagatcacgccactgcactccagcctgggtgacagaacacaactctatctaaaaaacaaaaaccctgaggcaaaattaatagacaaagtctcactctgctgctcaggctggagtgcaacagcgtgatcgtagctcaagtccaccaggattataggcatgagccattgcacctggcctgcccttggaattctgatgaataaagtgctcgtcaataaaacttttcttt

SEQ ID NO: 293228 - DNA, 1743 bp, Homo sapiens
gcggccgcctccccccgggactgaagggagggaattcctgtgggtcccaggagtgccaagagtgcgcagcaagacgggaaattgcaaaagacctcacccctctgccctcccccgcggttttccagtaactcccgcccctccgcgcttgccccgcagctgattcatagccccggcccgggccgcctctgcacgtccgccccggagcccgcacccgcgccccacgcgccgccgaggactcggcccggctcgtggagcccttcgcccgcggcaaaaccagaactgatggctctatttgcagtctttcagacaacattcttcttaacattgctgtccttgaggacttaccagagtgaagtcttggctgaacgtttaccattgactcctgtatcacttaaagtttccaccaattctacgcgtcagagtttgcacttacaatggactgtccacaaccttccttatcatcaggaattgaaaatggtatttcagatccagatcagtaggattgaaacatccaatgtcatctgggtggggaattacagcaccactgtgaagtggaaccaggttctgcattggagctgggaatctgagctccctttggaatgtgccacacactttgtaagaataaagagtttggtggacgatgccaagttccctgagccaaatttctggagcaactggagttcctgggaggaagtcagtgtacaagattctactggacaggatatattgttcgttttccctaaagataagctggtggaagaaggcaccaatgttaccatttgttacgtttctaggaacattcaaaataatgtatcctgttatttggaagggaaacagattcatggagaacaacttgatccacatgtaactgcattcaacttgaatagtgtgcctttcattaggaataaagggacaaatatctattgtgaggcaagtcaaggaaatgtcagtgaaggcatgaaaggcatcgttctttttgtctcaaaagtacttgaggagcccaaggacttttcttgtgaaaccgaggacttcaagactttgcactgtacttgggatcctgggacggacactgccttggggtggtctaaacaaccttcccaaagctacactttatttgaatcattttctggggaaaagaaactttgtacacacaaaaactggtgtaattggcaaataactcaagactcacaagaaacctataacttcacactcatagctgaaaattacttaaggaagagaagtgtcaatatcctttttaacctgactcatcgaggtgagactagagttgtcacagcccaccgtggccactaacgtgtctttgtttcacagactgtgtgatcaagtaaatgtgctgtagatctttgcctcattcacagcggaggtgagagttagaatttatacctattgttcatgccacgtttctcctcatggatgcacgcatcccctattatttgtttcttttaataatgtcacgagcaccaatgagcttactacccaacttcaaaactaggactctaacaataacttctgtcatatctcatcctgtaacgcccccaccttcgctccttccgccaagataattatcactttaaattgtgtgcgtgtgtattctcatttcttatgtgatggtaaaaatgcctttattttgtttggttttaatgcatagaaaggacatcaagctgtatgtaataattcagtaattatgtttatataatattaaattgctaatatttgcccatattg

SEQ ID NO: 293229 - DNA, 755 bp, Homo sapiens
tggatggatcaatgccattatggggaacatagtttgacagtcactgagtatgccctgagggataagggatacatttgctttgacaaaagtaaaaacctcgtaatggttgtgttattttgttttgtttttaaagattttctggggaaaagaaactttgtacacacaaaaactggtgtaattggcaaataactcaagactcacaagaaacctataacttcacactcatagctgaaaattacttaaggaagagaagtgtcaatatcctttttaacctgactcatcgaggtgagactagagttgtcacagcccaccgtggccactaacgtgtctttgtttcacagactgtgtgatcaagtaaatgtgctgtagatctttgcctcattcacagcggaggtgagagttagaatttatacctattgttcatgccacgtttctcctcatggatgcacgcatcccctattatttgtttcttttaataatgtcacgagcaccaatgagcttactacccaacttcaaaactaggactctaacaataacttctgtcatatctcatcctgtaacgcccccaccttcgctccttccgccaagataattatcactttaaattgtgtgcgtgtgtattctcatttcttatgtgatggtaaaaatgcctttattttgtttggttttaatgcatagaaaggacatcaagctgtatgtaataattcagtaattatgtttatataatattaaattgctaatatttgcccatattg

SEQ ID NO: 293230 - DNA, 848 bp, Homo sapiens
ctgggacactgacacccataccactggcatcttagttccgattgctgacgaagtgccttgtacctggggcgttgtcctggttctggttttttcttctgccactggcattcagcgtgctatactctcactcctttgatagaggtccacctcaggttagtttatctcatgtatctcttgtattcccttcgatggggtcagggatgaagagataagatcttcctccagggacattgatcgttcatggtcctttgaccaatcctggcccaacttggtgacgggcatccactccgttatcctcggccttgcctccgcgagctcctgcggccttcggccccggccccgtccatcgtgcctggtcctgatccccggtcctcggattgccatcttgccttaactctcctgcggaagccactcgcggttccccatcccagggccatccagggcccccgggccccctccgctgcaccggtgcgtcatccggtccatttgctgggatatagctgacaagaaggaactagtcagtgtggcctactgcatctggcagcctcccgcgagacccagacaagggctcccgcccaggagcgcggactcgggagcactagacccgacccgatgtccgcggattcccgccgcccacgcagaggcccgctgcatgcgaccaacaggactcacgtgttttgggatatttttcatttgaaacttgttcataaaaatgtcaatgacattgatgactgatttgtacatatttttcatatagttttgtttaaaaaataattcacgcaaaatcttgaagtcatttttgctattgaaataaaccttaattaaaatatttcatcatcaaattgtgt

SEQ ID NO: 293231 - DNA, 242 bp, Homo sapiens
gaggaaggttttatccaagaagagagtaagagaaaagtctggaaagagatttagtaagatagaaatgacattgaataatatgaaacaacgtataaaaaaggaaaagaacaaaggaggctggggtgagagtatgtaatttatttcacaattttgttttccaagtggctatatgaggaaactaatcaccatttaaaatagaccacaaaattttttcaacagcaatagctaatatttatatctct

SEQ ID NO: 293232 - DNA, 5688 bp, Homo sapiens
gcggccgcctccccccgggactgaagggagggaattcctgtgggtcccaggagtgccaagagtgcgcagcaagacgggaaattgcaaaagacctcacccctctgccctcccccgcggttttccagtaactcccgcccctccgcgcttgccccgcagctgattcatagccccggcccgggccgcctctgcacgtccgccccggagcccgcacccgcgccccacgcgccgccgaggactcggcccggctcgtggagcccttcgcccgcggcgtgagtacccccgacccgcccgtccccgctctgctcgcgccctgccgctgcgccgccctcggtggcttttccgacgggcgagccccgtgctgtgcgggaaagaatccgacaacttcgcagcccatcccggctggacgcgaccgggagtgcagcagcccgttcccctcctcggtgccgcctctgcccagcgtttgcttggctgggctaccacctgcgctcggacggcgctcggagggtcctcgcccccggcctgcctacctgaaaaccagaactgatggctctatttgcagtctttcagacaacattcttcttaacattgctgtccttgaggacttaccagagtgaagtcttggctgaacgtttaccattgactcctgtatcacttaaagtttccaccaattctacgcgtcagagtttgcacttacaatggactgtccacaaccttccttatcatcaggaattgaaaatggtatttcagatccagatcagtaggattgaaacatccaatgtcatctgggtggggaattacagcaccactgtgaagtggaaccaggttctgcattggagctgggaatctgagctccctttggaatgtgccacacactttgtaagaataaagagtttggtggacgatgccaagttccctgagccaaatttctggagcaactggagttcctgggaggaagtcagtgtacaagattctactggacaggatatattgttcgttttccctaaagataagctggtggaagaaggcaccaatgttaccatttgttacgtttctaggaacattcaaaataatgtatcctgttatttggaagggaaacagattcatggagaacaacttgatccacatgtaactgcattcaacttgaatagtgtgcctttcattaggaataaagggacaaatatctattgtgaggcaagtcaaggaaatgtcagtgaaggcatgaaaggcatcgttctttttgtctcaaaagtacttgaggagcccaaggacttttcttgtgaaaccgaggacttcaagactttgcactgtacttgggatcctgggacggacactgccttggggtggtctaaacaaccttcccaaagctacactttatttgaatcattttctggggaaaagaaactttgtacacacaaaaactggtgtaattggcaaataactcaagactcacaagaaacctataacttcacactcatagctgaaaattacttaaggaagagaagtgtcaatatcctttttaacctgactcatcgagtttatttaatgaatccttttagtgtcaactttgaaaatgtaaatgccacaaatgccatcatgacctggaaggtgcactccataaggaataatttcacatatttgtgtcagattgaactccatggtgaaggaaaaatgatgcaatacaatgtttccatcaaggtgaacggtgagtacttcttaagtgaactggaacctgccacagagtacatggcgcgagtacggtgtgctgatgccagccacttctggaaatggagtgaatggagtggtcagaacttcaccacacttgaagctgctccctcagaggcccctgatgtctggagaattgtgagcttggagccaggaaatcatactgtgaccttattctggaagccattatcaaaactgcatgccaatggaaagatcctgttctataatgtagttgtagaaaacctagacaaaccatccagttcagagctccattccattccagcaccagccaacagcacaaaactaatccttgacaggtgttcctaccaaatctgcgtcatagccaacaacagtgtgggtgcttctcctgcttctgtaatagtcatctctgcagaccccgaaaacaaagaggttgaggaagaaagaattgcaggcacagagggtggattctctctgtcttggaaaccccaacctggagatgttataggctatgttgtggactggtgtgaccatacccaggatgtgctcggtgatttccagtggaagaatgtaggtcccaataccacaagcacagtcattagcacagatgcttttaggccaggagttcgatatgacttcagaatttatgggttatctacaaaaaggattgcttgtttattagagaaaaaaacaggatactctcaggaacttgctccttcagacaaccctcacgtgctggtggatacattgacatcccactccttcactctgagttggaaagattactctactgaatctcaacctggttttatacaagggtaccatgtctatctgaaatccaaggcgaggcagtgccacccacgatttgaaaaggcagttctttcagatggttcagaatgttgcaaatacaaaattgacaacccggaagaaaaggcattgattgtggacaacctaaagccagaatccttctatgagtttttcatcactccattcactagtgctggtgaaggccccagtgctacgttcacgaaggtcacgactccggatgaacactcctcgatgctgattcatatcctactgcccatggttttctgcgtcttgctcatcatggtcatgtgctacttgaaaagtcagtggatcaaggagacctgttatcctgacatccctgacccttacaagagcagcatcctgtcattaataaaattcaaggagaaccctcacctaataataatgaatgtcagtgactgtatcccagatgctattgaagttgtaagcaagccagaagggacaaagatacagttcctaggcactaggaagtcactcacagaaaccgagttgactaagcctaactacctttatctccttccaacagaaaagaatcactctggccctggcccctgcatctgttttgagaacttgacctataaccaggcagcttctgactctggctcttgtggccatgttccagtatccccaaaagccccaagtatgctgggactaatgacctcacctgaaaatgtactaaaggcactagaaaaaaactacatgaactccctgggagaaatcccagctggagaaacaagtttgaattatgtgtcccagttggcttcacccatgtttggagacaaggacagtctcccaacaaacccagtagaggcaccacactgttcagagtataaaatgcaaatggcagtctccctgcgtcttgccttgcctcccccgaccgagaatagcagcctctcctcaattacccttttagatccaggtgaacactactgctaaccagcatgccgatttcataccttatgctacacagacattaagaagagcagagctggcaccctgtcatcaccagtggccttggtccttaatcccagtacgatttgcaggtctggtttatataagaccactacagtctggctaggttaaaggccagaggctatggaacttaacactccccattggagcaagcttgccctagagacggcaggatcatgggagcatgcttaccttctgctgtttgttccaggctcacctttagaacaggagacttgagcttgacctaaggatatgcattaaccactctacagactcccactcagtactgtacagggtggctgtggtcctagaagttcagtttttactgaggaaatatttccattaacagcaattattatattgaaggctttaataaaggccacaggagacattactatagcatagattgtcaaatgtaaatttactgagcgtgttttataaaaaactcacaggtgtttgaggccaaaacagattttagacttaccttgaacggataagaatctatagttcactgacacagtaaaattaactctgtgggtgggggcggggggcatagctctaatctaatatataaaatgtgtgatgaatcaacaagatttccacaattcttctgtcaagcttactacagtgaaagaatgggattggcaagtaacttctgacttactgtcagttgtacttctgctccatagacatcagtattctgccatcatttttgatgactacctcagaacataaaaaggaacgtatatcacataattccagtcacagtttttggttcctcttttctttcaagaactatatataaatgacctgttttcacttagcatcctttggactctgcagtaggttgtctgggtcaagataactctcagtcacatttatattcatattatgctaaaatagtaaaatgaaacctcattgttggacataatttagatataactaaaaagttctatgaagtgggaaattccgtgttggctctggagcagctttgtctcctctgaaccaatatatcccaaaccaatatatgcaaagcacctggtacacaactggtattttagtacatgttggttcttttggtgcaatctcagctcactgcagcttccgcctcctagattcaaacaaacagttctcctgccccagcctccagagcacctaggactccaggtgcatgctaccacacctgactagtttttatatttttagtagagattgggttttaccatattggccaggctggtctcaaactcctgaccgcaggtgatccacctgcctcagcttccccaagggctgggattacaggtgtgagccaccatgcccagcctatttgtcacattatttgtcacatttattttacttttatttattttttgagatgaaatttcgctcttgttgcccaggctggagtgcaatggtgcagccttggctcactgcaacctccgcctcccagggtcaagcaattctcctgcctcagcctcctgagtagctgggattacaggcatgcaccaccacacccaggtaattttgtatctttagtagagatggggtttcaccatgttggtcaggctgttctcgaactcctgacctcaggtgatctgcctgccttggcctcccaaagtgctgggattacaggcgtgagccactgcgcctagccgtcacatttctaaacaagcatgaaaggggttcatttttgtcttcttcttgcctgccgtcagcatggtggaaatggctctgcctatgctcatgcttctggtgcccaatgccttgcactgtgccattcaacactatgaagagaaacaagtagccacacctcaaaataatgtggctgtcaacaactggcctaaataaacctacacaaaccagtacttgccttttgctggaaacattgattatgtgctcctcacgtagtagaaagcggtatcctgattagtctaacagttgtgttagactttagggccagtattgtcagcatttatttatttatgtacctttgttatgatgggatatttttcatttgaaacttgttcataaaaatgtcaatgacattgatgactgatttgtacatatttttcatatagttttgtttaaaaaataattcacgcaaaatcttgaagtcatttttgctattgaaataaaccttaattaaaatatttcatcatcaaattgtgt

SEQ ID NO: 293233 - DNA, 5427 bp, Homo sapiens
gcggccgcctccccccgggactgaagggagggaattcctgtgggtcccaggagtgccaagagtgcgcagcaagacgggaaattgcaaaagacctcacccctctgccctcccccgcggttttccagtaactcccgcccctccgcgcttgccccgcagctgattcatagccccggcccgggccgcctctgcacgtccgccccggagcccgcacccgcgccccacgcgccgccgaggactcggcccggctcgtggagcccttcgcccgcggcaaaaccagaactgatggctctatttgcagtctttcagacaacattcttcttaacattgctgtccttgaggacttaccagagtgaagtcttggctgaacgtttaccattgactcctgtatcacttaaagtttccaccaattctacgcgtcagagtttgcacttacaatggactgtccacaaccttccttatcatcaggaattgaaaatggtatttcagatccagatcagtaggattgaaacatccaatgtcatctgggtggggaattacagcaccactgtgaagtggaaccaggttctgcattggagctgggaatctgagctccctttggaatgtgccacacactttgtaagaataaagagtttggtggacgatgccaagttccctgagccaaatttctggagcaactggagttcctgggaggaagtcagtgtacaagattctactggacaggatatattgttcgttttccctaaagataagctggtggaagaaggcaccaatgttaccatttgttacgtttctaggaacattcaaaataatgtatcctgttatttggaagggaaacagattcatggagaacaacttgatccacatgtaactgcattcaacttgaatagtgtgcctttcattaggaataaagggacaaatatctattgtgaggcaagtcaaggaaatgtcagtgaaggcatgaaaggcatcgttctttttgtctcaaaagtacttgaggagcccaaggacttttcttgtgaaaccgaggacttcaagactttgcactgtacttgggatcctgggacggacactgccttggggtggtctaaacaaccttcccaaagctacactttatttgaatcattttctggggaaaagaaactttgtacacacaaaaactggtgtaattggcaaataactcaagactcacaagaaacctataacttcacactcatagctgaaaattacttaaggaagagaagtgtcaatatcctttttaacctgactcatcgagtttatttaatgaatccttttagtgtcaactttgaaaatgtaaatgccacaaatgccatcatgacctggaaggtgcactccataaggaataatttcacatatttgtgtcagattgaactccatggtgaaggaaaaatgatgcaatacaatgtttccatcaaggtgaacggtgagtacttcttaagtgaactggaacctgccacagagtacatggcgcgagtacggtgtgctgatgccagccacttctggaaatggagtgaatggagtggtcagaacttcaccacacttgaagctgctccctcagaggcccctgatgtctggagaattgtgagcttggagccaggaaatcatactgtgaccttattctggaagccattatcaaaactgcatgccaatggaaagatcctgttctataatgtagttgtagaaaacctagacaaaccatccagttcagagctccattccattccagcaccagccaacagcacaaaactaatccttgacaggtgttcctaccaaatctgcgtcatagccaacaacagtgtgggtgcttctcctgcttctgtaatagtcatctctgcagaccccgaaaacaaagaggttgaggaagaaagaattgcaggcacagagggtggattctctctgtcttggaaaccccaacctggagatgttataggctatgttgtggactggtgtgaccatacccaggatgtgctcggtgatttccagtggaagaatgtaggtcccaataccacaagcacagtcattagcacagatgcttttaggccaggagttcgatatgacttcagaatttatgggttatctacaaaaaggattgcttgtttattagagaaaaaaacaggatactctcaggaacttgctccttcagacaaccctcacgtgctggtggatacattgacatcccactccttcactctgagttggaaagattactctactgaatctcaacctggttttatacaagggtaccatgtctatctgaaatccaaggcgaggcagtgccacccacgatttgaaaaggcagttctttcagatggttcagaatgttgcaaatacaaaattgacaacccggaagaaaaggcattgattgtggacaacctaaagccagaatccttctatgagtttttcatcactccattcactagtgctggtgaaggccccagtgctacgttcacgaaggtcacgactccggatgaacactcctcgatgctgattcatatcctactgcccatggttttctgcgtcttgctcatcatggtcatgtgctacttgaaaagtcagtggatcaaggagacctgttatcctgacatccctgacccttacaagagcagcatcctgtcattaataaaattcaaggagaaccctcacctaataataatgaatgtcagtgactgtatcccagatgctattgaagttgtaagcaagccagaagggacaaagatacagttcctaggcactaggaagtcactcacagaaaccgagttgactaagcctaactacctttatctccttccaacagaaaagaatcactctggccctggcccctgcatctgttttgagaacttgacctataaccaggcagcttctgactctggctcttgtggccatgttccagtatccccaaaagccccaagtatgctgggactaatgacctcacctgaaaatgtactaaaggcactagaaaaaaactacatgaactccctgggagaaatcccagctggagaaacaagtttgaattatgtgtcccagttggcttcacccatgtttggagacaaggacagtctcccaacaaacccagtagaggcaccacactgttcagagtataaaatgcaaatggcagtctccctgcgtcttgccttgcctcccccgaccgagaatagcagcctctcctcaattacccttttagatccaggtgaacactactgctaaccagcatgccgatttcataccttatgctacacagacattaagaagagcagagctggcaccctgtcatcaccagtggccttggtccttaatcccagtacgatttgcaggtctggtttatataagaccactacagtctggctaggttaaaggccagaggctatggaacttaacactccccattggagcaagcttgccctagagacggcaggatcatgggagcatgcttaccttctgctgtttgttccaggctcacctttagaacaggagacttgagcttgacctaaggatatgcattaaccactctacagactcccactcagtactgtacagggtggctgtggtcctagaagttcagtttttactgaggaaatatttccattaacagcaattattatattgaaggctttaataaaggccacaggagacattactatagcatagattgtcaaatgtaaatttactgagcgtgttttataaaaaactcacaggtgtttgaggccaaaacagattttagacttaccttgaacggataagaatctatagttcactgacacagtaaaattaactctgtgggtgggggcggggggcatagctctaatctaatatataaaatgtgtgatgaatcaacaagatttccacaattcttctgtcaagcttactacagtgaaagaatgggattggcaagtaacttctgacttactgtcagttgtacttctgctccatagacatcagtattctgccatcatttttgatgactacctcagaacataaaaaggaacgtatatcacataattccagtcacagtttttggttcctcttttctttcaagaactatatataaatgacctgttttcacttagcatcctttggactctgcagtaggttgtctgggtcaagataactctcagtcacatttatattcatattatgctaaaatagtaaaatgaaacctcattgttggacataatttagatataactaaaaagttctatgaagtgggaaattccgtgttggctctggagcagctttgtctcctctgaaccaatatatcccaaaccaatatatgcaaagcacctggtacacaactggtattttagtacatgttggttcttttggtgcaatctcagctcactgcagcttccgcctcctagattcaaacaaacagttctcctgccccagcctccagagcacctaggactccaggtgcatgctaccacacctgactagtttttatatttttagtagagattgggttttaccatattggccaggctggtctcaaactcctgaccgcaggtgatccacctgcctcagcttccccaagggctgggattacaggtgtgagccaccatgcccagcctatttgtcacattatttgtcacatttattttacttttatttattttttgagatgaaatttcgctcttgttgcccaggctggagtgcaatggtgcagccttggctcactgcaacctccgcctcccagggtcaagcaattctcctgcctcagcctcctgagtagctgggattacaggcatgcaccaccacacccaggtaattttgtatctttagtagagatggggtttcaccatgttggtcaggctgttctcgaactcctgacctcaggtgatctgcctgccttggcctcccaaagtgctgggattacaggcgtgagccactgcgcctagccgtcacatttctaaacaagcatgaaaggggttcatttttgtcttcttcttgcctgccgtcagcatggtggaaatggctctgcctatgctcatgcttctggtgcccaatgccttgcactgtgccattcaacactatgaagagaaacaagtagccacacctcaaaataatgtggctgtcaacaactggcctaaataaacctacacaaaccagtacttgccttttgctggaaacattgattatgtgctcctcacgtagtagaaagcggtatcctgattagtctaacagttgtgttagactttagggccagtattgtcagcatttatttatttatgtacctttgttatgatgggatatttttcatttgaaacttgttcataaaaatgtcaatgacattgatgactgatttgtacatatttttcatatagttttgtttaaaaaataattcacgcaaaatcttgaagtcatttttgctattgaaataaaccttaattaaaatatttcatcatcaaattgtgt

SEQ ID NO: 293234 - DNA, 3703 bp, Homo sapiens
taggcaagcacctgtaactattgaagtggaggtctgttacctactagatacagtgcatgtatgtatttactttctaccttacacacttaaaacaatttacagttaattaaatctggagcattgctctatttgtttatatacagaagaggttgaggaagaaagaattgcaggcacagagggtggattctctctgtcttggaaaccccaacctggagatgttataggctatgttgtggactggtgtgaccatacccaggatgtgctcggtgatttccagtggaagaatgtaggtcccaataccacaagcacagtcattagcacagatgcttttaggccaggagttcgatatgacttcagaatttatgggttatctacaaaaaggattgcttgtttattagagaaaaaaacaggatactctcaggaacttgctccttcagacaaccctcacgtgctggtggatacattgacatcccactccttcactctgagttggaaagattactctactgaatctcaacctggttttatacaagggtaccatgtctatctgaaatccaaggcgaggcagtgccacccacgatttgaaaaggcagttctttcagatggttcagaatgttgcaaatacaaaattgacaacccggaagaaaaggcattgattgtggacaacctaaagccagaatccttctatgagtttttcatcactccattcactagtgctggtgaaggccccagtgctacgttcacgaaggtcacgactccggatgaacactcctcgatgctgattcatatcctactgcccatggttttctgcgtcttgctcatcatggtcatgtgctacttgaaaagtcagtggatcaaggagacctgttatcctgacatccctgacccttacaagagcagcatcctgtcattaataaaattcaaggagaaccctcacctaataataatgaatgtcagtgactgtatcccagatgctattgaagttgtaagcaagccagaagggacaaagatacagttcctaggcactaggaagtcactcacagaaaccgagttgactaagcctaactacctttatctccttccaacagaaaagaatcactctggccctggcccctgcatctgttttgagaacttgacctataaccaggcagcttctgactctggctcttgtggccatgttccagtatccccaaaagccccaagtatgctgggactaatgacctcacctgaaaatgtactaaaggcactagaaaaaaactacatgaactccctgggagaaatcccagctggagaaacaagtttgaattatgtgtcccagttggcttcacccatgtttggagacaaggacagtctcccaacaaacccagtagaggcaccacactgttcagagtataaaatgcaaatggcagtctccctgcgtcttgccttgcctcccccgaccgagaatagcagcctctcctcaattacccttttagatccaggtgaacactactgctaaccagcatgccgatttcataccttatgctacacagacattaagaagagcagagctggcaccctgtcatcaccagtggccttggtccttaatcccagtacgatttgcaggtctggtttatataagaccactacagtctggctaggttaaaggccagaggctatggaacttaacactccccattggagcaagcttgccctagagacggcaggatcatgggagcatgcttaccttctgctgtttgttccaggctcacctttagaacaggagacttgagcttgacctaaggatatgcattaaccactctacagactcccactcagtactgtacagggtggctgtggtcctagaagttcagtttttactgaggaaatatttccattaacagcaattattatattgaaggctttaataaaggccacaggagacattactatagcatagattgtcaaatgtaaatttactgagcgtgttttataaaaaactcacaggtgtttgaggccaaaacagattttagacttaccttgaacggataagaatctatagttcactgacacagtaaaattaactctgtgggtgggggcggggggcatagctctaatctaatatataaaatgtgtgatgaatcaacaagatttccacaattcttctgtcaagcttactacagtgaaagaatgggattggcaagtaacttctgacttactgtcagttgtacttctgctccatagacatcagtattctgccatcatttttgatgactacctcagaacataaaaaggaacgtatatcacataattccagtcacagtttttggttcctcttttctttcaagaactatatataaatgacctgttttcacttagcatcctttggactctgcagtaggttgtctgggtcaagataactctcagtcacatttatattcatattatgctaaaatagtaaaatgaaacctcattgttggacataatttagatataactaaaaagttctatgaagtgggaaattccgtgttggctctggagcagctttgtctcctctgaaccaatatatcccaaaccaatatatgcaaagcacctggtacacaactggtattttagtacatgttggttcttttggtgcaatctcagctcactgcagcttccgcctcctagattcaaacaaacagttctcctgccccagcctccagagcacctaggactccaggtgcatgctaccacacctgactagtttttatatttttagtagagattgggttttaccatattggccaggctggtctcaaactcctgaccgcaggtgatccacctgcctcagcttccccaagggctgggattacaggtgtgagccaccatgcccagcctatttgtcacattatttgtcacatttattttacttttatttattttttgagatgaaatttcgctcttgttgcccaggctggagtgcaatggtgcagccttggctcactgcaacctccgcctcccagggtcaagcaattctcctgcctcagcctcctgagtagctgggattacaggcatgcaccaccacacccaggtaattttgtatctttagtagagatggggtttcaccatgttggtcaggctgttctcgaactcctgacctcaggtgatctgcctgccttggcctcccaaagtgctgggattacaggcgtgagccactgcgcctagccgtcacatttctaaacaagcatgaaaggggttcatttttgtcttcttcttgcctgccgtcagcatggtggaaatggctctgcctatgctcatgcttctggtgcccaatgccttgcactgtgccattcaacactatgaagagaaacaagtagccacacctcaaaataatgtggctgtcaacaactggcctaaataaacctacacaaaccagtacttgccttttgctggaaacattgattatgtgctcctcacgtagtagaaagcggtatcctgattagtctaacagttgtgttagactttagggccagtattgtcagcatttatttatttatgtacctttgttatgatgggatatttttcatttgaaacttgttcataaaaatgtcaatgacattgatgactgatttgtacatatttttcatatagttttgtttaaaaaataattcacgcaaaatcttgaagtcatttttgctattgaaataaaccttaattaaaatatttcatcatcaaattgtgt

SEQ ID NO: 293235 - DNA, 1608 bp, Homo sapiens
ggaagctgcagtgagctgagattgcaccaaaagaaccaacatgtactaaaataccagttgtgtaccaggtgctttgcatatattggtttgggatatattggttcagaggagacaattctgctccatagacatcagtattctgccatcatttttgatgactacctcagaacataaaaaggaacgtatatcacataattccagtcacagtttttggttcctcttttctttcaagaactatatataaatgacctgttttcacttagcatcctttggactctgcagtaggttgtctgggtcaagataactctcagtcacatttatattcatattatgctaaaatagtaaaatgaaacctcattgttggacataatttagatataactaaaaagttctatgaagtgggaaattccgtgttggctctggagcagctttgtctcctctgaaccaatatatcccaaaccaatatatgcaaagcacctggtacacaactggtattttagtacatgttggttcttttggtgcaatctcagctcactgcagcttccgcctcctagattcaaacaaacagttctcctgccccagcctccagagcacctaggactccaggtgcatgctaccacacctgactagtttttatatttttagtagagattgggttttaccatattggccaggctggtctcaaactcctgaccgcaggtgatccacctgcctcagcttccccaagggctgggattacaggtgtgagccaccatgcccagcctatttgtcacattatttgtcacatttattttacttttatttattttttgagatgaaatttcgctcttgttgcccaggctggagtgcaatggtgcagccttggctcactgcaacctccgcctcccagggtcaagcaattctcctgcctcagcctcctgagtagctgggattacaggcatgcaccaccacacccaggtaattttgtatctttagtagagatggggtttcaccatgttggtcaggctgttctcgaactcctgacctcaggtgatctgcctgccttggcctcccaaagtgctgggattacaggcgtgagccactgcgcctagccgtcacatttctaaacaagcatgaaaggggttcatttttgtcttcttcttgcctgccgtcagcatggtggaaatggctctgcctatgctcatgcttctggtgcccaatgccttgcactgtgccattcaacactatgaagagaaacaagtagccacacctcaaaataatgtggctgtcaacaactggcctaaataaacctacacaaaccagtacttgccttttgctggaaacattgattatgtgctcctcacgtagtagaaagcggtatcctgattagtctaacagttgtgttagactttagggccagtattgtcagcatttatttatttatgtacctttgttatgatgggatatttttcatttgaaacttgttcataaaaatgtcaatgacattgatgactgatttgtacatatttttcatatagttttgtttaaaaaataattcacgcaaaatcttgaagtcatttttgctattgaaataaaccttaattaaaatatttcatcatcaaattgtgt

SEQ ID NO: 293236 - DNA, 1066 bp, Homo sapiens
acaacaagaccagcttcctcccggtgccccccccaaagcacctccagagcacctaggactccaggtgcatgctaccacacctgactagtttttatatttttagtagagattgggttttaccatattggccaggctggtctcaaactcctgaccgcaggtgatccacctgcctcagcttccccaagggctgggattacaggtgtgagccaccatgcccagcctatttgtcacattatttgtcacatttattttacttttatttattttttgagatgaaatttcgctcttgttgcccaggctggagtgcaatggtgcagccttggctcactgcaacctccgcctcccagggtcaagcaattctcctgcctcagcctcctgagtagctgggattacaggcatgcaccaccacacccaggtaattttgtatctttagtagagatggggtttcaccatgttggtcaggctgttctcgaactcctgacctcaggtgatctgcctgccttggcctcccaaagtgctgggattacaggcgtgagccactgcgcctagccgtcacatttctaaacaagcatgaaaggggttcatttttgtcttcttcttgcctgccgtcagcatggtggaaatggctctgcctatgctcatgcttctggtgcccaatgccttgcactgtgccattcaacactatgaagagaaacaagtagccacacctcaaaataatgtggctgtcaacaactggcctaaataaacctacacaaaccagtacttgccttttgctggaaacattgattatgtgctcctcacgtagtagaaagcggtatcctgattagtctaacagttgtgttagactttagggccagtattgtcagcatttatttatttatgtacctttgttatgatgggatatttttcatttgaaacttgttcataaaaatgtcaatgacattgatgactgatttgtacatatttttcatatagttttgtttaaaaaataattcacgcaaaatcttgaagtcatttttgctattgaaataaaccttaattaaaatatttcatcatcaaattgtgt

SEQ ID NO: 293237 - DNA, 2936 bp, Homo sapiens
gcggccgcctccccccgggactgaagggagggaattcctgtgggtcccaggagtgccaagagtgcgcagcaagacgggaaattgcaaaagacctcacccctctgccctcccccgcggttttccagtaactcccgcccctccgcgcttgccccgcagctgattcatagccccggcccgggccgcctctgcacgtccgccccggagcccgcacccgcgccccacgcgccgccgaggactcggcccggctcgtggagcccttcgcccgcggcaaaaccagaactgatggctctatttgcagtctttcagacaacattcttcttaacattgctgtccttgaggacttaccagagtgaagtcttggctgaacgtttaccattgactcctgtatcacttaaagtttccaccaattctacgcgtcagagtttgcacttacaatggactgtccacaaccttccttatcatcaggaattgaaaatggtatttcagatccagatcagtaggattgaaacatccaatgtcatctgggtggggaattacagcaccactgtgaagtggaaccaggttctgcattggagctgggaatctgagctccctttggaatgtgccacacactttgtaagaataaagagtttggtggacgatgccaagttccctgagccaaatttctggagcaactggagttcctgggaggaagtcagtgtacaagattctactggacaggatatattgttcgttttccctaaagataagctggtggaagaaggcaccaatgttaccatttgttacgtttctaggaacattcaaaataatgtatcctgttatttggaagggaaacagattcatggagaacaacttgatccacatgtaactgcattcaacttgaatagtgtgcctttcattaggaataaagggacaaatatctattgtgaggcaagtcaaggaaatgtcagtgaaggcatgaaaggcatcgttctttttgtctcaaaagtacttgaggagcccaaggacttttcttgtgaaaccgaggacttcaagactttgcactgtacttgggatcctgggacggacactgccttggggtggtctaaacaaccttcccaaagctacactttatttgaatcattttctggggaaaagaaactttgtacacacaaaaactggtgtaattggcaaataactcaagactcacaagaaacctataacttcacactcatagctgaaaattacttaaggaagagaagtgtcaatatcctttttaacctgactcatcgagtttatttaatgaatccttttagtgtcaactttgaaaatgtaaatgccacaaatgccatcatgacctggaaggtgcactccataaggaataatttcacatatttgtgtcagattgaactccatggtgaaggaaaaatgatgcaatacaatgtttccatcaaggtgaacggtgagtacttcttaagtgaactggaacctgccacagagtacatggcgcgagtacggtgtgctgatgccagccacttctggaaatggagtgaatggagtggtcagaacttcaccacacttgaagctgctccctcagaggcccctgatgtctggagaattgtgagcttggagccaggaaatcatactgtgaccttattctggaagccattatcaaaactgcatgccaatggaaagatcctgttctataatgtagttgtagaaaacctagacaaaccatccagttcagagctccattccattccagcaccagccaacagcacaaaactaatccttgacaggtgttcctaccaaatctgcgtcatagccaacaacagtgtgggtgcttctcctgcttctgtaatagtcatctctgcagaccccgaaaacaaagaggttgaggaagaaagaattgcaggcacagagggtggattctctctgtcttggaaaccccaacctggagatgttataggctatgttgtggactggtgtgaccatacccaggatgtgctcggtgatttccagtggaagaatgtaggtcccaataccacaagcacagtcattagcacagatgcttttaggccaggagttcgatatgacttcagaatttatgggttatctacaaaaaggattgcttgtttattagagaaaaaaacaggatactctcaggaacttgctccttcagacaaccctcacgtgctggtggatacattgacatcccactccttcactctgagttggaaagattactctactgaatctcaacctggttttatacaagggtaccatgtctatctgaaatccaaggcgaggcagtgccacccacgatttgaaaaggcagttctttcagatggttcagaatgttgcaaatacaaaattgacaacccggaagaaaaggcattgattgtggacaacctaaagccagaatccttctatgagtttttcatcactccattcactagtgctggtgaaggccccagtgctacgttcacgaaggtcacgactccggatgaacactcctcgatgctgattcatatcctactgcccatggttttctgcgtcttgctcatcatggtcatgtgctacttgaaaagtcagtggatcaaggagacctgttatcctgacatccctgacccttacaagagcagcatcctgtcattaataaaattcaagatctcttcaaaagtctggcttaatagaagatagctggattctcatacttgcttctacattcaatctgttgccatatgttgttttggctgaagtattaaagaaaatctagcctcacacagctgagccttcttgagacaccccatcactgcatccagaaatccccgaaaacttagagggaaccacttctaaaggattatggatagtctgctcacaccaatcagaatatggaatatcttgaaagtctgaagaaaaaaataattatttcaattaaagcaccataacggctt

SEQ ID NO: 293238 - DNA, 2227 bp, Homo sapiens
gcggccgcctccccccgggactgaagggagggaattcctgtgggtcccaggagtgccaagagtgcgcagcaagacgggaaattgcaaaagacctcacccctctgccctcccccgcggttttccagtaactcccgcccctccgcgcttgccccgcagctgattcatagccccggcccgggccgcctctgcacgtccgccccggagcccgcacccgcgccccacgcgccgccgaggactcggcccggctcgtggagcccttcgcccgcggcaaaaccagaactgatggctctatttgcagtctttcagacaacattcttcttaacattgctgtccttgaggacttaccagagtgaagtcttggctgaacgtttaccattgactcctgtatcacttaaagtttccaccaattctacgcgtcagagtttgcacttacaatggactgtccacaaccttccttatcatcaggaattgaaaatggtatttcagatccagatcagtaggattgaaacatccaatgtcatctgggtggggaattacagcaccactgtgaagtggaaccaggttctgcattggagctgggaatctgagctccctttggaatgtgccacacactttgtaagaataaagagtttggtggacgatgccaagttccctgagccaaatttctggagcaactggagttcctgggaggaagtcagtgtacaagattctactggacaggatatattgttcgttttccctaaagataagctggtggaagaaggcaccaatgttaccatttgttacgtttctaggaacattcaaaataatgtatcctgttatttggaagggaaacagattcatggagaacaacttgatccacatgtaactgcattcaacttgaatagtgtgcctttcattaggaataaagggacaaatatctattgtgaggcaagtcaaggaaatgtcagtgaaggcatgaaaggcatcgttctttttgtctcaaaagtacttgaggagcccaaggacttttcttgtgaaaccgaggacttcaagactttgcactgtacttgggatcctgggacggacactgccttggggtggtctaaacaaccttcccaaagctacactttatttgaatcattttctggggaaaagaaactttgtacacacaaaaactggtgtaattggcaaataactcaagactcacaagaaacctataacttcacactcatagctgaaaattacttaaggaagagaagtgtcaatatcctttttaacctgactcatcgagtttatttaatgaatccttttagtgtcaactttgaaaatgtaaatgccacaaatgccatcatgacctggaaggtgcactccataaggaataatttcacatatttgtgtcagattgaactccatggtgaaggaaaaatgatgcaatacaatgtttccatcaaggtgaacggtgagtacttcttaagtgaactggaacctgccacagagtacatggcgcgagtacggtgtgctgatgccagccacttctggaaatggagtgaatggagtggtcagaacttcaccacacttgaagctgctccctcagaggcccctgatgtctggagaattgtgagcttggagccaggaaatcatactgtgaccttattctggaagccattatcaaaactgcatgccaatggaaagatcctgttctataatgtagttgtagaaaacctagacaaaccatccagttcagagctccattccattccagcaccagccaacagcacaaaactaatccttgacaggtgttcctaccaaatctgcgtcatagccaacaacagtgtgggtgcttctcctgcttctgtaatagtcatctctgcagaccccgaaaacagtgtgtcaacgtgtttcagtgggacagtcccctcagtgtggggagaaggagacttcagccatggctcaggacatttctgtccaggggattcttcaacatacatgggaaattatctcaaatttattcaagtaactgcaaccctaacaaacagtcaccactgagagttggagttactatttatgatctttgtggcttgtgaaataggaattgcatttactattttgtaaaaagtgttgtcagtctttgcacctggaaagagtccatgaacatttccagagatcatcagaactggcatcaactttcaccacagactctgccaactttgtagaataaaagataataactggctaatctcttgcc

SEQ ID NO: 293239 - DNA, 357 bp, Homo sapiens
agcaatcatgcaattatcagagtggtaatagtaatgtgctgtctgtggcagtaagagcaacagcagtggtatcagtgtaacaataggagcagtggtggaaaggattgtcttgcatgcaccagagggtagaggtttggcagagaaatttaggttgctattttctccaggaggtagaaaaagctaaagttatctgctgaaggcaaatggataacttgttttaagaggcttgaattttgagtgcgattctaacttggctatttttttttcttgcagtacaagattctactggacaggatatattgttcgttttccctaaagataagctggtggaagaaggcaccaatgttaccatttgtt

SEQ ID NO: 293240 - DNA, 651 bp, Homo sapiens
ccaacctggagatgttataggctatgttgtggactggtgtgaccatacccaggatgtgctcggtgatttccagtggaagaatgtaggtcccaataccacaagcacagtcattagcacaggtaagaagaagcttccatatcatcgcattgctatattcaccttgaagaaagttcaagtgggatttctggactacttcacagactttgactgtgctaagctagtaattttgaaacgacaaatccagcatgggtgttaggagttcagatgttacaagaatatgttctaaaacttgacctttaaatctacttttgcagagaatatctgcacatgaggtgggaactgattttcataaacttgtttctttaaattagtgcatagtctcgaatggcagaaggacattattataacagttgtccagagagcttttacaaaagcagagacttgcatccatttggaagatgtttaggacatatagttgatgagaatcgatcatcaacttcagtttcaatagaacatgtagaacttgttctcttacctcccacattggatttgtaatgtgaagattgctagtttagcagtcagaggagtgctggtttgtgtggcttgagctggaggggtgggtggcgccatctactgggctcagggaaaggt

SEQ ID NO: 293241 - DNA, 365 bp, Homo sapiens
ttggctagttggttggttggcttttcccctgaagtcaggcagaattcatattacaacttgcatacataatttgagaaataataaacatgtaaaattactttcaatcataaacttgtatttattcctttgaggaagggaaaagtacttattaaaaatgtccctttctttttcctcgttcagcctcgatgctgattcatatcctactgcccatggttttctgcgtcttgctcatcatggtcatgtgctacttgaaaagtcagtggtaagtgtgtgaggaaggttttatccaagaagagagtaagagaaaagtctggaaagagatttagtaagatagaaatgacattgaataatatgaaacaacgtat

SEQ ID NO: 293242 - DNA, 1189 bp, Homo sapiens
aattcgcggccgcgtcgaccgagaagacgacagaacggggcccgtagtccttctgcgagggcgcgaggactccaggagccgtcctggttcgagcatttctgaagaaactgagttcccggcgttcgcagcctgggagtcacaggcgcccacccaccggtgttggaagggcatgagaaacaaggggagaacaagggcacccaaagcctgacccccacaaggctagaggagcaacaggaaaattcgtttccagagactgattcctcagctgctgagcaggagcctggagccacacttgctgcctggtactactgacacacaactggaaccaccgctgtggcctggggtgccaccagaagccagagattagaattgctttccccatctcatatcttccaaactcccaccagtgcctcccactggctgagtcagatgacaagggagtctgggaaatgtagttgtttggcttccagccctgaccatggagagtatagaaaggcaggtgtaggggagaaaatagatgccattcacacagcgcctatcttgcagggctgttttgaggagtaaaaactcagcctatttttattcctcatagcatgtagtagcattcagggaaaggcaaatcttccaaaacaatatcttaggtataatagttctacataaaggtttgaatttaccattaaaagcatcaaaatgagcattttaaaagtagaattttaagtctgaatgggcagtatattcacatggtataaaattcaaattacaaaacaatatacagtgaaaaataagggggtttttttgctcatcttcttgtgacctggctctttccatctctgtccacaaccctctgcaggcaataactggtacctttgttatggatcctctgcagatataaagtagacatatattaacaaatgttttctttggcccagaggatgcatattatgcacattcctccatttcttgtttgtttttgttttttccacttaattgtatcttggagatcactctgtatcagtatatatctgatttgttttagcagtacatgataatccattgtttggatatgccataattgtatcagccagtctctggacagtcttttactatttcaaggagtgctgcagtaaacatgtttgcgccacttcctggtacccattgcaaataaaactgggataatttcctgacgaga

SEQ ID NO: 293243 - DNA, 1117 bp, Homo sapiens
gctggagtgcaatggtgccatcttggctcactacaacctccgcctcccaggttcaagggattctgcctcagcctcctgagtaactggggttacaggcgcgcgataccacgcctggctaatttttctatttttagtagagatggggtttcgccatgttggccacgctggtcttaaactcctgacctcaagtgatccgcccgccttggtcttccaaagtgctgggattacaggtgtgagtcaccgtgcccagcctggacttgccttttacctcatccgtggtgtcttttgaagaaaaagattctttagaaatgttttttctttcatagcttgtgttttatgtattactttcaagatcccaactagatctaggtcctaaaaatagtatcctacctattgtttttttaatcaacttaattgtggtataattgcacactgcagataaactgcacatgtttgaagtgagtaatgtaagtttttttgtcttggagccctgaggtaaacttttatttcttagctgacaggacttccacacccatgctcctctcggcacctttcacccagcccaagcagcggcggcccagtggtggaaaaggtgccacggccaaacggattggagactcaccccgcattctaggccggagaagcgggcgggcttgggatgccggcaggaggcaatgactctccccaggcgctgcatcctggctccggggcacaagcgcctctccgccctgacgctgatgctcgtctggctgcccgttctttggcatcaaaataccagacgatggtggcgcaccctgtggcctgggctgcctcacctcattcggtcccgcctagaaagaccagaggaccagaaaaccagaagcctgtcagagcgactagaggctggctccagccaacagccgcgcgcctcagcgtccacgagggttacctgggtaacgcgccgcttgggctcggcgcccagccgatgacgtaacccgcgcttgcgtagtggcgccgccctgatgtgtagtctccaggccgccccgaacaccagcccagcgggtcctggacccctaggtcatgtggctacagtggaatccaggcttggccgaatccaggacgaccaggccagacccac

SEQ ID NO: 293244 - DNA, 855 bp, Homo sapiens
cgccctgcctgggcggggttgggacctttctggcacctgcgtcgaagccggcggcaggatggactttgttgtcccggtcccagaccaccctcctccaccgtcgcctcccactgcaaaaaggcctggataaggaacctaattcgagctacccttctctgtgaagctcgacggctgagaacgtcagggctcgttcccaagtctctttccagaggccaggctttatgggagcatgggttaccagcgacgcaccctctgacaggacttccacacccatgctcctctcggcacctttcacccagcccaagcagcggcggcccagtggtggaaaaggtgccacggccaaacggattggagactcaccccgcattctaggccggagaagcgggcgggcttgggatgccggcaggaggcaatgactctccccaggcgctgcatcctggctccggggcacaagcgcctctccgccctgacgctgatgctcgtctggctgcccgttctttggcatcaaaataccagacgatggtggcgcaccctgtggcctgggctgcctcacctcattcggtcccgcctagaaagaccagaggaccagaaaaccagaagcctgtcagagcgactagaggctggctccagccaacagccgcgcgcctcagcgtccacgagggttacctgggtaacgcgccgcttgggctcggcgcccagccgatgacgtaacccgcgcttgcgtagtggcgccgccctgatgtgtagtctccaggccgccccgaacaccagcccagcgggtcctggacccctaggtcatgtggctacagtggaatccaggcttggccgaatccaggacgaccaggccagacccac

SEQ ID NO: 293245 - DNA, 929 bp, Homo sapiens
gaaggatcatacatcactcaatcatcagcaaacatttatgaagcacctgctctcgtgcccagcctggacttgccttttacctcatccgtggtgtcttttgaagaaaaagattctttagaaatgttttttctttcatagcttgtgttttatgtattactttcaagatcccaactagatctaggtcctaaaaatagtatcctacctattgtttttttaatcaacttaattgtggtataattgcacactgcagataaactgcacatgtttgaagtgagtaatgtaagtttttttgtcttggagccctgaggtaaacttttatttcttagctgacaggacttccacacccatgctcctctcggcacctttcacccagcccaagcagcggcggcccagtggtggaaaaggtgccacggccaaacggattggagactcaccccgcattctaggccggagaagcgggcgggcttgggatgccggcaggaggcaatgactctccccaggcgctgcatcctggctccggggcacaagcgcctctccgccctgacgctgatgctcgtctggctgcccgttctttggcatcaaaataccagacgatggtggcgcaccctgtggcctgggctgcctcacctcattcggtcccgcctagaaagaccagaggaccagaaaaccagaagcctgtcagagcgactagaggctggctccagccaacagccgcgcgcctcagcgtccacgagggttacctgggtaacgcgccgcttgggctcggcgcccagccgatgacgtaacccgcgcttgcgtagtggcgccgccctgatgtgtagtctccaggccgccccgaacaccagcccagcgggtcctggacccctaggtcatgtggctacagtggaatccaggcttggccgaatccaggacgaccaggccagacccac

SEQ ID NO: 293246 - DNA, 504 bp, Homo sapiens
gaaatcgcccgaggatggatccgacttgtggtttcaatggagccctcattcttctcttcacttaccctctccgtgaggaggaagccagtgcacatcaagcgtttcctgtgtagcacagactcttctcccaaacatctttgcattctgcactggtgagggccagtggtgccacaccaatgtcccaattcaccttgggaacgtccttgagcgcatttctttttgtctgtagaagtaaaagagtagaactgaatgccgaagccagcaagctgttggaaccttggaaacgcagagggcatgaaggctgagtccggggtcctacagtcagaggctcgcattcaaatcttgcctctgcctgtaattgccgtgggaccctagcaggtgacttagccatgccctgcctgggtttacctacctgtaaagagcccttgtaaggatgaaagtaggtggcacagaccaagcatctgtacctggcagaccagtccttaataaacacgaattattgtt

SEQ ID NO: 293247 - DNA, 450 bp, Homo sapiens
cgctttcggggaaggcctgcaaagtgaggcctcgggctagggttggcgggcgcgtggtgggaaccgcgtggaaccgaagggctcccacgggaacaagggcatcactgacggtacggcctctcgggtctattgacccttctctgcctccccggtccggactcatacaacttggaggcccagaggtcgtccagtctcatcttgacgtcagaatgacacagccagttatcaaaagaaatcttcaaggaattccctgtatgctgaggaatgaaggatgtgagaaagaaattaactgtcttccgctctcaagttagacccctaagaaaactcttaagagtatctaataactagaggcatctgtcacaccagcaaagatgtcattattgtttttttcttatcagtcttagattatgctttgctttaaaatgagatacaccaccagagctttccaga

SEQ ID NO: 293248 - DNA, 978 bp, Homo sapiens
cctaaggcctagctcagctgccacgtcctatctggatcatgccccccacaaccccgagaccatcttgaaccctccggcaagtgagcgcctccactggtgcacttaaacaccaacagtagtacaacagcagcgcatgactaccctccccacaggctggcaaatgcccatgggagccagtgatccagcctgctctagtctgtcagaaaggctgctcaggaccagattacaacctggagaaagccttccaacgcaagagccatccacagccagtttcaccactaatttcaaggattacactaggaacaagagcaaatctaccactatcaccccagactatgcccatcatctccacctctcccgctggaagaggtgacaatctattgtccacacaggagccagagaaaataccttaaaacggatgtcgggtcctgtcagacctttgctcaaaaccctctgaggcttctgatcattatctgaataaaatccaaactccttaccatgacctaaagggttcatagcctggtcccttacccaagccctcctcactatactctgtccacagtacccttctttatttttcttccttgaatatgcaaagcttgagacttctgcttcctgacaaggagcaagaggaaccagatacaccctcctgcctgaaacaaccaaaaaaaatgggcaaaatatatgaaacagtggttttcaagacactacacatggggcaacaaagcacagtgattcctgcgagacaggaaacaaatgtgatgagcccttcaactgccccagcataccacacctgagagtttgcaggccacagaacagaggggagactcatggagagccctgaggactccgtgagttgggaggatgaaactgaaagtccagggagatcaaggcagctagagttcacaggatagagtactggagaaaagagcagagagagaactcgagacctacagaaggtcctcaagtatgcagggg

SEQ ID NO: 293249 - DNA, 1130 bp, Homo sapiens
ggatcaggcccaaaaagcaagggacaaaagggtctccagaagcggaaacaaaagatacaggtggcacctccactcagcgccttggagagcttctgagctccccaaggatgcagcctctgcagttctgcccatgacagaaaagaattgggcgggggggtggcacagtgctgactccagggaacacagatggagctaaggggccccctgaatcaagtcaagggatcacagaccaggactcccacatgcacataagggtcaaaaggtcagagaggctcaaagtttccaaaagaactttggtacagagaagctggcaagatagagcaggcgacaacagttcccacccgaagaatgtcatgcctggagttctcatgtatgtaattcacacttccaggccttccaacgcaagagccatccacagccagtttcaccactaatttcaaggattacactaggaacaagagcaaatctaccactatcaccccagactatgcccatcatctccacctctcccgctggaagaggtgacaatctattgtccacacaggagccagagaaaataccttaaaacggatgtcgggtcctgtcagacctttgctcaaaaccctctgaggcttctgatcattatctgaataaaatccaaactccttaccatgacctaaagggttcatagcctggtcccttacccaagccctcctcactatactctgtccacagtacccttctttatttttcttccttgaatatgcaaagcttgagacttctgcttcctgacaaggagcaagaggaaccagatacaccctcctgcctgaaacaaccaaaaaaaatgggcaaaatatatgaaacagtggttttcaagacactacacatggggcaacaaagcacagtgattcctgcgagacaggaaacaaatgtgatgagcccttcaactgccccagcataccacacctgagagtttgcaggccacagaacagaggggagactcatggagagccctgaggactccgtgagttgggaggatgaaactgaaagtccagggagatcaaggcagctagagttcacaggatagagtactggagaaaagagcagagagagaactcgagacctacagaaggtcctcaagtatgcagggg

SEQ ID NO: 293250 - DNA, 1065 bp, Homo sapiens
aaaacttctagaagataatgtaggagaaaatctagatgaccttaagtttggtgatggcttattagatacaacaccaaaagcacaatccttgaaagaagcaattgataagttctgtgtcattaaaattagaagcttctgctctgcaaaagaattgtcaagagaatgacaatacaagctacagactaggagaacatatttgcaggggacatacctgataagggacttacattcaaaatacacaaagaactgttaaaactcaatagaaaacaacccaattaaagaatgggcaaacgatctgagcagacacctcaccaaagaaaatatacacatagcaaataagcataaggaaagatgctccatatcatatgtcagtagccatttcaaattgaaacaataatgatgtaccactactcacctattagaatggctaaaatccaaagctgacaacatcaaatgctgacaaggaggtggctcaacaggaactgtcattcattgatggtgggaatgcaaaatgacacagctactttgaaagacaatttggcggtttcttgcaaagctaaacatattcttaccatgtgctacagcaatcatgttcttcggtattaacccaaatgagttgaaaacatatagcaacacaaaaacctctgcacagatgtttatagcagctttattcataattgccaaatcttgtaagcaaccaagatgttcttcaacaagtgaatggataaatgaactgtaatatgttcatacaatgaaatacggcagggcttgatggctcatactgttaattatagcactatgggaggccgaggtgggcagatcacttgaggtcaggaattcgagaccagcctggccaacatggtgaaaccccatctctactaaaaatacaaaaattagccgggcacggtggcatgcgcctgcagttgcagccacttgggaggctgaggtgggagaattgcctgaacccataaggcagaggttgcagcgagctgagatggagccactgcactccagcctgggcgacacagtgagattagaagaagcaatattgttaaaatgttcata

SEQ ID NO: 293251 - DNA, 1065 bp, Homo sapiens
ccccgggacgactaggctaggtacgaggcctggtgtctaatcggccgaggggggcggggcagtgcggcgcggctccggttcccggcggccctcgcggcaggtttcgggcttcaggacaattcgtgatggcgggggctggttccgccgctgtatcgggggcagggaccccggtggcggggcccacaggccgcgaccttttcgccgaagggctgctggagttcctgcgacccgctgtgcagcagctcgactctcacgtacacgccgtcagagagagccaggtagagctccgggaacaaattgacaacctagccacagaactgtgccgcataaatgaggatcagaaggtggccctggatcttgacccctatgttaagaagctacttaatgcccggcgacgcgttgtcttggttaacaacattctacagaatgctcaggaacgactgagacggctaaaccacagtgttgccaaggaaacagcccgcaggagagcaatgctggattcgggaatttacccccctggctccccaggcaaataacagatgagcctatggactcagtagcacaagtactgttccccagctgccttgtttcaacagacatgcaaagatcctaggagacagtccccatagaccttcagacattaaaaagggagccgtacagtttgtttgaagcacttcgtcttacccatttatgtaggggccccaggaaacctacacacagccagaatgaggttcccaaaggacttacattaattatggctcttgcttcctttcacaaatgagctgaggcctctacttttttttttaagctgcatacttgaggcttaccttcttcaggactagttaaccagaggggcttcctttgtatgttacatgcctggttacatgggcctggacagcatgtcctctacctgtgacttctcattttcctgtttacactggggatttggagggggcaggcaaagtcaaagtgaatgacctctgtccacccacttttttattgcactggcttgaatacagtagcagtgttgatagaatcattttattcaataaatacttaaaatga

SEQ ID NO: 293252 - DNA, 1238 bp, Homo sapiens
ccccgggacgactaggctaggtacgaggcctggtgtctaatcggccgaggggggcggggcagtgcggcgcggctccggttcccggcggccctcgcggcaggtttcgggcttcaggacaattcgtgatggcgggggctggttccgccgctgtatcgggggcagggaccccggtggcggggcccacaggccgcgaccttttcgccgaagggctgctggagttcctgcgacccgctgtgcagcagctcgactctcacgtacacgccgtcagagagagccaggtagagctccgggaacaaattgacaacctagccacagaactgtgccgcataaatgaggatcagaaggtggccctggatcttgacccctatgttaagaagctacttaatgcccggcgacgcgttgtcttggttaacaacattctacagaatgctcaggaacgactgagacggctaaaccacagtgttgccaaggaaacagcccgcaggagagcaatgctggattcgggaatttacccccctggctccccaggcaaataacagatgagcctatggactcagtagcacaagtactgttccccagctgccttgtttcaacagacatgcaaagatcctaggagacagtccccatagaccttcagacattaaaaagggagccgtacagtttgtttgaagcacttcgtcttacccatttatgtaggggccccaggaaacctacacacagccagaatgaggttcccaaaggacttacattaattatggctcttgcttcctttcacaaatgagctgaggcctctacttttttttttaagctgcatacttgaggcttaccttcttcaggactagttaaccagaggggcttcctttgtatgttacatgcctggttacatgggcctggacagcatgtcctctacctgtgacttctcattttcctgtttacactggggatttggagggggcaggcaaagtcaaagtgaatgacctctgtccacccacttttttattgcactggcttgaatacagtagcagtgttgatagaatcattttattcaataaatacttaaaatgaaaaaaaaaaaaaaaaaaaaaaaaaaaaaaaaaaaaactcgggggctttttttggggggggggaaaaaaggggtttgaaaggggatgggaataggtgtttcgggcccctttttttgtcaaaagggggaaatgggggggccccaagggaggggaaaaaacgaaaccggtaccgag

SEQ ID NO: 293253 - DNA, 1017 bp, Homo sapiens
ccccgggacgactaggctaggtacgaggcctggtgtctaatcggccgaggggggcggggcagtgcggcgcggctccggttcccggcggccctcgcggcaggtttcgggcttcaggacaattcgtgatggcgggggctggttccgccgctgtatcgggggcagggaccccggtggcggggcccacaggccgcgaccttttcgccgaagggctgctggagttcctgcgacccgctgtgcagcagctcgactctcacgtacacgccgtcagagagagccaggtagagctccgggaacaaattgacaacctagccacagaactgtgccgcataaatgaggatcagaaggtggccctggatcttgacccctatgttaagaagctacttaatgcccggcgacgcgttgtcttggttaacaacattctacagaatgctcaggaacgactgagacggctaaaccacagtgttgccaaggaaacagcccgcaggagagcaatgctggattcgggaatttacccccctggctccccaggcaaataacagatgagcctatggactcagtagcacaagtactgttccccagctgccttgtttcaacagacatgcaaagatcctaggagacagtccccatagaccttcagacattaaaaagggagccgtacagtttgtttgaagcacttcgtcttacccatttatgtaggggccccaggaaacctacacacagccagaatgaggttcccaaaggacttacattaattatggctcttgcttcctttcacaaatgagctgaggcctctacttttttttttaagctgcatacttgaggcttaccttcttcaggactagttaaccagaggggcttcctttgtatgttacatgcctggttacatgggcctggacagcatgtcctctacctgtgacttctcattttcctgtttacactgggttggggggcggcaagcaaggaggcccgtccccttttttgcggtgaaaagccggcggaacatccccccattcgcaa

SEQ ID NO: 293254 - DNA, 846 bp, Homo sapiens
ccccgggacgactaggctaggtacgaggcctggtgtctaatcggccgaggggggcggggcagtgcggcgcggctccggttcccggcggccctcgcggcaggtttcgggcttcaggacaattcgtgatggcgggggctggttccgccgctgtatcgggggcagggaccccggtggcggggcccacaggccgcgaccttttcgccgaagggctgctggagttcctgcgacccgctgtgcagcagctcgactctcacgtacacgccgtcagagagagccaggtagagctccgggaacaaattgacaacctagccacagaactgtgccgcataaatgaggatcagaaggtggccctggatcttgacccctatgttaagaagctacttaatgcccggcgacgcgttgtcttggttaacaacattctacagaatgctcaggaacgactgagacggctaaaccacagtgttgccaaggaaacagcccgcaggagagcaatgctggattcgggaatttacccccctggctccccaggcaaataacagatgagcctatggactcagtagcacaagtactgttccccagctgccttgtttcaacagacatgcaaagatcctaggagacagtccccatagaccttcagacattaaaaagggagccgtacagtttgtttgaagcacttcgtcttacccatttatgtaggggccccaggaaacctacacacagccagaatgaggttcccaaaggacttacattaattatggctcttgcttcctttcacaaatgagctgaggcctctacttttttttttaagctgctatgaacttctaataatagggaccagctcgatga

SEQ ID NO: 293255 - DNA, 1018 bp, Homo sapiens
ccccgggacgactaggctaggtacgaggcctggtgtctaatcggccgaggggggcggggcagtgcggcgcggctccggttcccggcggccctcgcggcaggtttcgggcttcaggacaattcgtgatggcgggggctggttccgccgctgtatcgggggcagggaccccggtggcggggcccacaggccgcgaccttttcgccgaagggctgctggagttcctgcgacccgctgtgcagcagctcgactctcacgtacacgccgtcagaactgtgccgcataaatgaggatcagaaggtggccctggatcttgacccctatgttaagaagctacttaatgcccggcgacgcgttgtcttggttaacaacattctacagaatgctcaggaacgactgagacggctaaaccacagtgttgccaaggaaacagcccgcaggagagcaatgctggattcgggaatttacccccctggctccccaggcaaataacagatgagcctatggactcagtagcacaagtactgttccccagctgccttgtttcaacagacatgcaaagatcctaggagacagtccccatagaccttcagacattaaaaagggagccgtacagtttgtttgaagcacttcgtcttacccatttatgtaggggccccaggaaacctacacacagccagaatgaggttcccaaaggacttacattaattatggctcttgcttcctttcacaaatgagctgaggcctctacttttttttttaagctgcatacttgaggcttaccttcttcaggactagttaaccagaggggcttcctttgtatgttacatgcctggttacatgggcctggacagcatgtcctctacctgtgacttctcattttcctgtttacactggggatttggagggggcaggcaaagtcaaagtgaatgacctctgtccacccacttttttattgcactggcttgaatacagtagcagtgttgatagaatcattttattcaataaatacttaaaatga

SEQ ID NO: 293256 - DNA, 1245 bp, Homo sapiens
  misc_feature (154)..(154): n is a, c, g, or t
ggggggccgtcggaagtagtctgatgctcggtctcggttgcccagaggaggtcttcgaagatagggtcatcggtgcttacagctgagtaatttcgtagataggctgtgggtgtgtgatataccgtggtcatgatattcggcgggtcctcggatncctcggttgagtggtgatccaatagtggcagtcagaacctatgtctgacacgagagggtttagttgagatcttcctgcgacccgctgtgcagcagctcgactctcacgtacacgccgtcagagagagccaggtagagctccgggaacaaattgacaacctagccacagaactgtgccgcataaatgaggatcagaaggtggccctggatcttgacccctatgttaagaagctacttaatgcccggcgacgcgttgtcttggttaacaacattctacagaatgctcaggaacgactgagacggctaaaccacagtgttgccaaggaaacagcccgcaggagagcaatgctggattcgggaatttacccccctggctccccaggcaaataacagatgagcctatggactcagtagcacaagtactgttccccagctgccttgtttcaacagacatgcaaagatcctaggagacagtccccatagaccttcagacattaaaaagggagccgtacagtttgtttgaagcacttcgtcttacccatttatgtaggggccccaggaaacctacacacagccagaatgaggttcccaaaggacttacattaattatggctcttgcttcctttcacaaatgagctgaggcctctacttttttttttaagctgcatacttgaggcttaccttcttcaggactagttaaccagaggggcttcctttgtatgttacatgcctggttacatgggcctggacagcatgtcctctacctgtgacttctcattttcctgtttacactggggatttggagggggcaggcaaagtcaaagtgaatgacctctgtccacccacttttttattgcactggcttgaatacagtagcagtgttgatagaatcattttattcaataaatacttaaaatgaaaaaaaaaaaaaaaaaaaaaaaaaaaaaaaaaaaaactcgggggctttttttggggggggggaaaaaaggggtttgaaaggggatgggaataggtgtttcgggcccctttttttgtcaaaagggggaaatgggggggccccaagggaggggaaaaaacgaaaccggtaccgag

SEQ ID NO: 293257 - DNA, 1752 bp, Homo sapiens
ccccgggacgactaggctaggtacgaggcctggtgtctaatcggccgaggggggcggggcagtgcggcgcggctccggttcccggcggccctcgcggcaggtttcgggcttcaggacaattcgtgatggcgggggctggttccgccgctgtatcgggggcagggaccccggtggcggggcccacaggccgcgaccttttcgccgaagggctgctggagttcctgcgacccgctgtgcagcagctcgactctcacgtacacgccgtcaggtgcccgggagggaagttgggggcggggcctgtctctctggctttgtaggggcggggccaagaaagtgttctggctgggagtgggcataaatttaggaaactgattcgaggcggggaggacaggcgggaaggccgcaggtggagggttcagcggaggccggcttctctcagtacttggtaaatacgtaggggagttcgtttcctgagctccggtaactgcctgaccttgtaggccttgtacctctttgcagagagagccaggtagagctccgggaacaaattgacaacctagccacaggtgagtgagcatccctgtgtacccggaattcttcagcccactttcaggaccttaggtttttgccaacccctgggctgagtttctgtcacttgcttccagggcatcagggctgccaaaggactcctcctttcagggatgtcttaaatctctaatggctgtggcccgtttgggtgcaagtgttttccatcccattaccagcctgctttccctcagaacaagagataagccgttagatcttagctgcaccttacttccatccccagaactgtgccgcataaatgaggatcagaaggtggccctggatcttgacccctatgttaagaagctacttaatgcccggcgacgcgttgtcttggttaacaacattctacagaatgctcaggaacgactgagacggctaaaccacagtgttgccaaggaaacagcccgcaggagagcaatgctggattcgggaatttacccccctggctccccaggcaaataacagatgagcctatggactcagtagcacaagtactgttccccagctgccttgtttcaacagacatgcaaagatcctaggagacagtccccatagaccttcagacattaaaaagggagccgtacagtttgtttgaagcacttcgtcttacccatttatgtaggggccccaggaaacctacacacagccagaatgaggttcccaaaggacttacattaattatggctcttgcttcctttcacaaatgagctgaggcctctacttttttttttaagctgcatacttgaggcttaccttcttcaggactagttaaccagaggggcttcctttgtatgttacatgcctggttacatgggcctggacagcatgtcctctacctgtgacttctcattttcctgtttacactggggatttggagggggcaggcaaagtcaaagtgaatgacctctgtccacccacttttttattgcactggcttgaatacagtagcagtgttgatagaatcattttattcaataaatacttaaaatgaaaaaaaaaaaaaaaaaaaaaaaaaaaaaaaaaaaaactcgggggctttttttggggggggggaaaaaaggggtttgaaaggggatgggaataggtgtttcgggcccctttttttgtcaaaagggggaaatgggggggccccaagggaggggaaaaaacgaaaccggtaccgag

SEQ ID NO: 293258 - DNA, 1012 bp, Homo sapiens
ccccgggacgactaggctaggtacgaggcctggtgtctaatcggccgaggggggcggggcagtgcggcgcggctccggttcccggcggccctcgcggcaggtttcgggcttcaggacaattcgtgatggcgggggctggttccgccgctgtatcgggggcagggaccccggtggcggggcccacaggccgcgaccttttcgccgaagggctgctggagttcctgcgacccgctgtgcagcagctcgactctcacgtacacgccgtcagagagagccaggtagagctccgggaacaaattgacaacctagccacagaactgtgccgcataaatgaggatcagaaggtggccctggatcttgacccctatgttaagaagctacttaatgcccggcgacgcgttgtcttggttaacaacattctacagaatgctcaggaacgactgagacggctaaaccacagtgttgccaaggaaacagcccgcaggagagcaatgctggattcgggaatttacccccctggctccccaggcaaataacagatgagcctatggactcagtagcacaagtactgttccccagctgccttgtttcaacagacatgcaaagatcctaggagacagtccccatagaccttcagacattagggccccaggaaacctacacacagccagaatgaggttcccaaaggacttacattaattatggctcttgcttcctttcacaaatgagctgaggcctctacttttttttttaagctgcatacttgaggcttaccttcttcaggactagttaaccagaggggcttcctttgtatgttacatgcctggttacatgggcctggacagcatgtcctctacctgtgacttctcattttcctgtttacactggggatttggagggggcaggcaaagtcaaagtgaatgacctctgtccacccacttttttattgcactggcttgaatacagtagcagtgttgatagaatcattttattcaataaatacttaaaatga

SEQ ID NO: 293259 - DNA, 1489 bp, Homo sapiens
ccccgggacgactaggctaggtacgaggcctggtgtctaatcggccgaggggggcggggcagtgcggcgcggctccggttcccggcggccctcgcggcaggtttcgggcttcaggacaattcgtgatggcgggggctggttccgccgctgtatcgggggcagggaccccggtggcggggcccacaggccgcgaccttttcgccgaagggctgctggagttcctgcgacccgctgtgcagcagctcgactctcacgtacacgccgtcaggtgcccgggagggaagttgggggcggggcctgtctctctggctttgtaggggcggggccaagaaagtgttctggctgggagtgggcataaatttaggaaactgattcgaggcggggaggacaggcgggaaggccgcaggtggagggttcagcggaggccggcttctctcagtacttggtaaatacgtaggggagttcgtttcctgagctccggtaactgcctgaccttgtaggccttgtacctctttgcagagagagccaggtagagctccgggaacaaattgacaacctagccacagaactgtgccgcataaatgaggatcagaaggtggccctggatcttgacccctatgttaagaagctacttaatgcccggcgacgcgttgtcttggttaacaacattctacagaatgctcaggaacgactgagacggctaaaccacagtgttgccaaggaaacagcccgcaggagagcaatgctggattcgggaatttacccccctggctccccaggcaaataacagatgagcctatggactcagtagcacaagtactgttccccagctgccttgtttcaacagacatgcaaagatcctaggagacagtccccatagaccttcagacattaaaaagggagccgtacagtttgtttgaagcacttcgtcttacccatttatgtaggggccccaggaaacctacacacagccagaatgaggttcccaaaggacttacattaattatggctcttgcttcctttcacaaatgagctgaggcctctacttttttttttaagctgcatacttgaggcttaccttcttcaggactagttaaccagaggggcttcctttgtatgttacatgcctggttacatgggcctggacagcatgtcctctacctgtgacttctcattttcctgtttacactggggatttggagggggcaggcaaagtcaaagtgaatgacctctgtccacccacttttttattgcactggcttgaatacagtagcagtgttgatagaatcattttattcaataaatacttaaaatgaaaaaaaaaaaaaaaaaaaaaaaaaaaaaaaaaaaaactcgggggctttttttggggggggggaaaaaaggggtttgaaaggggatgggaataggtgtttcgggcccctttttttgtcaaaagggggaaatgggggggccccaagggaggggaaaaaacgaaaccggtaccgag

SEQ ID NO: 293260 - DNA, 973 bp, Homo sapiens
tcaggagtctataaaggcgagtcgggtagaacttgacaagttagccacagaactgtgccgcataaatgaggatcagaaggtggccctggatcttgacccctatgttaagaagctacttaatgcccggcgacgcgttgtcttggttaacaacattctacagaatgctcaggaacgactgagacggctaaaccacagtgttgccaaggaaacagcccgcaggagagcaatgctggattcgggaatttacccccctggctccccaggcaaataacagatgagcctatggactcagtagcacaagtactgttccccagctgccttgtttcaacagacatgcaaagatcctaggagacagtccccatagaccttcagacattaaaaagggagccgtacagtttgtttgaagcacttcgtcttacccatttatgtaggggccccaggaaacctacacacagccagaatgaggttcccaaaggacttacattaattatggctcttgcttcctttcacaaatgagctgaggcctctacttttttttttaagctgcatacttgaggcttaccttcttcaggactagttaaccagaggggcttcctttgtatgttacatgcctggttacatgggcctggacagcatgtcctctacctgtgacttctcattttcctgtttacactggggatttggagggggcaggcaaagtcaaagtgaatgacctctgtccacccacttttttattgcactggcttgaatacagtagcagtgttgatagaatcattttattcaataaatacttaaaatgaaaaaaaaaaaaaaaaaaaaaaaaaaaaaaaaaaaaactcgggggctttttttggggggggggaaaaaaggggtttgaaaggggatgggaataggtgtttcgggcccctttttttgtcaaaagggggaaatgggggggccccaagggaggggaaaaaacgaaaccggtaccgag

SEQ ID NO: 293261 - DNA, 588 bp, Homo sapiens
tttcaatcgtctactttccttttaatatatgtagcatttcagagtacataaggctcatgaaagaggaggtacagatcctccggggggaaaacctggttaagcctaaagcatagtggaaaatggaaagatcaacaattagtacagaacagaaaaatgattttgaggattgtattaaggaagttttaaagaacaagaaatcagctctagaaaataaatgtattttaggagtgacaaggccagtccctggaaatacatttgactattaaatttttatttaacttcttcacccaaaattaaacagttccacctgagggagaacttgatgcggacttaaggaagacactcatattacgtgctggagttactatgagactatatgtaccagtaaaaggacgcccacctccaaagattacttggtctaaaccaaatgtcaatctaagagacaggattggactggacataaagtcaactgactttgacactttcttgcgctgtgaaaatgtgaacaaatatgatgcaggaaaatatatcttaaccctggagaacagctgtggtaaaaaggaatataccattgttgtgaaagtgctt

SEQ ID NO: 293262 - DNA, 430 bp, Homo sapiens
acagaatctacagaaaacccgctttgaggttactggcctgatggaagacacacaatatcaattccgtgtgtatgccgttaataagattggatacagtgaccccagtgatgtgccagataaacactatcccaaggacatcttaattccacctgagggagaacttgatgcggacttaaggaagacactcatattacgtgctggagttactatgagactatatgtaccagtaaaaggacgcccacctccaaagattacttggtctaaaccaaatgtcaatctaagagacaggattggactggacataaagtcaactgactttgacactttcttgcgctgtgaaaatgtgaacaaatatgatgcaggaaaatatatcttaaccctggagaacagctgtggtaaaaaggaatataccattgttgtgaaagtgctt

SEQ ID NO: 293263 - DNA, 3527 bp, Homo sapiens
taggctacgcctcggcctctccgctcgggtcactgcgcatgcgcaggaacgcaagctagcgctttggtgtgcgtgttcgtttttccctttgaatggccgtttacggcaccggcaggccccggatgaaagaactgaaatccagaaaagttcacatgcaacgaacaatgggacagaattggaaccagtgaagccggaactcactacaccgtcccctaagtgacgccaaaatgcactttctaacgtctccggagggaagtgcgcttgcgcaaatgctaggttacacttgagtaactccgggaatgactgggtgggtggggcggggaacagtaacggtctcctattggatggcagcctaaactcgcaggccagctaattggacgcaatcagaacccagcattctttcttcgtgttcctgtgcgggattggtgtgcccaggggtttggctttccaattggctaacgccggggtgggtggggaatgtggggagatttgaatttgaaaccggtagggagtgataatccgcattcagttgtcgaggagtgccagtcaccttcagtttctggagctggccgtcaacatgtcctttcctaaggcgcccttgaaacgattcaatgacccttctggttgtgcaccatctccaggtgcttatgatgttaaaactttagaagtattgaaaggaccagtatcctttcagaaatcacaaagatttaaacaacaaaaagaatctaaacaaaatcttaatgttgacaaagatactaccttgcctgcttcagctagaaaagttaagtcttcggaatcaaagaaggaatctcaaaagaatgataaagatttgaagatattagagaaagagattcgtgttcttctacaggaacgtggtgcccaggacaggcggatccaggatctggaaactgagttggaaaagatggaagcaaggctaaatgctgcactaagggaaaaaacatctctctctgcaaataatgctacactggaaaaacaacttattgaattgaccaggactaatgaactactaaaatctaagttttctgaaaatggtaaccagaagaatttgagaattctaagcttggagttgatgaaacttagaaacaaaagagaaacaaagatgaggggtatgatggctaagcaagaaggcatggagatgaagctgcaggtcacccaaaggagtctcgaagagtctcaagggaaaatagcccaactggagggaaaacttgtttcaatagagaaagaaaagattgatgaaaaatctgaaacagaaaaactcttggaatacatcgaagaaattagttgtgcttcagatcaagtggaaaaatacaagctagatattgcccagttagaagaaaatttgaaagagaagaatgatgaaattttaagccttaagcagtctcttgaggagaatattgttatattatctaaacaagtagaagatctaaatgtgaaatgtcagctgcttgaaaaagaaaaagaagaccatgtcaacaggaatagagaacacaacgaaaatctaaatgcagagatgcaaaacttaaaacagaagtttattcttgaacaacaggaacgtgaaaagcttcaacaaaaagaattacaaattgattcacttctgcaacaagagaaagaattatcttcgagtcttcatcagaagctctgttcttttcaagaggaaatggttaaagagaagaatctgtttgaggaagaattaaagcaaacactggatgagcttgataaattacagcaaaaggaggaacaagctgaaaggctggtcaagcaattggaagaggaagcaaaatctagagctgaagaattaaaactcctagaagaaaagctgaaagggaaggaggctgaactggagaaaagtagtgctgctcatacccaggccaccctgcttttgcaggaaaagtatgacagtatggtgcaaagccttgaagatgttactgctcaatttgaaagctataaagcgttaacagccagtgagatagaagatcttaagctggagaactcatcattacaggaaaaagcggccaaggctgggaaaaatgcagaggatgttcagcatcagattttggcaactgagagctcaaatcaagaatatgtaaggatgcttctagatctgcagaccaagtcagcactaaaggaaacagaaattaaagaaatcacagtttcttttcttcaaaaaataactgatttgcagaaccaactcaagcaacaggaggaagactttagaaaacagctggaagatgaagaaggaagaaaagctgaaaaagaaaatacaacagcagaattaactgaagaaattaacaagtggcgtctcctctatgaagaactatataataaaacaaaaccttttcagctacaactagatgcttttgaagtagaaaaacaggcattgttgaatgaacatggtgcagctcaggaacagctaaataaaataagagattcatatgctaaattattgggtcatcagaatttgaaacaaaaaatcaagcatgttgtgaagttgaaagatgaaaatagccaactcaaatcggaagtatcaaaactccgctgtcagcttgctaaaaaaaaacaaagtgagacaaaacttcaagaggaattgaataaagttctaggtatcaaacactttgatccttcaaaggcttttcatcatgaaagtaaagaaaattttgccctgaagaccccattaaaagaaggcaatacaaactgttaccgagctcctatggagtgtcaagaatcatggaagtaaacatctgagaaacctgttgaagattatttcattcgtcttgttgttattgatgttgctgttattatatttgacatgggtattttataatgttgtatttaattttaactgccaatccttaaatatgtgaaaggaacattttttaccaaagtgtcttttgacattttattttttcttgcaaatacctcctccctaatgctcacctttatcacctcattctgaaccctttcgctggctttccagcttagaatgcatctcatcaacttaaaagtcagtatcatattattatcctcctgttctgaaaccttagtttcaagagtctaaaccccagattcttcagcttgatcctggaggtcttttctagtctgagcttctttagctaggctaaaacaccttggcttgttattgcctctactttgattctgataatgctcacttggtcctacctattatccttctacttgtccagttcaaataagaaataaggacaagcctaacttcatagaaacctctctatttttaatcagttgtttaataatttacaggttcttaggctccatcctgtttgtatgaaattataatctgtggattggcctttaagcctgcattcttaacaaactcttcagttaattcttagatacactaaaaatctgagaaactctacatgtaactatttcttcagagtttgtcatatactgcttgtcatctgcatgtctactcagcatttgattaacatttgtgtaatatgaaataaaattacacagtaagtcattta

SEQ ID NO: 293264 - DNA, 3479 bp, Homo sapiens
taggctacgcctcggcctctccgctcgggtcactgcgcatgcgcaggaacgcaagctagcgctttggtgtgcgtgttcgtttttccctttgaatggccgtttacggcaccggcaggccccggatgaaagaactgaaatccagaaaagttcacatgcaacgaacaatgggacagaattggaaccagtgaagccggaactcactacaccgtcccctaagtgacgccaaaatgcactttctaacgtctccggagggaagtgcgcttgcgcaaatgctaggttacacttgagtaactccgggaatgactgggtgggtggggcggggaacagtaacggtctcctattggatggcagcctaaactcgcaggccagctaattggacgcaatcagaacccagcattctttcttcgtgttcctgtgcgggattggtgtgcccaggggtttggctttccaattggctaacgccggggtgggtggggaatgtggggagatttgaatttgaaaccggtagggagtgataatccgcattcagttgtcgaggagtgccagtcaccttcagtttctggagctggccgtcaacatgtcctttcctaaggcgcccttgaaacgattcaatgacccttctggttgtgcaccatctccaggtgcttatgatgttaaaactttagaagtattgaaaggaccagtatcctttcagaaatcacaaagatttaaacaacaaaaagaatctaaacaaaatcttaatgttgacaaagatactaccttgcctgcttcagctagaaaagttaagtcttcggaatcaaagattcgtgttcttctacaggaacgtggtgcccaggacaggcggatccaggatctggaaactgagttggaaaagatggaagcaaggctaaatgctgcactaagggaaaaaacatctctctctgcaaataatgctacactggaaaaacaacttattgaattgaccaggactaatgaactactaaaatctaagttttctgaaaatggtaaccagaagaatttgagaattctaagcttggagttgatgaaacttagaaacaaaagagaaacaaagatgaggggtatgatggctaagcaagaaggcatggagatgaagctgcaggtcacccaaaggagtctcgaagagtctcaagggaaaatagcccaactggagggaaaacttgtttcaatagagaaagaaaagattgatgaaaaatctgaaacagaaaaactcttggaatacatcgaagaaattagttgtgcttcagatcaagtggaaaaatacaagctagatattgcccagttagaagaaaatttgaaagagaagaatgatgaaattttaagccttaagcagtctcttgaggagaatattgttatattatctaaacaagtagaagatctaaatgtgaaatgtcagctgcttgaaaaagaaaaagaagaccatgtcaacaggaatagagaacacaacgaaaatctaaatgcagagatgcaaaacttaaaacagaagtttattcttgaacaacaggaacgtgaaaagcttcaacaaaaagaattacaaattgattcacttctgcaacaagagaaagaattatcttcgagtcttcatcagaagctctgttcttttcaagaggaaatggttaaagagaagaatctgtttgaggaagaattaaagcaaacactggatgagcttgataaattacagcaaaaggaggaacaagctgaaaggctggtcaagcaattggaagaggaagcaaaatctagagctgaagaattaaaactcctagaagaaaagctgaaagggaaggaggctgaactggagaaaagtagtgctgctcatacccaggccaccctgcttttgcaggaaaagtatgacagtatggtgcaaagccttgaagatgttactgctcaatttgaaagctataaagcgttaacagccagtgagatagaagatcttaagctggagaactcatcattacaggaaaaagcggccaaggctgggaaaaatgcagaggatgttcagcatcagattttggcaactgagagctcaaatcaagaatatgtaaggatgcttctagatctgcagaccaagtcagcactaaaggaaacagaaattaaagaaatcacagtttcttttcttcaaaaaataactgatttgcagaaccaactcaagcaacaggaggaagactttagaaaacagctggaagatgaagaaggaagaaaagctgaaaaagaaaatacaacagcagaattaactgaagaaattaacaagtggcgtctcctctatgaagaactatataataaaacaaaaccttttcagctacaactagatgcttttgaagtagaaaaacaggcattgttgaatgaacatggtgcagctcaggaacagctaaataaaataagagattcatatgctaaattattgggtcatcagaatttgaaacaaaaaatcaagcatgttgtgaagttgaaagatgaaaatagccaactcaaatcggaagtatcaaaactccgctgtcagcttgctaaaaaaaaacaaagtgagacaaaacttcaagaggaattgaataaagttctaggtatcaaacactttgatccttcaaaggcttttcatcatgaaagtaaagaaaattttgccctgaagaccccattaaaagaaggcaatacaaactgttaccgagctcctatggagtgtcaagaatcatggaagtaaacatctgagaaacctgttgaagattatttcattcgtcttgttgttattgatgttgctgttattatatttgacatgggtattttataatgttgtatttaattttaactgccaatccttaaatatgtgaaaggaacattttttaccaaagtgtcttttgacattttattttttcttgcaaatacctcctccctaatgctcacctttatcacctcattctgaaccctttcgctggctttccagcttagaatgcatctcatcaacttaaaagtcagtatcatattattatcctcctgttctgaaaccttagtttcaagagtctaaaccccagattcttcagcttgatcctggaggtcttttctagtctgagcttctttagctaggctaaaacaccttggcttgttattgcctctactttgattctgataatgctcacttggtcctacctattatccttctacttgtccagttcaaataagaaataaggacaagcctaacttcatagaaacctctctatttttaatcagttgtttaataatttacaggttcttaggctccatcctgtttgtatgaaattataatctgtggattggcctttaagcctgcattcttaacaaactcttcagttaattcttagatacactaaaaatctgagaaactctacatgtaactatttcttcagagtttgtcatatactgcttgtcatctgcatgtctactcagcatttgattaacatttgtgtaatatgaaataaaattacacagtaagtcattta

SEQ ID NO: 293265 - DNA, 3620 bp, Homo sapiens
taggctacgcctcggcctctccgctcgggtcactgcgcatgcgcaggaacgcaagctagcgctttggtgtgcgtgttcgtttttccctttgaatggccgtttacggcaccggcaggccccggatgaaagaactgaaatccagaaaagttcacatgcaacgaacaatgggacagaattggaaccagtgaagccggaactcactacaccgtcccctaagtgacgccaaaatgcactttctaacgtctccggagggaagtgcgcttgcgcaaatgctaggttacacttgagtaactccgggaatgactgggtgggtggggcggggaacagtaacggtctcctattggatggcagcctaaactcgcaggccagctaattggacgcaatcagaacccagcattctttcttcgtgttcctgtgcgggattggtgtgcccaggggtttggctttccaattggctaacgccggggtgggtggggaatgtggggagatttgaatttgaaaccggtagggagtgataatccgcattcagttgtcgaggagtgccagtcaccttcagtttctggagctggccgtcaacatgtcctttcctaaggcgcccttgaaacgattcaatgacccttctggttgtgcaccatctccaggtgcttatgatgttaaaactttagaagtattgaaaggaccagtatcctttcagaaatcacaaagatttaaacaacaaaaagaatctaaacaaaatcttaatgttgacaaagatactaccttgcctgcttcagctagaaaagttaagtcttcggaatcaaagaaggaatctcaaaagaatgataaagatttgaagatattagagaaagagattcgtgttcttctacaggaacgtggtgcccaggacaggcggatccaggatctggaaactgagttggaaaagatggaagcaaggctaaatgctgcactaagggaaaaaacatctctctctgcaaataatgctacactggaaaaacaacttattgaattgaccaggactaatgaactactaaaatctaagttttctgaaaatggtaaccagaagaatttgagaattctaagcttggagttgatgaaacttagaaacaaaagagaaacaaagatgaggggtatgatggctaagcaagaaggcatggagatgaagctgcaggtcacccaaaggagtctcgaagagtctcaagggaaaatagcccaactggagggaaaacttgtttcaatagagaaagaaaagattgatgaaaaatctgaaacagaaaaactcttggaatacatcgaagaaattagttgtgcttcagatcaagtggaaaaatacaagctagatattgcccagttagaagaaaatttgaaagagaagaatgatgaaattttaagccttaagcagtctcttgaggagaatattgttatattatctaaacaagtagaagatctaaatgtgaaatgtcagctgcttgaaaaagaaaaagaagaccatgtcaacaggaatagagaacacaacgaaaatctaaatgcagagatgcaaaacttaaaacagaagtttattcttgaacaacaggaacgtgaaaagcttcaacaaaaagaattacaaattgattcacttctgcaacaagagaaagaattatcttcgagtcttcatcagaagctctgttcttttcaagaggaaatggttaaagagaagaatctgtttgaggaagaattaaagcaaacactggatgagcttgataaattacagcaaaaggaggaacaagctgaaaggctggtcaagcaattggaagaggaagcaaaatctagagctgaagaattaaaactcctagaagaaaagctgaaagggaaggaggctgaactggagaaaagtagtgctgctcatacccaggccaccctgcttttgcaggaaaagtatgacagtatggtgcaaagccttgaagatgttactgctcaatttgaaagctataaagcgttaacagccagtgagatagaagatcttaagctggagaactcatcattacaggaaaaagcggccaaggctgggaaaaatgcagaggatgttcagcatcagattttggcaactgagagctcaaatcaagaatatgtaaggatgcttctagatctgcagaccaagtcagcactaaaggaaacagaaattaaagaaatcacagtttcttttcttcaaaaaataactgatttgcagaaccaactcaagcaacaggaggaagactttagaaaacagctggaagatgaagaaggaagaaaagctgaaaaagaaaatacaacagcagaattaactgaagaaattaacaagtggcgtctcctctatgaagaactatataataaaacaaaaccttttcagctacaactagatgcttttgaagtagaaaaacaggcattgttgaatgaacatggtgcagctcaggaacagctaaataaaataagagattcatatgctaaattattgggtcatcagaatttgaaacaaaaaatcaagcatgttgtgaagttgaaagatgaaaatagccaactcaaatcggaagtatcaaaactccgctgtcagcttgctaaaaaaaaacaaagtgagacaaaacttcaagaggaattgaataaagttctaggtatcaaacactttgatccttcaaaggcttttcatcatgaaagtaaagaaaattttgccctgaagaccccattaaaagaaggcaatacaaactgttaccgagctcctatggagtgtcaagaatcatggaagtaaacatctgagaaacctgttgaagattatttcattcgtcttgttgttattgatgttgctgttattatatttgacatgggtattttataatgttgtatttaattttaactgccaatccttaaatatgtgaaaggaacattttttaccaaagtgtcttttgacattttattttttcttgcaaatacctcctccctaatgctcacctttatcacctcattctgaaccctttcgctggctttccagcttagaatgcatctcatcaacttaaaagtcagtatcatattattatcctcctgttctgaaaccttagtttcaagagtctaaaccccagattcttcagcttgatcctggaggtcttttctagtctgagcttctttagctaggctaaaacaccttggcttgttattgcctctactttgattctgataatgctcacttggtcctacctattatccttctacttgtccagttcaaataagaaataaggacaagcctaacttcatagaaacctctctatttttaatcagttgtttaataatttacaggttcttaggctccatcctgtttgtatgaaattataatctgtggattggcctttaagcctgcattcttaacaaactcttcagttaattcttagatacactaaaaatctgagaaactctacatgtaactatttcttcagagtttgtcatatactgcttgtcatctgcatgtctactcagcatttgattaacatttgtgtaatatgaaataaaattacacagtaagtcatttacacacacaccaaccacaacacaagcagacaaaataacaacaacaaacaggataaccaaaacaaaaacaaaaaaactgggtgcggcccaccaca

SEQ ID NO: 293266 - DNA, 3107 bp, Homo sapiens
taggctacgcctcggcctctccgctcgggtcactgcgcatgcgcaggaacgcaagctagcgctttggtgtgcgtgttcgtttttccctttgaatggccgtttacggcaccggcaggccccggatgaaagaactgaaatccagaaaagttcacatgcaacgaacaatgggacagaattggaaccagtgaagccggaactcactacaccgtcccctaagtgacgccaaaatgcactttctaacgtctccggaggttgtgcaccatctccaggtgcttatgatgttaaaactttagaagtattgaaaggaccagtatcctttcagaaatcacaaagatttaaacaacaaaaagaatctaaacaaaatcttaatgttgacaaagatactaccttgcctgcttcagctagaaaagttaagtcttcggaatcaaagattcgtgttcttctacaggaacgtggtgcccaggacaggcggatccaggatctggaaactgagttggaaaagatggaagcaaggctaaatgctgcactaagggaaaaaacatctctctctgcaaataatgctacactggaaaaacaacttattgaattgaccaggactaatgaactactaaaatctaagttttctgaaaatggtaaccagaagaatttgagaattctaagcttggagttgatgaaacttagaaacaaaagagaaacaaagatgaggggtatgatggctaagcaagaaggcatggagatgaagctgcaggtcacccaaaggagtctcgaagagtctcaagggaaaatagcccaactggagggaaaacttgtttcaatagagaaagaaaagattgatgaaaaatctgaaacagaaaaactcttggaatacatcgaagaaattagttgtgcttcagatcaagtggaaaaatacaagctagatattgcccagttagaagaaaatttgaaagagaagaatgatgaaattttaagccttaagcagtctcttgaggagaatattgttatattatctaaacaagtagaagatctaaatgtgaaatgtcagctgcttgaaaaagaaaaagaagaccatgtcaacaggaatagagaacacaacgaaaatctaaatgcagagatgcaaaacttaaaacagaagtttattcttgaacaacaggaacgtgaaaagcttcaacaaaaagaattacaaattgattcacttctgcaacaagagaaagaattatcttcgagtcttcatcagaagctctgttcttttcaagaggaaatggttaaagagaagaatctgtttgaggaagaattaaagcaaacactggatgagcttgataaattacagcaaaaggaggaacaagctgaaaggctggtcaagcaattggaagaggaagcaaaatctagagctgaagaattaaaactcctagaagaaaagctgaaagggaaggaggctgaactggagaaaagtagtgctgctcatacccaggccaccctgcttttgcaggaaaagtatgacagtatggtgcaaagccttgaagatgttactgctcaatttgaaagctataaagcgttaacagccagtgagatagaagatcttaagctggagaactcatcattacaggaaaaagcggccaaggctgggaaaaatgcagaggatgttcagcatcagattttggcaactgagagctcaaatcaagaatatgtaaggatgcttctagatctgcagaccaagtcagcactaaaggaaacagaaattaaagaaatcacagtttcttttcttcaaaaaataactgatttgcagaaccaactcaagcaacaggaggaagactttagaaaacagctggaagatgaagaaggaagaaaagctgaaaaagaaaatacaacagcagaattaactgaagaaattaacaagtggcgtctcctctatgaagaactatataataaaacaaaaccttttcagctacaactagatgcttttgaagtagaaaaacaggcattgttgaatgaacatggtgcagctcaggaacagctaaataaaataagagattcatatgctaaattattgggtcatcagaatttgaaacaaaaaatcaagcatgttgtgaagttgaaagatgaaaatagccaactcaaatcggaagtatcaaaactccgctgtcagcttgctaaaaaaaaacaaagtgagacaaaacttcaagaggaattgaataaagttctaggtatcaaacactttgatccttcaaaggcttttcatcatgaaagtaaagaaaattttgccctgaagaccccattaaaagaaggcaatacaaactgttaccgagctcctatggagtgtcaagaatcatggaagtaaacatctgagaaacctgttgaagattatttcattcgtcttgttgttattgatgttgctgttattatatttgacatgggtattttataatgttgtatttaattttaactgccaatccttaaatatgtgaaaggaacattttttaccaaagtgtcttttgacattttattttttcttgcaaatacctcctccctaatgctcacctttatcacctcattctgaaccctttcgctggctttccagcttagaatgcatctcatcaacttaaaagtcagtatcatattattatcctcctgttctgaaaccttagtttcaagagtctaaaccccagattcttcagcttgatcctggaggtcttttctagtctgagcttctttagctaggctaaaacaccttggcttgttattgcctctactttgattctgataatgctcacttggtcctacctattatccttctacttgtccagttcaaataagaaataaggacaagcctaacttcatagaaacctctctatttttaatcagttgtttaataatttacaggttcttaggctccatcctgtttgtatgaaattataatctgtggattggcctttaagcctgcattcttaacaaactcttcagttaattcttagatacactaaaaatctgagaaactctacatgtaactatttcttcagagtttgtcatatactgcttgtcatctgcatgtctactcagcatttgattaacatttgtgtaatatgaaataaaattacacagtaagtcattta

SEQ ID NO: 293267 - DNA, 3399 bp, Homo sapiens
taggctacgcctcggcctctccgctcgggtcactgcgcatgcgcaggaacgcaagctagcgctttggtgtgcgtgttcgtttttccctttgaatggccgtttacggcaccggcaggccccggatgaaagaactgaaatccagaaaagttcacatgcaacgaacaatgggacagaattggaaccagtgaagccggaactcactacaccgtcccctaagtgacgccaaaatgcactttctaacgtctccggagggaagtgcgcttgcgcaaatgctaggttacacttgagtaactccgggaatgactgggtgggtggggcggggaacagtaacggtctcctattggatggcagcctaaactcgcaggccagctaattggacgcaatcagaacccagcattctttcttcgtgttcctgtgcgggattggtgtgcccaggggtttggctttccaattggctaacgccggggtgggtggggaatgtggggagatttgaatttgaaaccggtagggagtgataatccgcattcagttgtcgaggagtgccagtcaccttcagtttctggagctggccgtcaacatgtcctttcctaaggcgcccttgaaacgattcaatgacccttctggttgtgcaccatctccaggtgcttatgatgttaaaactttagaagtattgaaaggaccagtatcctttcagaaatcacaaagatttaaacaacaaaaagattcgtgttcttctacaggaacgtggtgcccaggacaggcggatccaggatctggaaactgagttggaaaagatggaagcaaggctaaatgctgcactaagggaaaaaacatctctctctgcaaataatgctacactggaaaaacaacttattgaattgaccaggactaatgaactactaaaatctaagttttctgaaaatggtaaccagaagaatttgagaattctaagcttggagttgatgaaacttagaaacaaaagagaaacaaagatgaggggtatgatggctaagcaagaaggcatggagatgaagctgcaggtcacccaaaggagtctcgaagagtctcaagggaaaatagcccaactggagggaaaacttgtttcaatagagaaagaaaagattgatgaaaaatctgaaacagaaaaactcttggaatacatcgaagaaattagttgtgcttcagatcaagtggaaaaatacaagctagatattgcccagttagaagaaaatttgaaagagaagaatgatgaaattttaagccttaagcagtctcttgaggagaatattgttatattatctaaacaagtagaagatctaaatgtgaaatgtcagctgcttgaaaaagaaaaagaagaccatgtcaacaggaatagagaacacaacgaaaatctaaatgcagagatgcaaaacttaaaacagaagtttattcttgaacaacaggaacgtgaaaagcttcaacaaaaagaattacaaattgattcacttctgcaacaagagaaagaattatcttcgagtcttcatcagaagctctgttcttttcaagaggaaatggttaaagagaagaatctgtttgaggaagaattaaagcaaacactggatgagcttgataaattacagcaaaaggaggaacaagctgaaaggctggtcaagcaattggaagaggaagcaaaatctagagctgaagaattaaaactcctagaagaaaagctgaaagggaaggaggctgaactggagaaaagtagtgctgctcatacccaggccaccctgcttttgcaggaaaagtatgacagtatggtgcaaagccttgaagatgttactgctcaatttgaaagctataaagcgttaacagccagtgagatagaagatcttaagctggagaactcatcattacaggaaaaagcggccaaggctgggaaaaatgcagaggatgttcagcatcagattttggcaactgagagctcaaatcaagaatatgtaaggatgcttctagatctgcagaccaagtcagcactaaaggaaacagaaattaaagaaatcacagtttcttttcttcaaaaaataactgatttgcagaaccaactcaagcaacaggaggaagactttagaaaacagctggaagatgaagaaggaagaaaagctgaaaaagaaaatacaacagcagaattaactgaagaaattaacaagtggcgtctcctctatgaagaactatataataaaacaaaaccttttcagctacaactagatgcttttgaagtagaaaaacaggcattgttgaatgaacatggtgcagctcaggaacagctaaataaaataagagattcatatgctaaattattgggtcatcagaatttgaaacaaaaaatcaagcatgttgtgaagttgaaagatgaaaatagccaactcaaatcggaagtatcaaaactccgctgtcagcttgctaaaaaaaaacaaagtgagacaaaacttcaagaggaattgaataaagttctaggtatcaaacactttgatccttcaaaggcttttcatcatgaaagtaaagaaaattttgccctgaagaccccattaaaagaaggcaatacaaactgttaccgagctcctatggagtgtcaagaatcatggaagtaaacatctgagaaacctgttgaagattatttcattcgtcttgttgttattgatgttgctgttattatatttgacatgggtattttataatgttgtatttaattttaactgccaatccttaaatatgtgaaaggaacattttttaccaaagtgtcttttgacattttattttttcttgcaaatacctcctccctaatgctcacctttatcacctcattctgaaccctttcgctggctttccagcttagaatgcatctcatcaacttaaaagtcagtatcatattattatcctcctgttctgaaaccttagtttcaagagtctaaaccccagattcttcagcttgatcctggaggtcttttctagtctgagcttctttagctaggctaaaacaccttggcttgttattgcctctactttgattctgataatgctcacttggtcctacctattatccttctacttgtccagttcaaataagaaataaggacaagcctaacttcatagaaacctctctatttttaatcagttgtttaataatttacaggttcttaggctccatcctgtttgtatgaaattataatctgtggattggcctttaagcctgcattcttaacaaactcttcagttaattcttagatacactaaaaatctgagaaactctacatgtaactatttcttcagagtttgtcatatactgcttgtcatctgcatgtctactcagcatttgattaacatttgtgtaatatgaaataaaattacacagtaagtcattta

SEQ ID NO: 293268 - DNA, 1407 bp, Homo sapiens
cctagttttagaagtttcaatagcaggaaacagaaattaaagaaatcacagtttcttttcttcaaaaaataactgatttgcagaaccaactcaagcaacaggaggaagactttagaaaacagctggaagatgaagaaggaagaaaagctgaaaaagaaaatacaacagcagaattaactgaagaaattaacaagtggcgtctcctctatgaagaactatataataaaacaaaaccttttcagctacaactagatgcttttgaagtagaaaaacaggcattgttgaatgaacatggtgcagctcaggaacagctaaataaaataagagattcatatgctaaattattgggtcatcagaatttgaaacaaaaaatcaagcatgttgtgaagttgaaagatgaaaatagccaactcaaatcggaagtatcaaaactccgctgtcagcttgctaaaaaaaaacaaagtgagacaaaacttcaagaggaattgaataaagttctaggtatcaaacactttgatccttcaaaggcttttcatcatgaaagtaaagaaaattttgccctgaagaccccattaaaagaaggcaatacaaactgttaccgagctcctatggagtgtcaagaatcatggaagtaaacatctgagaaacctgttgaagattatttcattcgtcttgttgttattgatgttgctgttattatatttgacatgggtattttataatgttgtatttaattttaactgccaatccttaaatatgtgaaaggaacattttttaccaaagtgtcttttgacattttattttttcttgcaaatacctcctccctaatgctcacctttatcacctcattctgaaccctttcgctggctttccagcttagaatgcatctcatcaacttaaaagtcagtatcatattattatcctcctgttctgaaaccttagtttcaagagtctaaaccccagattcttcagcttgatcctggaggtcttttctagtctgagcttctttagctaggctaaaacaccttggcttgttattgcctctactttgattctgataatgctcacttggtcctacctattatccttctacttgtccagttcaaataagaaataaggacaagcctaacttcatagaaacctctctatttttaatcagttgtttaataatttacaggttcttaggctccatcctgtttgtatgaaattataatctgtggattggcctttaagcctgcattcttaacaaactcttcagttaattcttagatacactaaaaatctgagaaactctacatgtaactatttcttcagagtttgtcatatactgcttgtcatctgcatgtctactcagcatttgattaacatttgtgtaatatgaaataaaattacacagtaagtcattta

SEQ ID NO: 293269 - DNA, 1037 bp, Homo sapiens
aaataaaaacaaacgaaaccgcagattacgatatagacagacaaattcagaagtatcaaaactccgctgtcagcttgctaaaaaaaaacaaagtgagacaaaacttcaagaggaattgaataaagttctaggtatcaaacactttgatccttcaaaggcttttcatcatgaaagtaaagaaaattttgccctgaagaccccattaaaagaaggcaatacaaactgttaccgagctcctatggagtgtcaagaatcatggaagtaaacatctgagaaacctgttgaagattatttcattcgtcttgttgttattgatgttgctgttattatatttgacatgggtattttataatgttgtatttaattttaactgccaatccttaaatatgtgaaaggaacattttttaccaaagtgtcttttgacattttattttttcttgcaaatacctcctccctaatgctcacctttatcacctcattctgaaccctttcgctggctttccagcttagaatgcatctcatcaacttaaaagtcagtatcatattattatcctcctgttctgaaaccttagtttcaagagtctaaaccccagattcttcagcttgatcctggaggtcttttctagtctgagcttctttagctaggctaaaacaccttggcttgttattgcctctactttgattctgataatgctcacttggtcctacctattatccttctacttgtccagttcaaataagaaataaggacaagcctaacttcatagaaacctctctatttttaatcagttgtttaataatttacaggttcttaggctccatcctgtttgtatgaaattataatctgtggattggcctttaagcctgcattcttaacaaactcttcagttaattcttagatacactaaaaatctgagaaactctacatgtaactatttcttcagagtttgtcatatactgcttgtcatctgcatgtctactcagcatttgattaacatttgtgtaatatgaaataaaattacacagtaagtcattta

SEQ ID NO: 293270 - DNA, 1042 bp, Homo sapiens
tcacgacacccattactccccgttatcactcattcttattaagaaggtagtcgagaagtatcaaaactccgctgtcagcttgctaaaaaaaaacaaagtgagacaaaacttcaagaggaattgaataaagttctaggtatcaaacactttgatccttcaaaggcttttcatcatgaaagtaaagaaaattttgccctgaagaccccattaaaagaaggcaatacaaactgttaccgagctcctatggagtgtcaagaatcatggaagtaaacatctgagaaacctgttgaagattatttcattcgtcttgttgttattgatgttgctgttattatatttgacatgggtattttataatgttgtatttaattttaactgccaatccttaaatatgtgaaaggaacattttttaccaaagtgtcttttgacattttattttttcttgcaaatacctcctccctaatgctcacctttatcacctcattctgaaccctttcgctggctttccagcttagaatgcatctcatcaacttaaaagtcagtatcatattattatcctcctgttctgaaaccttagtttcaagagtctaaaccccagattcttcagcttgatcctggaggtcttttctagtctgagcttctttagctaggctaaaacaccttggcttgttattgcctctactttgattctgataatgctcacttggtcctacctattatccttctacttgtccagttcaaataagaaataaggacaagcctaacttcatagaaacctctctatttttaatcagttgtttaataatttacaggttcttaggctccatcctgtttgtatgaaattataatctgtggattggcctttaagcctgcattcttaacaaactcttcagttaattcttagatacactaaaaatctgagaaactctacatgtaactatttcttcagagtttgtcatatactgcttgtcatctgcatgtctactcagcatttgattaacatttgtgtaatatgaaataaaattacacagtaagtcattta

SEQ ID NO: 293271 - DNA, 1042 bp, Homo sapiens
ctgtttaagttgtttggtttgtgtgtgtgttagtggggagcgaaccgacgcctagaagtatcaaaactccgctgtcagcttgctaaaaaaaaacaaagtgagacaaaacttcaagaggaattgaataaagttctaggtatcaaacactttgatccttcaaaggcttttcatcatgaaagtaaagaaaattttgccctgaagaccccattaaaagaaggcaatacaaactgttaccgagctcctatggagtgtcaagaatcatggaagtaaacatctgagaaacctgttgaagattatttcattcgtcttgttgttattgatgttgctgttattatatttgacatgggtattttataatgttgtatttaattttaactgccaatccttaaatatgtgaaaggaacattttttaccaaagtgtcttttgacattttattttttcttgcaaatacctcctccctaatgctcacctttatcacctcattctgaaccctttcgctggctttccagcttagaatgcatctcatcaacttaaaagtcagtatcatattattatcctcctgttctgaaaccttagtttcaagagtctaaaccccagattcttcagcttgatcctggaggtcttttctagtctgagcttctttagctaggctaaaacaccttggcttgttattgcctctactttgattctgataatgctcacttggtcctacctattatccttctacttgtccagttcaaataagaaataaggacaagcctaacttcatagaaacctctctatttttaatcagttgtttaataatttacaggttcttaggctccatcctgtttgtatgaaattataatctgtggattggcctttaagcctgcattcttaacaaactcttcagttaattcttagatacactaaaaatctgagaaactctacatgtaactatttcttcagagtttgtcatatactgcttgtcatctgcatgtctactcagcatttgattaacatttgtgtaatatgaaataaaattacacagtaagtcattta

SEQ ID NO: 293272 - DNA, 1036 bp, Homo sapiens
tacacattgtctataaacgcaatactaacttttcacctcttctatctagaagtatcaaaactccgctgtcagcttgctaaaaaaaaacaaagtgagacaaaacttcaagaggaattgaataaagttctaggtatcaaacactttgatccttcaaaggcttttcatcatgaaagtaaagaaaattttgccctgaagaccccattaaaagaaggcaatacaaactgttaccgagctcctatggagtgtcaagaatcatggaagtaaacatctgagaaacctgttgaagattatttcattcgtcttgttgttattgatgttgctgttattatatttgacatgggtattttataatgttgtatttaattttaactgccaatccttaaatatgtgaaaggaacattttttaccaaagtgtcttttgacattttattttttcttgcaaatacctcctccctaatgctcacctttatcacctcattctgaaccctttcgctggctttccagcttagaatgcatctcatcaacttaaaagtcagtatcatattattatcctcctgttctgaaaccttagtttcaagagtctaaaccccagattcttcagcttgatcctggaggtcttttctagtctgagcttctttagctaggctaaaacaccttggcttgttattgcctctactttgattctgataatgctcacttggtcctacctattatccttctacttgtccagttcaaataagaaataaggacaagcctaacttcatagaaacctctctatttttaatcagttgtttaataatttacaggttcttaggctccatcctgtttgtatgaaattataatctgtggattggcctttaagcctgcattcttaacaaactcttcagttaattcttagatacactaaaaatctgagaaactctacatgtaactatttcttcagagtttgtcatatactgcttgtcatctgcatgtctactcagcatttgattaacatttgtgtaatatgaaataaaattacacagtaagtcattta

SEQ ID NO: 293273 - DNA, 1045 bp, Homo sapiens
atgaatataaagaatgtgtgtccgcgtccgtcatagtatagaggatgaattcgtgaggaagtatcaaaactccgctgtcagcttgctaaaaaaaaacaaagtgagacaaaacttcaagaggaattgaataaagttctaggtatcaaacactttgatccttcaaaggcttttcatcatgaaagtaaagaaaattttgccctgaagaccccattaaaagaaggcaatacaaactgttaccgagctcctatggagtgtcaagaatcatggaagtaaacatctgagaaacctgttgaagattatttcattcgtcttgttgttattgatgttgctgttattatatttgacatgggtattttataatgttgtatttaattttaactgccaatccttaaatatgtgaaaggaacattttttaccaaagtgtcttttgacattttattttttcttgcaaatacctcctccctaatgctcacctttatcacctcattctgaaccctttcgctggctttccagcttagaatgcatctcatcaacttaaaagtcagtatcatattattatcctcctgttctgaaaccttagtttcaagagtctaaaccccagattcttcagcttgatcctggaggtcttttctagtctgagcttctttagctaggctaaaacaccttggcttgttattgcctctactttgattctgataatgctcacttggtcctacctattatccttctacttgtccagttcaaataagaaataaggacaagcctaacttcatagaaacctctctatttttaatcagttgtttaataatttacaggttcttaggctccatcctgtttgtatgaaattataatctgtggattggcctttaagcctgcattcttaacaaactcttcagttaattcttagatacactaaaaatctgagaaactctacatgtaactatttcttcagagtttgtcatatactgcttgtcatctgcatgtctactcagcatttgattaacatttgtgtaatatgaaataaaattacacagtaagtcattta

SEQ ID NO: 293274 - DNA, 1038 bp, Homo sapiens
tcaccaataccatctctctcttcacgtcacacaccacaaccgaaactttagaagtatcaaaactccgctgtcagcttgctaaaaaaaaacaaagtgagacaaaacttcaagaggaattgaataaagttctaggtatcaaacactttgatccttcaaaggcttttcatcatgaaagtaaagaaaattttgccctgaagaccccattaaaagaaggcaatacaaactgttaccgagctcctatggagtgtcaagaatcatggaagtaaacatctgagaaacctgttgaagattatttcattcgtcttgttgttattgatgttgctgttattatatttgacatgggtattttataatgttgtatttaattttaactgccaatccttaaatatgtgaaaggaacattttttaccaaagtgtcttttgacattttattttttcttgcaaatacctcctccctaatgctcacctttatcacctcattctgaaccctttcgctggctttccagcttagaatgcatctcatcaacttaaaagtcagtatcatattattatcctcctgttctgaaaccttagtttcaagagtctaaaccccagattcttcagcttgatcctggaggtcttttctagtctgagcttctttagctaggctaaaacaccttggcttgttattgcctctactttgattctgataatgctcacttggtcctacctattatccttctacttgtccagttcaaataagaaataaggacaagcctaacttcatagaaacctctctatttttaatcagttgtttaataatttacaggttcttaggctccatcctgtttgtatgaaattataatctgtggattggcctttaagcctgcattcttaacaaactcttcagttaattcttagatacactaaaaatctgagaaactctacatgtaactatttcttcagagtttgtcatatactgcttgtcatctgcatgtctactcagcatttgattaacatttgtgtaatatgaaataaaattacacagtaagtcattta

SEQ ID NO: 293275 - DNA, 1038 bp, Homo sapiens
cgcgttcgacataactaacgcgcgattagcaaaacacccacccccctttagaagtatcaaaactccgctgtcagcttgctaaaaaaaaacaaagtgagacaaaacttcaagaggaattgaataaagttctaggtatcaaacactttgatccttcaaaggcttttcatcatgaaagtaaagaaaattttgccctgaagaccccattaaaagaaggcaatacaaactgttaccgagctcctatggagtgtcaagaatcatggaagtaaacatctgagaaacctgttgaagattatttcattcgtcttgttgttattgatgttgctgttattatatttgacatgggtattttataatgttgtatttaattttaactgccaatccttaaatatgtgaaaggaacattttttaccaaagtgtcttttgacattttattttttcttgcaaatacctcctccctaatgctcacctttatcacctcattctgaaccctttcgctggctttccagcttagaatgcatctcatcaacttaaaagtcagtatcatattattatcctcctgttctgaaaccttagtttcaagagtctaaaccccagattcttcagcttgatcctggaggtcttttctagtctgagcttctttagctaggctaaaacaccttggcttgttattgcctctactttgattctgataatgctcacttggtcctacctattatccttctacttgtccagttcaaataagaaataaggacaagcctaacttcatagaaacctctctatttttaatcagttgtttaataatttacaggttcttaggctccatcctgtttgtatgaaattataatctgtggattggcctttaagcctgcattcttaacaaactcttcagttaattcttagatacactaaaaatctgagaaactctacatgtaactatttcttcagagtttgtcatatactgcttgtcatctgcatgtctactcagcatttgattaacatttgtgtaatatgaaataaaattacacagtaagtcattta

SEQ ID NO: 293276 - DNA, 968 bp, Homo sapiens
tctgtgactacccagtctggactacccagaatatattgcttcatctgccttaaagaagatacaaggcctgtttttagtttataatgatggataaattcgttttaatctagattactaatccttcttttcaataattcttctaggcaatacaaactgttaccgagctcctatggagtgtcaagaatcatggaagtaaacatctgagaaacctgttgaagattatttcattcgtcttgttgttattgatgttgctgttattatatttgacatgggtattttataatgttgtatttaattttaactgccaatccttaaatatgtgaaaggaacattttttaccaaagtgtcttttgacattttattttttcttgcaaatacctcctccctaatgctcacctttatcacctcattctgaaccctttcgctggctttccagcttagaatgcatctcatcaacttaaaagtcagtatcatattattatcctcctgttctgaaaccttagtttcaagagtctaaaccccagattcttcagcttgatcctggaggtcttttctagtctgagcttctttagctaggctaaaacaccttggcttgttattgcctctactttgattctgataatgctcacttggtcctacctattatccttctacttgtccagttcaaataagaaataaggacaagcctaacttcatagaaacctctctatttttaatcagttgtttaataatttacaggttcttaggctccatcctgtttgtatgaaattataatctgtggattggcctttaagcctgcattcttaacaaactcttcagttaattcttagatacactaaaaatctgagaaactctacatgtaactatttcttcagagtttgtcatatactgcttgtcatctgcatgtctactcagcatttgattaacatttgtgtaatatgaaataaaattacacagtaagtcattta

SEQ ID NO: 293277 - DNA, 2886 bp, Homo sapiens
  misc_feature (1987)..(1987): n is a, c, g, or t
  misc_feature (2099)..(2099): n is a, c, g, or t
  misc_feature (2414)..(2414): n is a, c, g, or t
taggctacgcctcggcctctccgctcgggtcactgcgcatgcgcaggaacgcaagctagcgctttggtgtgcgtgttcgtttttccctttgaatggccgtttacggcaccggcaggccccggatgaaagaactgaaatccagaaaagttcacatgcaacgaacaatgggacagaattggaaccagtgaagccggaactcactacaccgtcccctaagtgacgccaaaatgcactttctaacgtctccggagggaagtgcgcttgcgcaaatgctaggttacacttgagtaactccgggaatgactgggtgggtggggcggggaacagtaacggtctcctattggatggcagcctaaactcgcaggccagctaattggacgcaatcagaacccagcattctttcttcgtgttcctgtgcgggattggtgtgcccaggggtttggctttccaattggctaacgccggggtgggtggggaatgtggggagatttgaatttgaaaccggtagggagtgataatccgcattcagttgtcgaggagtgccagtcaccttcagtttctggagctggccgtcaacatgtcctttcctaaggcgcccttgaaacgattcaatgacccttctggttgtgcaccatctccaggtgcttatgatgttaaaactttagaagtattgaaaggaccagtatcctttcagaaatcacaaagatttaaacaacaaaaagaatctaaacaaaatcttaatgttgacaaagatactaccttgcctgcttcagctagaaaagttaagtcttcggaatcaaagaaggaatctcaaaagaatgataaagatttgaagatattagagaaagagattcgtgttcttctacaggaacgtggtgcccaggacaggcggatccaggatctggaaactgagttggaaaagatggaagcaaggctaaatgctgcactaagggaaaaaacatctctctctgcaaataatgctacactggaaaaacaacttattgaattgaccaggactaatgaactactaaaatctaagttttctgaaaatggtaaccagaagaatttgagaattctaagcttggagttgatgaaacttagaaacaaaagagaaacaaagatgaggggtatgatggctaagcaagaaggcatggagatgaagctgcaggtcacccaaaggagtctcgaagagtctcaagggaaaatagcccaactggagggaaaacttgtttcaatagagaaagaaaagattgatgaaaaatctgaaacagaaaaactcttggaatacatcgaagaaattagttgtgcttcagatcaagtggaaaaatacaagctagatattgcccagttagaagaaaatttgaaagagaagaatgatgaaattttaagccttaagcagtctcttgaggagaatattgttatattatctaaacaagtagaagatctaaatgtgaaatgtcagctgcttgaaaaagaaaaagaagaccatgtcaacaggaatagagaacacaacgaaaatctaaatgcagagatgcaaaacttaaaacagaagtttattcttgaacaacaggaacgtgaaaagcttcaacaaaaagaattacaaattgattcacttctgcaacaagagaaagaattatcttcgagtcttcatcagaagctctgttcttttcaagaggaaatggttaaagagaagaatctgtttgaggaagaattaaagcaaacactggatgagcttgataaattacagcaaaaggaggaacaagctgaaaggctggtcaagcaattggaagaggaagcaaaatctagagctgaagaattaaaactcctagaagaaaagctgaaagggaaccggacggcttgaacctggcatgtacataagttacgtagctgacttcatagcccaggaccaccctggctttatgccagcgggacagaagcttatggacaggtaatggtgcacaatagcctgttgaaatgactcgttacngtggttccaaagttttttctgggaacaacaaagcgggccgttaagttacacaaaggccgggttataaaaccaatggccccaagctggaccggactaccgacacggaattctnttaaacacgtggcacgaaagcgtccattccagttaacaagcggaacagacaggctggggccccaaaaggggccttgggggacaacacacaaagtggccaaggaaaagggggaactttggctttttcccaaagggaccgaaataggttctccaaaagggggaaaacatttcgtcagctgctagggcgggcccaatagtccccctttggtaacagggaaaaggcgccctttcccaagaaagagagattctcgaaaagcgcgcaacatttacgcttgcgttaacaccgggggaacttggccgctttctattacggaancttccgtttggccgaatggaagcacccaaagaggattaccaatgggccaaaccttttaaagacatcgggggacaaaacaccgccaccggcaaagcaacaagtcttttttgaaacgacacgccggacaacagatccatctttcccagagtgccagaaaagggaattcagtgtactgacccacattttcgatgtgagagctattagactcacgcacatttgttgtattgtacccggaaaaagaaatcgaagacgtagacgaaagcgcaacggttttttaatgacaaaggccgctgtttggcggacgacacacctttttcatcatcttctggaggcacccccaaaagggggagaaacgaaagagagcagcgtccactaaaagaatagggccatgttttcccccaacataaagtggggctgccccagaaagtagatccccaacagagaggggccagacaggcaggcgcacacatca

SEQ ID NO: 293278 - DNA, 2497 bp, Homo sapiens
taggctacgcctcggcctctccgctcgggtcactgcgcatgcgcaggaacgcaagctagcgctttggtgtgcgtgttcgtttttccctttgaatggccgtttacggcaccggcaggccccggatgaaagaactgaaatccagaaaagttcacatgcaacgaacaatgggacagaattggaaccagtgaagccggaactcactacaccgtcccctaagtgacgccaaaatgcactttctaacgtctccggagggaagtgcgcttgcgcaaatgctaggttacacttgagtaactccgggaatgactgggtgggtggggcggggaacagtaacggtctcctattggatggcagcctaaactcgcaggccagctaattggacgcaatcagaacccagcattctttcttcgtgttcctgtgcgggattggtgtgcccaggggtttggctttccaattggctaacgccggggtgggtggggaatgtggggagatttgaatttgaaaccggtagggagtgataatccgcattcagttgtcgaggagtgccagtcaccttcagtttctggagctggccgtcaacatgtcctttcctaaggcgcccttgaaacgattcaatgacccttctggttgtgcaccatctccaggtgcttatgatgttaaaactttagaagtattgaaaggaccagtatcctttcagaaatcacaaagatttaaacaacaaaaagaatctaaacaaaatcttaatgttgacaaagatactaccttgcctgcttcagctagaaaagttaagtcttcggaatcaaagaaggaatctcaaaagaatgataaagatttgaagatattagagaaagagattcgtgttcttctacaggaacgtggtgcccaggacaggcggatccaggatctggaaactgagttggaaaagatggaagcaaggctaaatgctgcactaagggaaaaaacatctctctctgcaaataatgctacactggaaaaacaacttattgaattgaccaggactaatgaactactaaaatctaagttttctgaaaatggtaaccagaagaatttgagaattctaagcttggagttgatgaaacttagaaacaaaagagaaacaaagatgaggggtatgatggctaagcaagaaggcatggagatgaagctgcaggtcacccaaaggagtctcgaagagtctcaagggaaaatagcccaactggagggaaaacttgtttcaatagagaaagaaaagattgatgaaaaatctgaaacagaaaaactcttggaatacatcgaagaaattagttgtgcttcagatcaagtggaaaaatacaagctagatattgcccagttagaagaaaatttgaaagagaagaatgatgaaattttaagccttaagcagtctcttgaggagaatattgttatattatctaaacaagtagaagatctaaatgtgaaatgtcagctgcttgaaaaagaaaaagaagaccatgtcaacaggaatagagaacacaacgaaaatctaaatgcagagatgcaaaacttaaaacagaagtttattcttgaacaacaggaacgtgaaaagcttcaacaaaaagaattacaaattgattcacttctgcaacaagagaaagaattatcttcgagtcttcatcagaagctctgttcttttcaagaggaaatggttaaagagaagaatctgtttgaggaagaattaaagcaaacactggatgagcttgataaattacagcaaaaggaggaacaagctgaaaggctggtcaagcaattggaagaggaagcaaaatctagagctgaagaattaaaactcctagaagaaaagctgaaagggaagcagggtggactgggtatggattatgttctataagtacgttctgagtccttcctgcatatcaggcagggacaaaacggtgaaagtcccatgcaccttggcgacgtgcaggaggaaatgacatgattcgtgctcagcctcatccattggtctgaatcaattcacgtctcatgagcccagggaacacggtgttccacctgaacgcggatcctagaggccagtgcagaagcagcatgggtaaccactcacaacgatttatctactgctcgtgaaatctctggatttaactgtgatgaaagaccggaggctgaaggagaacttcaatatcatatattttaacaggttgactcacagtatggaacaagaattaaagaaccacggaacttcaagagctgcagaggagccgcttctaacatcaggacatcaagaaagctggaacggcggatggccggagaggggactctagtatggggtcacagagatgggtcgcagagatggaccgtgtggaagggtatggattctcacgcccactactgaccctagatgtcctgagtgaccctccccatctgtacgatcttgagataacatgcaaaacactttacgactacttggcaaaaaaacacaaatacaaactcacgaaggcaatctata

SEQ ID NO: 293279 - DNA, 365 bp, Homo sapiens
tttgacttttttttctttttaataagctataaagcgttaacagccagtgagatagaagatcttaagctggagaactcatcattacaggaaaaagcggccaaggctgggaaaaatgcagaggatgttcagcatcagattttggcaactgagagctcaaatcaagaatatgtaaggtatatagagcaaataatggccttagaaccattaagacaatttaatgttgaaagccagctagtaactgtcccttggcttgcttttggccatcttatactgcaaattaagaatttactcagttaaaaaatgacacttcttgaagagttccttgaggtttaaaaaaaaaaaaggaaaaattaatgaaagtggct

SEQ ID NO: 293280 - DNA, 1307 bp, Homo sapiens
ccgatgaagatgccgttttcgccgatgaagatgccgatctcgtcaacagctgccgcgcgcaggcttagctcattcctctgacctgccaggaagcagagagacccacagagcaggagggaggcagaaagtggagacggacctgagcccgaggaagaggcaggcagaggctgaggctgattccaccccagcctgcctggacaaccctccttagccgcagccccttccagttccctaggggttctgcccctccccctctctggggcaccagccccccagggtcctgcatcccaccatgtcgatggctgtggaaacctttggcttcttcatggcaactgtggggctgctgatgctgggggtgactctgccaaacagctactggcgagtgtccactgtgcacgggaacgtcatcaccaccaacaccatcttcgagaacctctggtttagctgtgccaccgactccctgggcgtctacaactgctgggagttcccgtccatgctggccctctctgggtatattcaggcctgccgggcactcatgatcaccgccatcctcctgggcttcctcggcctcttgctaggcatagcgggcctgcgctgcaccaacattgggggcctggagctctccaggaaagccaagctggcggccaccgcaggggccctccacattctggccggtatctgcgggatggtggccatctcctggtacgccttcaacatcacccgggacttcttcgaccccttgtaccccggaaccaagtacgagctgggccccgccctctacctggggtggagcgcctcactgatctccatcctgggtggcctctgcctctgctccgcctgctgctgcggctctgacgaggacccagccgccagcgcccggcggccctaccaggctccagtgtccgtgatgcccgtcgccacctcggaccaagaaggcgacagcagctttggcaaatacggcagaaacgcctacgtgtagcagctctggcccgtgggccccgctgtcttcccactgccccaaggagaggggacctggccggggcccattcccctatagtaacctcaggggccggccacgccccgctcccgtagccccgccccggccacggccccgtgtcttgcactctcatggcccctccaggccaagaactgctcttgggaagtcgcatatctcccctctgaggctggatccctcatcttctgaccctgggttctgggctgtgaaggggacggtgtccccgcacgtttgtattgtgtataaatacattcattaataaatgcatattgtgaccgttaaaaaaaaaaag

SEQ ID NO: 293281 - DNA, 462 bp, Homo sapiens
ctcctaggagccgaagggacgggaggccgcgtagaggaggggaccgtccccgagcctcgccgagcctgcggtgtagacacctctggtgtctagtggttgaggatctgttgaccgggcatggtgggtagaaggaacgctccgagcagaagaaaagtggtgtcttcccactgccccaaggagaggggacctggccggggcccattcccctatagtaacctcaggggccggccacgccccgctcccgtagccccgccccggccacggccccgtgtcttgcactctcatggcccctccaggccaagaactgctcttgggaagtcgcatatctcccctctgaggctggatccctcatcttctgaccctgggttctgggctgtgaaggggacggtgtccccgcacgtttgtattgtgtataaatacattcattaataaatgcatattgtgaccgttaaaaaaaaaaag

SEQ ID NO: 293282 - DNA, 417 bp, Homo sapiens
gtggcttgcaagaggacaagcccccagtgagtagggtggtgctagcccgggggtctgcctggcttcaggaaaggacgaccctggactcccatggcccagctgggttttcaaggtttcaagggtgggcgggatttggatggggctccatctgggtgaggagatgatgggatgaaggccctagaggtgggcatgaactaggtagatctgggaccaaagagagaagaggcaggaggaggttgaggtagtgtgagatgagctgggtgggctggacttggggcctaagggctaccctgagaagttgaccccaggaaggaggaaggcttataaactggggtggggagaaaggaattgagtgaaattgctgctctgggacttggtgcccccgtcctactctgggcagcccctgcctgcctctcc

SEQ ID NO: 293283 - DNA, 408 bp, Homo sapiens
tgctgggattacaagcgcgagtcaccacacacgtctggcattaatcttaaatctaactgcttacctactatatcctcatctgcagccaaccacattttcacaaaactccacaataatccaatttcaaatgcccacagttaacaatagtattacagttgttaaaggagaatcacttgaacctgggatggtgaggggctgttgggctggctccgtcgcagaggggagatgggaaaggctgacaactgtgcccacccccagggtatattcaggcctgccgggcactcatgatcaccgccatcctcctgggcttcctcggcctcttgctaggcatagcgggcctgcgctgcaccctccattgaacagctatagccctgaatgaaaattcactaaacgtccttttaccctcaa

SEQ ID NO: 293284 - DNA, 1447 bp, Homo sapiens
ccgatgaagatgccgttttcgccgatgaagatgccgatctcgtcaacagctgccgcgcgcaggcttagctcattcctctgacctgccaggaagcagagagacccacagagcaggagggaggcagaaagtggagacggacctgagcccgaggaagaggcaggcagaggctgaggctgattccaccccagcctgcctggacaaccctccttagccgcagccccttccagttccctaggggttctgcccctccccctctctggggcaccagccccccagggtcctgcatcccaccatgtcgatggctgtggaaacctttggcttcttcatggcaactgtggggctgctgatgctgggggtgactctgccaaacagctactggcgagtgtccactgtgcacgggaacgtcatcaccaccaacaccatcttcgagaacctctggtttagctgtgccaccgactccctgggcgtctacaactgctgggagttcccgtccatgctggccctctctggctccacagactccccagcctcactgtcggggggcactggtctccttgtccggctgatgtctataaagggcccctgtgaagggaggcgtcttgcaagttgcaggttgagcgtccgctgtaaggaggcggtgtgtgtgcagggtatattcaggcctgccgggcactcatgatcaccgccatcctcctgggcttcctcggcctcttgctaggcatagcgggcctgcgctgcaccaacattgggggcctggagctctccaggaaagccaagctggcggccaccgcaggggccctccacattctggccggtatctgcgggatggtggccatctcctggtacgccttcaacatcacccgggacttcttcgaccccttgtaccccggaaccaagtacgagctgggccccgccctctacctggggtggagcgcctcactgatctccatcctgggtggcctctgcctctgctccgcctgctgctgcggctctgacgaggacccagccgccagcgcccggcggccctaccaggctccagtgtccgtgatgcccgtcgccacctcggaccaagaaggcgacagcagctttggcaaatacggcagaaacgcctacgtgtagcagctctggcccgtgggccccgctgtcttcccactgccccaaggagaggggacctggccggggcccattcccctatagtaacctcaggggccggccacgccccgctcccgtagccccgccccggccacggccccgtgtcttgcactctcatggcccctccaggccaagaactgctcttgggaagtcgcatatctcccctctgaggctggatccctcatcttctgaccctgggttctgggctgtgaaggggacggtgtccccgcacgtttgtattgtgtataaatacattcattaataaatgcatattgtgaccgttaaaaaaaaaaag

SEQ ID NO: 293285 - DNA, 1427 bp, Homo sapiens
gcttggctgtatccgtcagtggctccaggctgccgcgcgcaggcttagctcattcctctgacctgccaggaagcagagagacccacagagcaggagggaggcagaaagtggagacggacctgagcccgaggaagaggcaggcagaggctgaggctgattccaccccagcctgcctggacaaccctccttagccgcagccccttccagttccctaggggttctgcccctccccctctctggggcaccagccccccagggtcctgcatcccaccatgtcgatggctgtggaaacctttggcttcttcatggcaactgtggggctgctgatgctgggggtgactctgccaaacagctactggcgagtgtccactgtgcacgggaacgtcatcaccaccaacaccatcttcgagaacctctggtttagctgtgccaccgactccctgggcgtctacaactgctgggagttcccgtccatgctggccctctctggctccacagactccccagcctcactgtcggggggcactggtctccttgtccggctgatgtctataaagggcccctgtgaagggaggcgtcttgcaagttgcaggttgagcgtccgctgtaaggaggcggtgtgtgtgcagggtatattcaggcctgccgggcactcatgatcaccgccatcctcctgggcttcctcggcctcttgctaggcatagcgggcctgcgctgcaccaacattgggggcctggagctctccaggaaagccaagctggcggccaccgcaggggccctccacattctggccggtatctgcgggatggtggccatctcctggtacgccttcaacatcacccgggacttcttcgaccccttgtaccccggaaccaagtacgagctgggccccgccctctacctggggtggagcgcctcactgatctccatcctgggtggcctctgcctctgctccgcctgctgctgcggctctgacgaggacccagccgccagcgcccggcggccctaccaggctccagtgtccgtgatgcccgtcgccacctcggaccaagaaggcgacagcagctttggcaaatacggcagaaacgcctacgtgtagcagctctggcccgtgggccccgctgtcttcccactgccccaaggagaggggacctggccggggcccattcccctatagtaacctcaggggccggccacgccccgctcccgtagccccgccccggccacggccccgtgtcttgcactctcatggcccctccaggccaagaactgctcttgggaagtcgcatatctcccctctgaggctggatccctcatcttctgaccctgggttctgggctgtgaaggggacggtgtccccgcacgtttgtattgtgtataaatacattcattaataaatgcatattgtgaccgttaaaaaaaaaaag

SEQ ID NO: 293286 - DNA, 1287 bp, Homo sapiens
gcttggctgtatccgtcagtggctccaggctgccgcgcgcaggcttagctcattcctctgacctgccaggaagcagagagacccacagagcaggagggaggcagaaagtggagacggacctgagcccgaggaagaggcaggcagaggctgaggctgattccaccccagcctgcctggacaaccctccttagccgcagccccttccagttccctaggggttctgcccctccccctctctggggcaccagccccccagggtcctgcatcccaccatgtcgatggctgtggaaacctttggcttcttcatggcaactgtggggctgctgatgctgggggtgactctgccaaacagctactggcgagtgtccactgtgcacgggaacgtcatcaccaccaacaccatcttcgagaacctctggtttagctgtgccaccgactccctgggcgtctacaactgctgggagttcccgtccatgctggccctctctgggtatattcaggcctgccgggcactcatgatcaccgccatcctcctgggcttcctcggcctcttgctaggcatagcgggcctgcgctgcaccaacattgggggcctggagctctccaggaaagccaagctggcggccaccgcaggggccctccacattctggccggtatctgcgggatggtggccatctcctggtacgccttcaacatcacccgggacttcttcgaccccttgtaccccggaaccaagtacgagctgggccccgccctctacctggggtggagcgcctcactgatctccatcctgggtggcctctgcctctgctccgcctgctgctgcggctctgacgaggacccagccgccagcgcccggcggccctaccaggctccagtgtccgtgatgcccgtcgccacctcggaccaagaaggcgacagcagctttggcaaatacggcagaaacgcctacgtgtagcagctctggcccgtgggccccgctgtcttcccactgccccaaggagaggggacctggccggggcccattcccctatagtaacctcaggggccggccacgccccgctcccgtagccccgccccggccacggccccgtgtcttgcactctcatggcccctccaggccaagaactgctcttgggaagtcgcatatctcccctctgaggctggatccctcatcttctgaccctgggttctgggctgtgaaggggacggtgtccccgcacgtttgtattgtgtataaatacattcattaataaatgcatattgtgaccgttaaaaaaaaaaag

SEQ ID NO: 293287 - DNA, 1852 bp, Homo sapiens
ccgatgaagatgccgttttcgccgatgaagatgccgatctcgtcaacagctgccgcgcgcaggcttagctcattcctctgacctgccaggaagcagagagacccacagagcaggagggaggcagaaagtggagacggacctgagcccgaggaagaggcaggcagaggctgaggctgattccaccccagcctgcctggacaaccctccttagccgcagccccttccagttccctaggggttctgcccctccccctctctggggcaccagccccccagggtcctgcatcccaccatgtcgatggctgtggaaacctttggcttcttcatggcaactgtggggctgctgatgctgggggtgactctgccaaacagctactggcgagtgtccactgtgcacgggaacgtcatcaccaccaacaccatcttcgagaacctctggtttagctgtgccaccgactccctgggcgtctacaactgctgggagttcccgtccatgctggccctctctggctccacagactccccagcctcactgtcggggggcactggtctccttgtccggctgatgtctataaagggcccctgtgaagggaggcgtcttgcaagttgcaggttgagcgtccgctgtaaggaggcggtgtgtgtgcagggtatattcaggcctgccgggcactcatgatcaccgccatcctcctgggcttcctcggcctcttgctaggcatagcgggcctgcgctgcaccaacattgggggcctggagctctccaggaaagccaagctggcggccaccgcaggggccctccacattctggccggtaactgggggaaggtgatggggcgggggtccccctcaaccgcagacttcaggctgctttgtcctcatctaatctcctctccaattcccactcctcatgctcacctcccctaccctgctgcatggacacctgctcacccctgcctcatctgtactccccagatctcctggctgcaaatcagcccatcggcagtgtttcttgagctcccagtaggggctggccacggccaggtgtgggagggacttcgaagataagagtgagcggctgcctccgggagcttacatcctagctggggagcagagttagggtgcacgctatggcgcacacacacagtgcacgtccacagtgccataccacggggcatggtggctcatgcctgtaatcccagcactttggtaggctgaggtatctgcgggatggtggccatctcctggtacgccttcaacatcacccgggacttcttcgaccccttgtaccccggaaccaagtacgagctgggccccgccctctacctggggtggagcgcctcactgatctccatcctgggtggcctctgcctctgctccgcctgctgctgcggctctgacgaggacccagccgccagcgcccggcggccctaccaggctccagtgtccgtgatgcccgtcgccacctcggaccaagaaggcgacagcagctttggcaaatacggcagaaacgcctacgtgtagcagctctggcccgtgggccccgctgtcttcccactgccccaaggagaggggacctggccggggcccattcccctatagtaacctcaggggccggccacgccccgctcccgtagccccgccccggccacggccccgtgtcttgcactctcatggcccctccaggccaagaactgctcttgggaagtcgcatatctcccctctgaggctggatccctcatcttctgaccctgggttctgggctgtgaaggggacggtgtccccgcacgtttgtattgtgtataaatacattcattaataaatgcatattgtgaccgttaaaaaaaaaaag

SEQ ID NO: 293288 - DNA, 1297 bp, Homo sapiens
  misc_feature (1295)..(1295): n is a, c, g, or t
ccgatgaagatgccgttttcgccgatgaagatgccgatctcgtcaacagctgccgcgcgcaggcttagctcattcctctgacctgccaggaagcagagagacccacagagcaggagggaggcagaaagtggagacggacctgagcccgaggaagaggcaggcagaggctgaggctgattccaccccagcctgcctggacaaccctccttagccgcagccccttccagttccctaggggttctgcccctccccctctctggggcaccagccccccagggtcctgcatcccaccatgtcgatggctgtggaaacctttggcttcttcatggcaactgtggggctgctgatgctgggggtgactctgccaaacagctactggcgagtgtccactgtgcacgggaacgtcatcaccaccaacaccatcttcgagaacctctggtttagctgtgccaccgactccctgggcgtctacaactgctgggagttcccgtccatgctggccctctctggctccacagactccccagcctcactgtcggggggcactggtctccttgtccggctgatgtctataaagggcccctgtgaagggaggcgtcttgcaagttgcaggttgagcgtccgctgtaaggaggcggtgtgtgtgcagggtatattcaggcctgccgggcactcatgatcaccgccatcctcctgggcttcctcggcctcttgctaggcatagcgggcctgcgctgcaccaacattgggggcctggagctctccaggaaagccaagctggcggccaccgcaggggccctccacattctggccggtaactgggggaaggtgatggggcgggggtccccctcaaccgcagacttcaggctgctttgtcctcatctaatctcctctccaattcccactcctcatgctcacctcccctaccctgctgcatggacacctgctcacccctgcctcatctgtactccccagatctcctggctgcaaatcagcccatcggcagtgtttcttgagctcccagtaggggctggccacggccaggtgtgggagggacttcgaagataagagtgagcggctgcctccgggagcttacatcctagctggggagcagagttagggtgcacgctatggcgcacacacacagtgcacgtccacagtgccataccacggggcatggtggctcatgcctgtaatcccagcactttggtaggctgaggtgggtggattacttgaggtcaggagttcaaaaccagcctggccaacatggtgaaaccctgtctctactaaaaatncc

SEQ ID NO: 293289 - DNA, 1357 bp, Homo sapiens
gcttggctgtatccgtcagtggctccaggctgccgcgcgcaggcttagctcattcctctgacctgccaggaagcagagagacccacagagcaggagggaggcagaaagtggagacggacctgagcccgaggaagaggcaggcagaggctgaggctgattccaccccagcctgcctggacaaccctccttagccgcagccccttccagttccctaggggttctgcccctccccctctctggggcaccagccccccagggtcctgcatcccaccatgtcgatggctgtggaaacctttggcttcttcatggcaactgtggggctgctgatgctgggggtgactctgccaaacagctactggcgagtgtccactgtgcacgggaacgtcatcaccaccaacaccatcttcgagaacctctggtttagctgtgccaccgactccctgggcgtctacaactgctgggagttcccgtccatgctggccctctctgggtatattcaggcctgccgggcactcatgatcaccgccatcctcctgggcttcctcggcctcttgctaggcatagcgggcctgcgctgcaccaacattgggggcctggagctctccaggaaagccaagctggcggccaccgcaggggccctccacattctggccgatctcctggctgcaaatcagcccatcggcagtgtttcttgagctcccagtaggggctggccacggccaggtgtgggagggacttcgaagataagagtgagcggctgcctccgggagcttacatcctagctggggagcagagttagggtgcacgctatggcgcacacacacagtgcacgtccacagtgccataccacggggcatggtggctcatgcctgtaatcccagcactttggtaggctgaggtatctgcgggatggtggccatctcctggtacgccttcaacatcacccgggacttcttcgaccccttgtaccccggaaccaagtacgagctgggccccgccctctacctggggtggagcgcctcactgatctccatcctgggtggcctctgcctctgctccgcctgctgctgcggctctgacgaggacccagccgccagcgccgggggcctacaggctcagggtcgtgatgccgtcgcactcggacaaagcgacagcagttggcaatagcagaacggctagtgtagcagtctggcggggcccgtgctccactgccagggagggctggcgggccatcctaagaccggggggagcccccgccccgaggccgtggcaggcccggaagggggggatccgggggccccggggggggggcggggaacacagggacaaaccggggggctggcagatagaagaagac

SEQ ID NO: 293290 - DNA, 278 bp, Homo sapiens
gaaggaggaaggcttataaactggggtggggagaaaggaattgagtgaaattgctgctctgggacttggtgcccccgtcctactctgggcagcccctgcctgcctctcccctaagccccctcccccactatccctccccctggactggactggggtcgtcctccggtccccaggtatctgcgggatggtggccatctcctggtacgccttcaacatcacccgggacttcttcgaccccttgtaccccggaaccaagtgagtgaggaaaccccccaccc

SEQ ID NO: 293291 - DNA, 303 bp, Homo sapiens
ccgtgggccccgctgtcttcccactgccccaaggagaggggacctggccggggcccattcccctatagtaacctcaggggccggccacgccccgctcccgtagccccgccccggccacggccccgtgtcttgcactctcatggcccctccaggccaagaactgctcttgggaagtcgcatatctcccctctgaggctggatccctcatcttctgaccctgggttctgggctgtgaaggggacggtgtccccgcacgtttgtattgtgtataaatacattcattaataaatgcatattgtgacc

SEQ ID NO: 293292 - DNA, 1873 bp, Homo sapiens
cgaccccaggttccccacgccccgggccgggccgcagcctcctgggcttcgtgggggcagacccagcctttcccggcagcgagcgctcggccaggtgcactaggcgctgtgcgggccccccttccccgcgagtccctcaagcgggaacctgcctcgtgtctcccaggagccatggaggctgtggaactcgccagaaaactgcaggaggaagctacgtgctccatctgtctggattacttcacagaccctgtgatgaccacctgtggccacaacttctgccgagcctgcatccagctgagctgggaaaaggcgaggggcaagaaggggaggcggaagcggaagggctccttcccctgccccgagtgcagagagatgtccccgcagaggaacctgctgcccaaccggctgctgaccaaggtggccgagatggcgcagcagcatcctggtctgcagaagcaagacctgtgccaggagcaccacgagcccctcaagcttttctgccagaaggaccagagccccatctgtgtggtgtgcagggagtcccgggagcaccggctgcacagggtgctgcccgccgaggaggcagtgcaggggtacaagttgaagctggaggaggacatggagtaccttcgggagcagatcaccaggacagggaatctgcaggccagggaggagcagagcttagccgagtggcagggcaaggtgaaggagcggagagaacgcattgtgctggagtttgagaagatgaacctctacctggtggaagaagagcagaggctcctccaggctctggagacggaagaagaggagactgccagcaggctccgggagagcgtggcctgcctggaccggcagggtcactctctggagctgctgctgctgcagctggaggagcggagcacacaggggcccctccagatgctgcaggacatgaaggaacccctgagcaggaagaacaacgtgagtgtgcagtgcccagaggttgcccccccaaccagacccaggactgtgtgcagagttcccggacagattgaagtgctaagaggctttctagaggatgtggtgcctgatgccacctccgcgtacccctacctcctcctgtatgagagccgccagaggcgctacctcggctcttcgccggagggcagtgggttctgcagcaaggaccgatttgtggcttacccctgtgctgtgggccagacggccttctcctctgggaggcactactgggaggtgggcatgaacatcaccggggacgcgttgtgggccctgggtgtgtgcagggacaacgtgagccggaaagacagggtccccaagtgccccgaaaacggcttctgggtggtgcagctgtccaaggggaccaagtacttatccaccttctctgccctaaccccggtcatgctgatggagcctcccagccacatgggcatcttcctggacttcgaagccggggaagtgtccttctacagtgtaagcgatgggtcccacctgcacacctactcccaggccaccttcccaggccccctgcagcctttcttctgcctgggggctccgaagtctggtcagatggtcatctccacagtgaccatgtgggtgaaaggatagacacagaccgggggactcgggcactgctcctggctctgcagaaggtgtgggccttctgcttactgcaggccacctgccagggttctctggcatcacgctggcagccattagacacacaggggggtttctcaaattctaaatataattgtgattagaactgtcaaacattaagagggtatactgacagatgcttcctagaggaaacttttgaaagcccctgcgttctgagtggaccgatttctaaatccatacctacacaccaggaaca

SEQ ID NO: 293293 - DNA, 704 bp, Homo sapiens
atgtgctgaggttatctagaggatcccgtttgggctccagtcatggggacggcactactgggaggtgggcatgaacatcaccggggacgcgttgtgggccctgggtgtgtgcagggacaacgtgagccggaaagacagggtccccaagtgccccgaaaacggcttctgggtggtgcagctgtccaaggggaccaagtacttatccaccttctctgccctaaccccggtcatgctgatggagcctcccagccacatgggcatcttcctggacttcgaagccggggaagtgtccttctacagtgtaagcgatgggtcccacctgcacacctactcccaggccaccttcccaggccccctgcagcctttcttctgcctgggggctccgaagtctggtcagatggtcatctccacagtgaccatgtgggtgaaaggatagacacagaccgggggactcgggcactgctcctggctctgcagaaggtgtgggccttctgcttactgcaggccacctgccagggttctctggcatcacgctggcagccattagacacacaggggggtttctcaaattctaaatataattgtgattagaactgtcaaacattaagagggtatactgacagatgcttcctagaggaaacttttgaaagcccctgcgttctgagtggaccgatttctaaatccatacctacacaccaggaaca

SEQ ID NO: 293294 - DNA, 308 bp, Homo sapiens
ctgcagtcctagccctcctctgtaaagggaggctgtacaggacggttgcacactgccggcgcccagatcatcgggctgctccctccaactctctccagagtccctcaagcgggaacctgcctcgtgtctcccaggagccatggaggctgtggaactcgccagaaaactgcaggaggaagctacgtgctccatctgtctggattacttcacagaccctgtgatgaccacctgtggccacaacttctgccgagcctgcatccagctgacaagtggtgcaagcccgacaggtcaatagtgaggaggactcg

SEQ ID NO: 293295 - DNA, 1837 bp, Homo sapiens
cgaccccaggttccccacgccccgggccgggccgcagcctcctgggcttcgtgggggcagacccagcctttcccggcagcgagcgctcggccaggtgcactaggcgctgtgcgggccccccttccccgcggagccatggaggctgtggaactcgccagaaaactgcaggaggaagctacgtgctccatctgtctggattacttcacagaccctgtgatgaccacctgtggccacaacttctgccgagcctgcatccagctgagctgggaaaaggcgaggggcaagaaggggaggcggaagcggaagggctccttcccctgccccgagtgcagagagatgtccccgcagaggaacctgctgcccaaccggctgctgaccaaggtggccgagatggcgcagcagcatcctggtctgcagaagcaagacctgtgccaggagcaccacgagcccctcaagcttttctgccagaaggaccagagccccatctgtgtggtgtgcagggagtcccgggagcaccggctgcacagggtgctgcccgccgaggaggcagtgcaggggtacaagttgaagctggaggaggacatggagtaccttcgggagcagatcaccaggacagggaatctgcaggccagggaggagcagagcttagccgagtggcagggcaaggtgaaggagcggagagaacgcattgtgctggagtttgagaagatgaacctctacctggtggaagaagagcagaggctcctccaggctctggagacggaagaagaggagactgccagcaggctccgggagagcgtggcctgcctggaccggcagggtcactctctggagctgctgctgctgcagctggaggagcggagcacacaggggcccctccagatgctgcaggacatgaaggaacccctgagcaggaagaacaacgtgagtgtgcagtgcccagaggttgcccccccaaccagacccaggactgtgtgcagagttcccggacagattgaagtgctaagaggctttctagaggatgtggtgcctgatgccacctccgcgtacccctacctcctcctgtatgagagccgccagaggcgctacctcggctcttcgccggagggcagtgggttctgcagcaaggaccgatttgtggcttacccctgtgctgtgggccagacggccttctcctctgggaggcactactgggaggtgggcatgaacatcaccggggacgcgttgtgggccctgggtgtgtgcagggacaacgtgagccggaaagacagggtccccaagtgccccgaaaacggcttctgggtggtgcagctgtccaaggggaccaagtacttatccaccttctctgccctaaccccggtcatgctgatggagcctcccagccacatgggcatcttcctggacttcgaagccggggaagtgtccttctacagtgtaagcgatgggtcccacctgcacacctactcccaggccaccttcccaggccccctgcagcctttcttctgcctgggggctccgaagtctggtcagatggtcatctccacagtgaccatgtgggtgaaaggatagacacagaccgggggactcgggcactgctcctggctctgcagaaggtgtgggccttctgcttactgcaggccacctgccagggttctctggcatcacgctggcagccattagacacacaggggggtttctcaaattctaaatataattgtgattagaactgtcaaacattaagagggtatactgacagatgcttcctagaggaaacttttgaaagcccctgcgttctgagtggaccgatttctaaatccatacctacacaccaggaaca

SEQ ID NO: 293296 - DNA, 1759 bp, Homo sapiens
cgaccccaggttccccacgccccgggccgggccgcagcctcctgggcttcgtgggggcagacccagcctttcccggcagcgagcgctcggccaggtgcactaggcgctgtgcgggccccccttccccgcgaccctgtgatgaccacctgtggccacaacttctgccgagcctgcatccagctgagctgggaaaaggcgaggggcaagaaggggaggcggaagcggaagggctccttcccctgccccgagtgcagagagatgtccccgcagaggaacctgctgcccaaccggctgctgaccaaggtggccgagatggcgcagcagcatcctggtctgcagaagcaagacctgtgccaggagcaccacgagcccctcaagcttttctgccagaaggaccagagccccatctgtgtggtgtgcagggagtcccgggagcaccggctgcacagggtgctgcccgccgaggaggcagtgcaggggtacaagttgaagctggaggaggacatggagtaccttcgggagcagatcaccaggacagggaatctgcaggccagggaggagcagagcttagccgagtggcagggcaaggtgaaggagcggagagaacgcattgtgctggagtttgagaagatgaacctctacctggtggaagaagagcagaggctcctccaggctctggagacggaagaagaggagactgccagcaggctccgggagagcgtggcctgcctggaccggcagggtcactctctggagctgctgctgctgcagctggaggagcggagcacacaggggcccctccagatgctgcaggacatgaaggaacccctgagcaggaagaacaacgtgagtgtgcagtgcccagaggttgcccccccaaccagacccaggactgtgtgcagagttcccggacagattgaagtgctaagaggctttctagaggatgtggtgcctgatgccacctccgcgtacccctacctcctcctgtatgagagccgccagaggcgctacctcggctcttcgccggagggcagtgggttctgcagcaaggaccgatttgtggcttacccctgtgctgtgggccagacggccttctcctctgggaggcactactgggaggtgggcatgaacatcaccggggacgcgttgtgggccctgggtgtgtgcagggacaacgtgagccggaaagacagggtccccaagtgccccgaaaacggcttctgggtggtgcagctgtccaaggggaccaagtacttatccaccttctctgccctaaccccggtcatgctgatggagcctcccagccacatgggcatcttcctggacttcgaagccggggaagtgtccttctacagtgtaagcgatgggtcccacctgcacacctactcccaggccaccttcccaggccccctgcagcctttcttctgcctgggggctccgaagtctggtcagatggtcatctccacagtgaccatgtgggtgaaaggatagacacagaccgggggactcgggcactgctcctggctctgcagaaggtgtgggccttctgcttactgcaggccacctgccagggttctctggcatcacgctggcagccattagacacacaggggggtttctcaaattctaaatataattgtgattagaactgtcaaacattaagagggtatactgacagatgcttcctagaggaaacttttgaaagcccctgcgttctgagtggaccgatttctaaatccatacctacacaccaggaaca

SEQ ID NO: 293297 - DNA, 396 bp, Homo sapiens
aaaataatccaaggtggcacattctgggtgacgtattttgatcccctgcccctcctgaggagggtctctggggtgggtgcagtttcagcgagcacaactggactctaggcaggaggtggggggatcgctgatcccaaatcctgcggtttgtgtgtcccacagttgaagctggaggaggacatggagtaccttcgggagcagatcaccaggacagggaatctgcaggccagggaggagcagagcttagccgagtggcaggtgggtgcccagggctgtccagtccctttcctgctgctgctccatcttcctgcatttccacgtctgtgtctgcccgtggggatatgctgccgcagtggcaggaaaagaagaaagttgcctctacccttctaggttctg

SEQ ID NO: 293298 - DNA, 1548 bp, Homo sapiens
cactctgacagcgccgaggtgcgccgagcaggagcagggaacaaaggagcggagaggggaggggagagagttgggcgagggagagcccccggccggctgccagaagatcccggcgggaggaagcccaagtgtcacttgaattccacccaaggagcgggcgcctgggatcagagcgtcctgtttagcaataacggctggagcacgtcctacaagttacgggagagtcggctgtgaaggagacgttcgcttatcccctgtgtccccgctcctggcccctccagacccccgccttgcctcgcgctgggaggggagatccagaatgaaaggcaagaaaggtattgttgcagcatctggcagtgagactgaggatgaggacagcatggacattcccttggacctttcttcatccgctggctcaggcaagagaaggagaaggggcaacctacccaaggagtctgtgcagattcttcgggattggctgtatgagcaccgttacaatgcctatccttcagagcaagaaaaagcgttgctgtcccagcaaacacacctgtctacgctacaggtctgtaactggttcatcaacgcccgccgcaggctcctccctgacatgctgagaaaggatggcaaagatccaaatcagttcacaatttcccgccgtggggccaagatttctgaaacgagctctgtggagtccgtgatgggcatcaaaaacttcatgccagctctagaggagaccccatttcattcctgtacagctgggccaaacccaaccctagggaggccactgtctcctaagccgtcatccccgggatcagttttggctcgtccatcagtgatctgccataccactgtgactgcattgaaagatgtccctttctctctctgccagtcggtcggtgtgggacaaaacacagatatacagcagatagcggccaaaaacttcacagacacctctctcatgtacccagaggacacttgtaaatctggaccaagtacgaatacacagagtggtcttttcaacactcctccccctactccaccggacctcaaccaggacttcagtggatttcagcttctagtggatgttgcactcaaacgggctgcagagatggagcttcaggcaaaacttacagcttaacccattttcaagcaaaacagttctcagaaatgtcatgattgccggggtgaaggcaagagatgaattgcattattttatatattttttattaatatttgcacatgggattgctaaaacagcttcctgttactgagatgtcttcaatggaatacagtcattccaagaactataaacttaaagctactgtagaaacaaagggttttcttttttaaatgtttcttggtagattattcataatgtgagatggttcccaatatcatgtgatttttttttcctccccttccctttttttgttattttttcagactgtgcaatacttagagaacctatagcatcttctcattcccatgtggaacaggatgcccacatactgtctaattaataaattttccattttttttcaaacaagt

SEQ ID NO: 293299 - DNA, 981 bp, Homo sapiens
acattctttcagacccggcccgctgcggggcgttcctggggggtagcctcaaggccagcggggttccttcggctgcgtttctgtgggaggccctgaaacgcgcggagcttccctctgcctccaggctttcccagcgagagtgaaattaaacttgaaactcggatcaactggcagtcgttgttggtattgttgcagcatctggcagtgagactgaggatgaggacagcatggacattcccttggacctttcttcatccgctggctcaggcaagagaaggagaaggggcaacctacccaaggagtctgtgcagattcttcgggattggctgtatgagcaccgttacaatgcctatccttcagagcaagaaaaagcgttgctgtcccagcaaacacacctgtctacgctacaggtctgtaactggttcatcaacgcccgccgcaggctcctccctgacatgctgagaaaggatggcaaagatccaaatcagttcacaatttcccgccgtggggccaagatttctgaaacgagctctgtggagtccgtgatgggcatcaaaaacttcatgccagctctagaggagaccccatttcattcctgtacagctgggccaaacccaaccctagggaggccactgtctcctaagccgtcatccccgggatcagttttggctcgtccatcagtgatctgccataccactgtgactgcattgaaagatgtccctttctctctctgccagtcggtcggtgtgggacaaaacacagatatacagcagatagcggccaaaaacttcacagacacctctctcatgtacccagaggacacttgtaaatctggaccaagtacgaatacacagagtggtctttcaaattctccccttattcacggactaccagactccgtgggatccgtctagggagttgctccacggtgggaagggttggaattcgttccttcaaaagtccaatttatgcggagccaac

SEQ ID NO: 293300 - DNA, 1267 bp, Homo sapiens
ctctcgctcttgccctctggggacccaaaaggcccctggtcctcaagtcagccacctctgtgtcttcctccatccaaaagacctgcaggagcttctgagcctggtgacacttgctggggaccaagaccatcctactccgccccagccacgctgcatgacctcatctcagcccaaaaacagacattgggaacatctgaccatccatcccgttcccccgctctttttggctacctgcagtgaccccagcagcaggggcgggagttgcctgccctcttccagcctggaagagcatctgtcctacgctcctccttccgggagtgactcccgcccgcatctcggggtgggaagggttcaggaaacacagaccagcttatcttaaggaagcctggtcgggaatctttcaaaaacacatctgttacaagggggaaagacacctccaggacaacagtgatttgcctcagcggggcaaaggccaggcctgacggaagagcccagccttcgccgagggccgcagggagccagagactcgagcctgcggttccagccccgccgcggttccggtcccgccgcgatcccgaggcctgcgcatgctcggtgctgcgcggggctccctccttaccgcaggagctcctcatcgagaaacccaggttggtgtcttttccacgtggtagaagctggctaacctccacttccacattccagcccaagggaaagtccaaggtattgttgcagcatctggcagtgagactgaggatgaggacagcatggacattcccttggacctttcttcatccgctggctcaggcaagagaaggagaaggggcaacctacccaaggagtctgtgcagattcttcgggattggctgtatgagcaccgttacaatgcctatccttcagagcaagaaaaagcgttgctgtcccagcaaacacacctgtctacgctacaggtctgtaactggttcatcaacgcccgccgcaggctcctccctgacatgctgagaaaggatggcaaagatccaaatcagttcacaatttcccgccgtggggccaagatttctgaaacgagctctgtggagtccgtgatgggcatcaaaaacttcatgccagctctagaggagaccccatttcattcctgtacagctgggccaaacccaaccctagggaggccactgtctcctaagccgtcatccccgggatcagttttggctcgtccatcagtgatctgccataccactgtgactgcattgaaagatgtccctttctctct

SEQ ID NO: 293301 - DNA, 679 bp, Homo sapiens
aaacactgctccttctcctcgctctcagttgttgggaaagcatggttacattgaatggtcagcgttaagtgagctttgcaatagttgctgtgcttataaagcaactgacaactggcccttgtcctttcctaggtattgttgcagcatctggcagtgagactgaggatgaggacagcatggacattcccttggacctttcttcatccgctggctcaggcaagagaaggagaaggggcaacctacccaaggagtctgtgcagattcttcgggattggctgtatgagcaccgttacaatgcctatccttcagagcaagaaaaagcgttgctgtcccagcaaacacacctgtctacgctacaggtctgtaactggttcatcaacgcccgccgcaggctcctccctgacatgctgagaaaggatggcaaagatccaaatcagttcacaatttcccgccgtggggccaagatttctgaaacgagctctgtggagtccgtgatgggcatcaaaaacttcatgccagctctagaggagaccccatttcattcctgtacagctgggccaaacccaaccctagggaggccactgtctcctaagccgtcatccccgggatcagttttggctcgtccatcagtgatctgccataccactgtgactgcattgaaagatgtccctttctctct

SEQ ID NO: 293302 - DNA, 630 bp, Homo sapiens
cacaacatttccttgtatgtggatagcgtgaaagaagcttgtgatcctgcccccaccctccccaccgccacattttttaaagtgtattgttgcagcatctggcagtgagactgaggatgaggacagcatggacattcccttggacctttcttcatccgctggctcaggcaagagaaggagaaggggcaacctacccaaggagtctgtgcagattcttcgggattggctgtatgagcaccgttacaatgcctatccttcagagcaagaaaaagcgttgctgtcccagcaaacacacctgtctacgctacaggtctgtaactggttcatcaacgcccgccgcaggctcctccctgacatgctgagaaaggatggcaaagatccaaatcagttcacaatttcccgccgtggggccaagatttctgaaacgagctctgtggagtccgtgatgggcatcaaaaacttcatgccagctctagaggagaccccatttcattcctgtacagctgggccaaacccaaccctagggaggccactgtctcctaagccgtcatccccgggatcagttttggctcgtccatcagtgatctgccataccactgtgactgcattgaaagatgtccctttctctct

SEQ ID NO: 293303 - DNA, 150 bp, Homo sapiens
actcctccccctactccaccggacctcaaccaggacttcagtggatttcagcttctagtggatgttgcactcaaacgggctgcagagatggagcttcaggcctctggagttgggcaggcctctggagttgggcaggcctctggagttggc

SEQ ID NO: 293304 - DNA, 1603 bp, Homo sapiens
cactctgacagcgccgaggtgcgccgagcaggagcagggaacaaaggagcggagaggggaggggagagagttgggcgagggagagcccccggccggctgccagaagatcccggcgggaggaagcccaagtgtcacttgaattccacccaaggagcgggcgcctgggatcagagcgtcctgtttagcaataacggctggagcacgtcctacaagttacgggagagtcggctgtgaaggagacgttcgcttatcccctgtgtccccgctcctggcccctccagacccccgccttgcctcgcgctgggaggggagatccagaatgaaaggcaagaaaggtattgttgcagcatctggcagtgagactgaggatgaggacagcatggacattcccttggacctttcttcatccgctggctcaggcaagagaaggagaaggggcaacctacccaaggagtctgtgcagattcttcgggattggctgtatgagcaccgttacaatgcctatccttcagagcaagaaaaagcgttgctgtcccagcaaacacacctgtctacgctacaggtctgtaactggttcatcaacgcccgccgcaggctcctccctgacatgctgagaaaggatggcaaagatccaaatcagttcacaatttcccgccgtggggccaagatttctgaaacgagctctgtggagtccgtgatgggcatcaaaaacttcatgccagctctagaggagaccccatttcattcctgtacagctgggccaaacccaaccctagggaggccactgtctcctaagccgtcatccccgggatcagttttggctcgtccatcagtgatctgccataccactgtgactgcattgaaagatgtccctttctctctctgccagtcggtcggtgtgggacaaaacacagatatacagcagatagcggccaaaaacttcacagacacctctctcatgtacccagaggacacttgtaaatctggaccaagtacgaatacacagagtggtcttttcaacactcctccccctactccaccggacctcaaccaggacttcagtggatttcagcttctagtggatgttgcactcaaacgggctgcagagatggagcttcaggcaaaacttacagcttaacccattttcaagcaaaacagttctcagaaatgtcatgattgccggggtgaaggcaagagatgaattgcattattttatatattttttattaatatttgcacatgggattgctaaaacagcttcctgttactgagatgtcttcaatggaatacagtcattccaagaactataaacttaaagctactgtagaaacaaagggttttcttttttaaatgtttcttggtagattattcataatgtgagatggttcccaatatcatgtgatttttttttcctccccttccctttttttgttattttttcagactgtgcaatacttagagaacctatagcatcttctcattcccatgtggaacaggatgcccacatactgtctaattaataaattttccattttttttcaaacaagtatgaatctagttggttgatgcctttttttcatgacataataaagtattttcttta

SEQ ID NO: 293305 - DNA, 1928 bp, Homo sapiens
ttcccccccgccccacccccgccgacctcccactgtcgctgctggaggaagagccccgggaggagaagggtgcgccgcgccgcgcccgcgtgtcaatggcagccgcgcattctggaagaagttggttcttgtctcgaatacttttcctcccgtgccccgccccttgaatcagaggcggctgtctcgtgcggctagagcagggccagtagagttcggggcagctgtcaaaaacgagacggggaggcttttcttcccgggggtggaggagggaaggagggaggtgtccttttttccatctgttgcagtttccgaaccaaacgcaccctcgccagccccgggaagaaaggcccaagggagaaacctggggcgctcggctggtgcccccaccgccgggcgagggatgcgggcggtccgtgcgcggcaggcggaaaggatcgtgtttctggacccggccaccccccgcgtccgcaccgccgcccccgagggacgagtgacagcggccgccgcgctcggtccagtcttcccggctggaagcgggcgcctgggatcagagcgtcctgtttagcaataacggctggagcacgtcctacaagttacgggagagtcggctgtgaaggagacgttcgcttatcccctgtgtccccgctcctggcccctccagacccccgccttgcctcgcgctgggaggggagatccagaatgaaaggcaagaaaggtattgttgcagcatctggcagtgagactgaggatgaggacagcatggacattcccttggacctttcttcatccgctggctcaggcaagagaaggagaaggggcaacctacccaaggagtctgtgcagattcttcgggattggctgtatgagcaccgttacaatgcctatccttcagagcaagaaaaagcgttgctgtcccagcaaacacacctgtctacgctacaggtctgtaactggttcatcaacgcccgccgcaggctcctccctgacatgctgagaaaggatggcaaagatccaaatcagttcacaatttcccgccgtggggccaagatttctgaaacgagctctgtggagtccgtgatgggcatcaaaaacttcatgccagctctagaggagaccccatttcattcctgtacagctgggccaaacccaaccctagggaggccactgtctcctaagccgtcatccccgggatcagttttggctcgtccatcagtgatctgccataccactgtgactgcattgaaagatgtccctttctctctctgccagtcggtcggtgtgggacaaaacacagatatacagcagatagcggccaaaaacttcacagacacctctctcatgtacccagaggacacttgtaaatctggaccaagtacgaatacacagagtggtcttttcaacactcctccccctactccaccggacctcaaccaggacttcagtggatttcagcttctagtggatgttgcactcaaacgggctgcagagatggagcttcaggcaaaacttacagcttaacccattttcaagcaaaacagttctcagaaatgtcatgattgccggggtgaaggcaagagatgaattgcattattttatatattttttattaatatttgcacatgggattgctaaaacagcttcctgttactgagatgtcttcaatggaatacagtcattccaagaactataaacttaaagctactgtagaaacaaagggttttcttttttaaatgtttcttggtagattattcataatgtgagatggttcccaatatcatgtgatttttttttcctccccttccctttttttgttattttttcagactgtgcaatacttagagaacctatagcatcttctcattcccatgtggaacaggatgcccacatactgtctaattaataaattttccattttttttcaaacaagt

SEQ ID NO: 293306 - DNA, 1743 bp, Homo sapiens
ttcccccccgccccacccccgccgacctcccactgtcgctgctggaggaagagccccgggaggagaagggtgcgccgcgccgcgcccgcgtgtcaatggcagccgcgcattctggaagaatttccgaaccaaacgcaccctcgccagccccgggaagaaaggcccaagggagaaacctggggcgctcggctggtgcccccaccgccgggcgagggatgcgggcggtccgtgcgcggcaggcggaaaggatcgtgtttctggacccggccaccccccgcgtccgcaccgccgcccccgagggacgagtgacagcggccgccgcgctcggtccagtcttcccggctggaagcgggcgcctgggatcagagcgtcctgtttagcaataacggctggagcacgtcctacaagttacgggagagtcggctgtgaaggagacgttcgcttatcccctgtgtccccgctcctggcccctccagacccccgccttgcctcgcgctgggaggggagatccagaatgaaaggcaagaaaggtattgttgcagcatctggcagtgagactgaggatgaggacagcatggacattcccttggacctttcttcatccgctggctcaggcaagagaaggagaaggggcaacctacccaaggagtctgtgcagattcttcgggattggctgtatgagcaccgttacaatgcctatccttcagagcaagaaaaagcgttgctgtcccagcaaacacacctgtctacgctacaggtctgtaactggttcatcaacgcccgccgcaggctcctccctgacatgctgagaaaggatggcaaagatccaaatcagttcacaatttcccgccgtggggccaagatttctgaaacgagctctgtggagtccgtgatgggcatcaaaaacttcatgccagctctagaggagaccccatttcattcctgtacagctgggccaaacccaaccctagggaggccactgtctcctaagccgtcatccccgggatcagttttggctcgtccatcagtgatctgccataccactgtgactgcattgaaagatgtccctttctctctctgccagtcggtcggtgtgggacaaaacacagatatacagcagatagcggccaaaaacttcacagacacctctctcatgtacccagaggacacttgtaaatctggaccaagtacgaatacacagagtggtcttttcaacactcctccccctactccaccggacctcaaccaggacttcagtggatttcagcttctagtggatgttgcactcaaacgggctgcagagatggagcttcaggcaaaacttacagcttaacccattttcaagcaaaacagttctcagaaatgtcatgattgccggggtgaaggcaagagatgaattgcattattttatatattttttattaatatttgcacatgggattgctaaaacagcttcctgttactgagatgtcttcaatggaatacagtcattccaagaactataaacttaaagctactgtagaaacaaagggttttcttttttaaatgtttcttggtagattattcataatgtgagatggttcccaatatcatgtgatttttttttcctccccttccctttttttgttattttttcagactgtgcaatacttagagaacctatagcatcttctcattcccatgtggaacaggatgcccacatactgtctaattaataaattttccattttttttcaaacaagt

SEQ ID NO: 293307 - DNA, 1802 bp, Homo sapiens
ttcccccccgccccacccccgccgacctcccactgtcgctgctggaggaagagccccgggaggagaagggtgcgccgcgccgcgcccgcgtgtcaatggcagccgcgcattctggaagaagttggttcttgtctcgaatacttttcctcccgtgccccgccccttgaatcagaggcggctgtctcgtgcggctagagcagggccagtagagttcggggcagctgtcaaaaacgagacggggaggcttttcttcccgggggtggaggagggaaggagggaggtgtccttttttccatctgttgcagtttccgaaccaaacgcaccctcgccagccccgggaagaaaggcccaagggagaaacctggggcgctcggctggtgcccccaccgccgggcgagggatgcgggcggtccgtgcgcggcaggcggaaaggatcgtgtttctggacccggccaccccccgcgtccgcaccgccgcccccgagggacgagtgacagcggccgccgcgctcggtccagtcttcccggctggaaggtattgttgcagcatctggcagtgagactgaggatgaggacagcatggacattcccttggacctttcttcatccgctggctcaggcaagagaaggagaaggggcaacctacccaaggagtctgtgcagattcttcgggattggctgtatgagcaccgttacaatgcctatccttcagagcaagaaaaagcgttgctgtcccagcaaacacacctgtctacgctacaggtctgtaactggttcatcaacgcccgccgcaggctcctccctgacatgctgagaaaggatggcaaagatccaaatcagttcacaatttcccgccgtggggccaagatttctgaaacgagctctgtggagtccgtgatgggcatcaaaaacttcatgccagctctagaggagaccccatttcattcctgtacagctgggccaaacccaaccctagggaggccactgtctcctaagccgtcatccccgggatcagttttggctcgtccatcagtgatctgccataccactgtgactgcattgaaagatgtccctttctctctctgccagtcggtcggtgtgggacaaaacacagatatacagcagatagcggccaaaaacttcacagacacctctctcatgtacccagaggacacttgtaaatctggaccaagtacgaatacacagagtggtcttttcaacactcctccccctactccaccggacctcaaccaggacttcagtggatttcagcttctagtggatgttgcactcaaacgggctgcagagatggagcttcaggcaaaacttacagcttaacccattttcaagcaaaacagttctcagaaatgtcatgattgccggggtgaaggcaagagatgaattgcattattttatatattttttattaatatttgcacatgggattgctaaaacagcttcctgttactgagatgtcttcaatggaatacagtcattccaagaactataaacttaaagctactgtagaaacaaagggttttcttttttaaatgtttcttggtagattattcataatgtgagatggttcccaatatcatgtgatttttttttcctccccttccctttttttgttattttttcagactgtgcaatacttagagaacctatagcatcttctcattcccatgtggaacaggatgcccacatactgtctaattaataaattttccattttttttcaaacaagtatgaatctagttggttgatgcctttttttcatgacataataaagtattttcttta

SEQ ID NO: 293308 - DNA, 1451 bp, Homo sapiens
acattctttcagacccggcccgctgcggggcgttcctggggggtagcctcaaggccagcggggttccttcggctgcgtttctgtgggaggccctgaaacgcgcggagcttccctctgcctccaggctttcccagcgagagtgaaattaaacttgaaactcggatcaactggcagtcgttgttggtattgttgcagcatctggcagtgagactgaggatgaggacagcatggacattcccttggacctttcttcatccgctggctcaggcaagagaaggagaaggggcaacctacccaaggagtctgtgcagattcttcgggattggctgtatgagcaccgttacaatgcctatccttcagagcaagaaaaagcgttgctgtcccagcaaacacacctgtctacgctacaggtctgtaactggttcatcaacgcccgccgcaggctcctccctgacatgctgagaaaggatggcaaagatccaaatcagttcacaatttcccgccgtggggccaagatttctgaaacgagctctgtggagtccgtgatgggcatcaaaaacttcatgccagctctagaggagaccccatttcattcctgtacagctgggccaaacccaaccctagggaggccactgtctcctaagccgtcatccccgggatcagttttggctcgtccatcagtgatctgccataccactgtgactgcattgaaagatgtccctttctctctctgccagtcggtcggtgtgggacaaaacacagatatacagcagatagcggccaaaaacttcacagacacctctctcatgtacccagaggacacttgtaaatctggaccaagtacgaatacacagagtggtcttttcaacactcctccccctactccaccggacctcaaccaggacttcagtggatttcagcttctagtggatgttgcactcaaacgggctgcagagatggagcttcaggcaaaacttacagcttaacccattttcaagcaaaacagttctcagaaatgtcatgattgccggggtgaaggcaagagatgaattgcattattttatatattttttattaatatttgcacatgggattgctaaaacagcttcctgttactgagatgtcttcaatggaatacagtcattccaagaactataaacttaaagctactgtagaaacaaagggttttcttttttaaatgtttcttggtagattattcataatgtgagatggttcccaatatcatgtgatttttttttcctccccttccctttttttgttattttttcagactgtgcaatacttagagaacctatagcatcttctcattcccatgtggaacaggatgcccacatactgtctaattaataaattttccattttttttcaaacaagtatgaatctagttggttgatgcctttttttcatgacataataaagtattttcttta

SEQ ID NO: 293309 - DNA, 1438 bp, Homo sapiens
gcagtgggggtgcatctacgggagcggttgggctgtaagctttcgctacatcacagaattgtgccagtgtttctctttggagtgcctcgccagctttaataaccgtttggatatgacttgctcgggcaaaagttgtgcattggcccgatcaagcctgacttctagccaaggtattgttgcagcatctggcagtgagactgaggatgaggacagcatggacattcccttggacctttcttcatccgctggctcaggcaagagaaggagaaggggcaacctacccaaggagtctgtgcagattcttcgggattggctgtatgagcaccgttacaatgcctatccttcagagcaagaaaaagcgttgctgtcccagcaaacacacctgtctacgctacaggtctgtaactggttcatcaacgcccgccgcaggctcctccctgacatgctgagaaaggatggcaaagatccaaatcagttcacaatttcccgccgtggggccaagatttctgaaacgagctctgtggagtccgtgatgggcatcaaaaacttcatgccagctctagaggagaccccatttcattcctgtacagctgggccaaacccaaccctagggaggccactgtctcctaagccgtcatccccgggatcagttttggctcgtccatcagtgatctgccataccactgtgactgcattgaaagatgtccctttctctctctgccagtcggtcggtgtgggacaaaacacagatatacagcagatagcggccaaaaacttcacagacacctctctcatgtacccagaggacacttgtaaatctggaccaagtacgaatacacagagtggtcttttcaacactcctccccctactccaccggacctcaaccaggacttcagtggatttcagcttctagtggatgttgcactcaaacgggctgcagagatggagcttcaggcaaaacttacagcttaacccattttcaagcaaaacagttctcagaaatgtcatgattgccggggtgaaggcaagagatgaattgcattattttatatattttttattaatatttgcacatgggattgctaaaacagcttcctgttactgagatgtcttcaatggaatacagtcattccaagaactataaacttaaagctactgtagaaacaaagggttttcttttttaaatgtttcttggtagattattcataatgtgagatggttcccaatatcatgtgatttttttttcctccccttccctttttttgttattttttcagactgtgcaatacttagagaacctatagcatcttctcattcccatgtggaacaggatgcccacatactgtctaattaataaattttccattttttttcaaacaagtatgaatctagttggttgatgcctttttttcatgacataataaagtattttcttta

SEQ ID NO: 293310 - DNA, 1560 bp, Homo sapiens
ttcccccccgccccacccccgccgacctcccactgtcgctgctggaggaagagccccgggaggagaagggtgcgccgcgccgcgcccgcgtgtcaatggcagccgcgcattctggaagaagttggttcttgtctcgaatacttttcctcccgtgccccgccccttgaatcagaggcggctgtctcgtgcggctagagcagggccagtagagttcggggcagctgtcaaaaacgagacggggaggcttttcttcccgggggtggaggagggaaggagggaggtgtccttttttccatctgttgcagtttccgaaccaaacgcaccctcgccagccccgggaagaaaggcccaagggagaaacctggggcgctcggctggtgcccccaccgccgggcgagggatgcgggcggtccgtgcgcggcaggcggaaaggatcgtgtttctggacccggccaccccccgcgtccgcaccgccgcccccgagggacgagtgacagcggccgccgcgctcggtccagtcttcccggctggaaggtattgttgcagcatctggcagtgagactgaggatgagaaaggatggcaaagatccaaatcagttcacaatttcccgccgtggggccaagatttctgaaacgagctctgtggagtccgtgatgggcatcaaaaacttcatgccagctctagaggagaccccatttcattcctgtacagctgggccaaacccaaccctagggaggccactgtctcctaagccgtcatccccgggatcagttttggctcgtccatcagtgatctgccataccactgtgactgcattgaaagatgtccctttctctctctgccagtcggtcggtgtgggacaaaacacagatatacagcagatagcggccaaaaacttcacagacacctctctcatgtacccagaggacacttgtaaatctggaccaagtacgaatacacagagtggtcttttcaacactcctccccctactccaccggacctcaaccaggacttcagtggatttcagcttctagtggatgttgcactcaaacgggctgcagagatggagcttcaggcaaaacttacagcttaacccattttcaagcaaaacagttctcagaaatgtcatgattgccggggtgaaggcaagagatgaattgcattattttatatattttttattaatatttgcacatgggattgctaaaacagcttcctgttactgagatgtcttcaatggaatacagtcattccaagaactataaacttaaagctactgtagaaacaaagggttttcttttttaaatgtttcttggtagattattcataatgtgagatggttcccaatatcatgtgatttttttttcctccccttccctttttttgttattttttcagactgtgcaatacttagagaacctatagcatcttctcattcccatgtggaacaggatgcccacatactgtctaattaataaattttccattttttttcaaacaagtatgaatctagttggttgatgcctttttttcatgacataataaagtattttcttta

SEQ ID NO: 293311 - DNA, 1816 bp, Homo sapiens
acattctttcagacccggcccgctgcggggcgttcctggggggtagcctcaaggccagcggggttccttcggctgcgtttctgtgggaggccctgaaacgcgcggagcttccctctgcctccaggctttcccagcgagagtgaaattaaacttgaaactcggatcaactggcagtcgttgttggtagaacgccctaaggacccctccccgcgggacggagggaggactcgggacagggaattggccctgggagaaaacgcgcggggggcgtccgagacgccccgtgaaagccgtgccgacccttgggaggactgacaggtctagagacacgcgctgtctgttgtggtgggcctcccgggaataagtgaggggctctgtgtttcgaggatggttctagcgcagagccgggtgtctgccggggtgggctccccgcattgttcgggctccggcgggggcggctctgattcctttccatggcccgcctcccaccccgggaatccccagtgctccttttccacggcttttctggcgtccccccgactctcccgcggcactttggcctaccttcccccagcgccgtggtcctccctggcgaccccctctgcgctcctggggtcctcctgcgccccccctcctccaccggcgcgctgcccacagccgcgtgccctctccccggagctggggaccaaggctgggccccgccggccgcatcggtgggaacttccgcggtccccatcccagggcgcacagggtccagctcctcggcgccgactcctggaaacaatgaaaggtattgttgcagcatctggcagtgagactgaggatgagaaaggatggcaaagatccaaatcagttcacaatttcccgccgtggggccaagatttctgaaacgagctctgtggagtccgtgatgggcatcaaaaacttcatgccagctctagaggagaccccatttcattcctgtacagctgggccaaacccaaccctagggaggccactgtctcctaagccgtcatccccgggatcagttttggctcgtccatcagtgatctgccataccactgtgactgcattgaaagatgtccctttctctctctgccagtcggtcggtgtgggacaaaacacagatatacagcagatagcggccaaaaacttcacagacacctctctcatgtacccagaggacacttgtaaatctggaccaagtacgaatacacagagtggtcttttcaacactcctccccctactccaccggacctcaaccaggacttcagtggatttcagcttctagtggatgttgcactcaaacgggctgcagagatggagcttcaggcaaaacttacagcttaacccattttcaagcaaaacagttctcagaaatgtcatgattgccggggtgaaggcaagagatgaattgcattattttatatattttttattaatatttgcacatgggattgctaaaacagcttcctgttactgagatgtcttcaatggaatacagtcattccaagaactataaacttaaagctactgtagaaacaaagggttttcttttttaaatgtttcttggtagattattcataatgtgagatggttcccaatatcatgtgatttttttttcctccccttccctttttttgttattttttcagactgtgcaatacttagagaacctatagcatcttctcattcccatgtggaacaggatgcccacatactgtctaattaataaattttccattttttttcaaacaagtatgaatctagttggttgatgcctttttttcatgacataataaagtattttcttta

SEQ ID NO: 293312 - DNA, 2212 bp, Homo sapiens
  misc_feature (2206)..(2207): n is a, c, g, or t
  misc_feature (2210)..(2212): n is a, c, g, or t
cgcggtccagagcgcggagcgcgcagcgcgggccggagggagggagggagggtgggcgaggggagaggacttgaacacacgggaccggacaggaccgaccgaggggcggcggcgaaaggcagagcgccgcgatctctgtcgggaagcgcaacctccccgggccccgcggggccgcgcagggggcgtcctcaaccccgcgcccgctccctctttccatcccctgccgcccgcaggccaccccggggcccggccatccgcgcgcgcatccccgggttcgggcccgtccctggccctcgagggagccgccgccttcatcgccacatctgcagcggccgcaccagaggccgcccgggcgggaccccagcgtgagcatcgggcgcccccctaggagtgcaccacccccggagcccccctcaacacggaccgcgcccgccgggcacacaagaatggtcactcagatactgggggccatggagtctcaggtgggggggggcccggccggcccggccctgcccaacgggccactccttggtacaaatggagccactgacgacagcaagaccaacctcatcgtcaactacctgccccagaacatgacccaggatgagttcaagagtctcttcggcagcattggcgacatcgagtcctgcaagttggttcgggacaagatcacagggcagagccttggctacgggtttgtgaactattctgaccccaatgatgcagacaaagccatcaacaccctcaacggcctcaaattacagacgaagaccatcaaggtgtcctatgccagacccagttcagcatccatccgggatgctaacctgtacgtcagcgggctccccaagaccatgagccagaaagagatggagcagctcttctcccagtacggccgcatcatcacgtcccgcatcctggtggaccaggtcacaggtgtctctcggggtgtgggattcatccgctttgacaagaggattgaggccgaagaggctatcaaaggactgaatgggcagaagccgctgggcgcagctgagcccatcacagtcaagttcgcgaacaacccaagtcagaagacggggcaggcgctgctcacccacctctaccagtcatccgcccggcgctacgcaggccccctacaccatcagacccagcgtttccggctggacaatttgctcaacatggcctacggcgtcaagaggttctcgccgatcgccatcgatggtatgagcggcctggcgggcgtgggcctgtcggggggcgcggcgggcgccggctggtgcatcttcgtgtacaacctgtcaccggaggcagacgagagcgtgctgtggcagctgttcgggccttttggggcagtcaccaacgtcaaggtcatccgtgatttcaccaccaacaagtgcaagggtttcggcttcgtgaccatgaccaactatgacgaggcggccatggccatcgccagcctgaacggctatcgcctgggcgagcgcgtgctgcaggtctccttcaagaccagcaaacagcacaaggcgtgagcccaccccgcctgccctcccaccccctccccgggcagcagagagagagagagagaaagagagagagagagagagaaggggcccaagagagacagcacaggcagccccacggacgacgcgagggccccacgtccctgcggaagccacagggtgagcactctggggtgggagggtctgcagggaattgggggggtgcccggggatcccccgccccatcctcctgcccccaccccaggctgggctgttcactctctcgtcttggtttggttcatggtgaaggtttttgtttcttttttcggctaaaaagaatgcagagatgtgcccccacccccaccctcgaccacccccgatgggatggcttggggggctccagggggtgccctcccagacccccttgcccaggcctccccagcacctaggtggggcctggggtaggaggaacaggtttaaaaatccccaaaaaagcgaaccgtgaggaggggtgtgggcacccccggcccagtgccccctggtggaatgcgggggagcaggcagtggggctggaagcagaaacaaaatgaaaaaaaaaggggggtgggaggggaagaaaaactctatttttgtaaaaagggaaaaagacctcgtggagaatttttactggggattcttgaacttgaaaaaaaaaaacacaaaaaagnnaannn

SEQ ID NO: 293313 - DNA, 1964 bp, Homo sapiens
cgcggtccagagcgcggagcgcgcagcgcgggccggagggagggagggagggtgggcgaggggagaggacttgaacacacgggaccggacaggaccgaccgaggggcggcggcgaaaggcagagcgccgcgatctctgtcgggaagcgcaacctccccgggccccgcggggccgcgcagggggcgtcctcaaccccgcgcccgctccctctttccatcccctgccgcccgcaggccaccccggggcccggccatccgcgcgcgcatccccgggttcgggcccgtccctggccctcgagggagccgccgccttcatcgccacatctgcagcggccgcaccagaggccgcccgggcgggaccccagcgtgagcatcgggcgcccccctaggagtgcaccacccccggagcccccctcaacacggaccgcgcccgccgggcacacaagaatggtcactcagatactgggggccatggagtctcaggtgggggggggcccggccggcccggccctgcccaacgggccactccttggtacaaatggagccactgacgacagcaagaccaacctcatcgtcaactacctgccccagaacatgacccaggatgagttcaagagtctcttcggcagcattggcgacatcgagtcctgcaagttggttcgggacaagatcacagggcagagccttggctacgggtttgtgaactattctgaccccaatgatgcagacaaagccatcaacaccctcaacggcctcaaattacagacgaagaccatcaaggtgtcctatgccagacccagttcagcatccatccgggatgctaacctgtacgtcagcgggctccccaagaccatgagccagaaagagatggagcagctcttctcccagtacggccgcatcatcacgtcccgcatcctggtggaccaggtcacaggtgtctctcggggtgtgggattcatccgctttgacaagaggattgaggccgaagaggctatcaaaggactgaatgggcagaagccgctgggcgcagctgagcccatcacagtcaagttcgcgaacaacccaagtcagaagacggggcaggcgctgctcacccacctctaccagtcatccgcccggcgctacgcaggccccctacaccatcagacccagcgtttccggctggacaatttgctcaacatggcctacggcgtcaagagtcccctgtcgctcatcgccaggttctcgccgatcgccatcgatggtatgagcggcctggcgggcgtgggcctgtcggggggcgcggcgggcgccggctggtgcatcttcgtgtacaacctgtcaccggaggcagacgagagcgtgctgtggcagctgttcgggccttttggggcagtcaccaacgtcaaggtcatccgtgatttcaccaccaacaagtgcaagggtttcggcttcgtgaccatgaccaactatgacgaggcggccatggccatcgccagcctgaacggctatcgcctgggcgagcgcgtgctgcaggtctccttcaagaccagcaaacagcacaaggcgtgagcccaccccgcctgccctcccacccccaagactgggaggggacttctttttctaaaacacaaaactcagcccagccaggccccctccctggaggccagcccctccccgcagggagccctcgcaccgctccccaccccactcagcggccccatcggaactgagaattgcaaaacccccgactttagctatagttaagttgccttcccccggtgtccccacgtttggtgtctggctatggcgcccccatctgactgtccagctctctctcccccacccctcccggtgttgttattaaacgtctgtggagcttctgctgcaaggaacaaaaaagaaaaaaatcaaaaaagcgacaaaaaaacacaaacagaagaggaaaaaaaagcaacaaaaaaagaaaacacacagaagagattt

SEQ ID NO: 293314 - DNA, 2233 bp, Homo sapiens
  misc_feature (2227)..(2228): n is a, c, g, or t
  misc_feature (2231)..(2233): n is a, c, g, or t
cgcggtccagagcgcggagcgcgcagcgcgggccggagggagggagggagggtgggcgaggggagaggacttgaacacacgggaccggacaggaccgaccgaggggcggcggcgaaaggcagagcgccgcgatctctgtcgggaagcgcaacctccccgggccccgcggggccgcgcagggggcgtcctcaaccccgcgcccgctccctctttccatcccctgccgcccgcaggccaccccggggcccggccatccgcgcgcgcatccccgggttcgggcccgtccctggccctcgagggagccgccgccttcatcgccacatctgcagcggccgcaccagaggccgcccgggcgggaccccagcgtgagcatcgggcgcccccctaggagtgcaccacccccggagcccccctcaacacggaccgcgcccgccgggcacacaagaatggtcactcagatactgggggccatggagtctcaggtgggggggggcccggccggcccggccctgcccaacgggccactccttggtacaaatggagccactgacgacagcaagaccaacctcatcgtcaactacctgccccagaacatgacccaggatgagttcaagagtctcttcggcagcattggcgacatcgagtcctgcaagttggttcgggacaagatcacagggcagagccttggctacgggtttgtgaactattctgaccccaatgatgcagacaaagccatcaacaccctcaacggcctcaaattacagacgaagaccatcaaggtgtcctatgccagacccagttcagcatccatccgggatgctaacctgtacgtcagcgggctccccaagaccatgagccagaaagagatggagcagctcttctcccagtacggccgcatcatcacgtcccgcatcctggtggaccaggtcacaggtgtctctcggggtgtgggattcatccgctttgacaagaggattgaggccgaagaggctatcaaaggactgaatgggcagaagccgctgggcgcagctgagcccatcacagtcaagttcgcgaacaacccaagtcagaagacggggcaggcgctgctcacccacctctaccagtcatccgcccggcgctacgcaggccccctacaccatcagacccagcgtttccggctggacaatttgctcaacatggcctacggcgtcaagagtcccctgtcgctcatcgccaggttctcgccgatcgccatcgatggtatgagcggcctggcgggcgtgggcctgtcggggggcgcggcgggcgccggctggtgcatcttcgtgtacaacctgtcaccggaggcagacgagagcgtgctgtggcagctgttcgggccttttggggcagtcaccaacgtcaaggtcatccgtgatttcaccaccaacaagtgcaagggtttcggcttcgtgaccatgaccaactatgacgaggcggccatggccatcgccagcctgaacggctatcgcctgggcgagcgcgtgctgcaggtctccttcaagaccagcaaacagcacaaggcgtgagcccaccccgcctgccctcccaccccctccccgggcagcagagagagagagagagaaagagagagagagagagagaaggggcccaagagagacagcacaggcagccccacggacgacgcgagggccccacgtccctgcggaagccacagggtgagcactctggggtgggagggtctgcagggaattgggggggtgcccggggatcccccgccccatcctcctgcccccaccccaggctgggctgttcactctctcgtcttggtttggttcatggtgaaggtttttgtttcttttttcggctaaaaagaatgcagagatgtgcccccacccccaccctcgaccacccccgatgggatggcttggggggctccagggggtgccctcccagacccccttgcccaggcctccccagcacctaggtggggcctggggtaggaggaacaggtttaaaaatccccaaaaaagcgaaccgtgaggaggggtgtgggcacccccggcccagtgccccctggtggaatgcgggggagcaggcagtggggctggaagcagaaacaaaatgaaaaaaaaaggggggtgggaggggaagaaaaactctatttttgtaaaaagggaaaaagacctcgtggagaatttttactggggattcttgaacttgaaaaaaaaaaacacaaaaaagnnaannn

SEQ ID NO: 293315 - DNA, 2182 bp, Homo sapiens
  misc_feature (2176)..(2177): n is a, c, g, or t
  misc_feature (2180)..(2182): n is a, c, g, or t
cgcggtccagagcgcggagcgcgcagcgcgggccggagggagggagggagggtgggcgaggggagaggacttgaacacacgggaccggacaggaccgaccgaggggcggcggcgaaaggcagagcgccgcgatctctgtcgggaagcgcaacctccccgggccccgcggggccgcgcagggggcgtcctcaaccccgcgcccgctccctctttccatcccctgccgcccgcaggccaccccggggcccggccatccgcgcgcgcatccccgggttcgggcccgtccctggccctcgagggagccgccgccttcatcgccacatctgcagcggccgcaccagaggccgcccgggcgggaccccagcgtgagcatcgggcgcccccctaggagtgcaccacccccggagcccccctcaacacggaccgcgcccgccgggcacacaagaatggtcactcagatactgggggccatggagtctcaggtgggggggggcccggccggcccggccctgcccaacgggccactccttggtacaaatggagccactgacgacagcaagaccaacctcatcgtcaactacctgccccagaacatgacccaggatgagttcaagagtctcttcggcagcattggcgacatcgagtcctgcaagttggttcgggacaagatcacagacaaagccatcaacaccctcaacggcctcaaattacagacgaagaccatcaaggtgtcctatgccagacccagttcagcatccatccgggatgctaacctgtacgtcagcgggctccccaagaccatgagccagaaagagatggagcagctcttctcccagtacggccgcatcatcacgtcccgcatcctggtggaccaggtcacaggtgtctctcggggtgtgggattcatccgctttgacaagaggattgaggccgaagaggctatcaaaggactgaatgggcagaagccgctgggcgcagctgagcccatcacagtcaagttcgcgaacaacccaagtcagaagacggggcaggcgctgctcacccacctctaccagtcatccgcccggcgctacgcaggccccctacaccatcagacccagcgtttccggctggacaatttgctcaacatggcctacggcgtcaagagtcccctgtcgctcatcgccaggttctcgccgatcgccatcgatggtatgagcggcctggcgggcgtgggcctgtcggggggcgcggcgggcgccggctggtgcatcttcgtgtacaacctgtcaccggaggcagacgagagcgtgctgtggcagctgttcgggccttttggggcagtcaccaacgtcaaggtcatccgtgatttcaccaccaacaagtgcaagggtttcggcttcgtgaccatgaccaactatgacgaggcggccatggccatcgccagcctgaacggctatcgcctgggcgagcgcgtgctgcaggtctccttcaagaccagcaaacagcacaaggcgtgagcccaccccgcctgccctcccaccccctccccgggcagcagagagagagagagagaaagagagagagagagagagaaggggcccaagagagacagcacaggcagccccacggacgacgcgagggccccacgtccctgcggaagccacagggtgagcactctggggtgggagggtctgcagggaattgggggggtgcccggggatcccccgccccatcctcctgcccccaccccaggctgggctgttcactctctcgtcttggtttggttcatggtgaaggtttttgtttcttttttcggctaaaaagaatgcagagatgtgcccccacccccaccctcgaccacccccgatgggatggcttggggggctccagggggtgccctcccagacccccttgcccaggcctccccagcacctaggtggggcctggggtaggaggaacaggtttaaaaatccccaaaaaagcgaaccgtgaggaggggtgtgggcacccccggcccagtgccccctggtggaatgcgggggagcaggcagtggggctggaagcagaaacaaaatgaaaaaaaaaggggggtgggaggggaagaaaaactctatttttgtaaaaagggaaaaagacctcgtggagaatttttactggggattcttgaacttgaaaaaaaaaaacacaaaaaagnnaannn

SEQ ID NO: 293316 - DNA, 450 bp, Homo sapiens
cgcaccgccccacgtcacgcccaccgctccctggcctctgattggccgaagctggcagagcagggcctctcgcgctcctgggtccatgcaacctgctccctgtggctgccgagttctcgggaacagcggctcggcctgcaaggctgttgtttcaagaaatgaaaatgaagggcgccctggaataggttcgccgaagagagaggttcgtgtctcagaaagtgtcgctgggaaaaaaaaatgcaattgaattcgccttggttgcgttttggttttcttaattttttgcatgattctttgctccactttccaaattcagcaacatggcctgtcgcggtggctcatgcctgtattcccagcactttgggaggccaaagcaggaagatcgcttgagcccaggagtttgagaccatcctggacaaggtagcaagaccccgtctttacagaaaactt

SEQ ID NO: 293317 - DNA, 415 bp, Homo sapiens
cgcaccgccccacgtcacgcccaccgctccctggcctctgattggccgaagctggcagagcagggcctctcgcgctcctgggtccatgcaacctgctccctgtggctgccgagttctcgggaacagcggctcggcctgcaaggctgttgtttcaagaaatgaaaatgaagggcgccctggaataggttcgccgaagagagagcaacatggcctgtcgcggtggctcatgcctgtattcccagcactttgggaggccaaagcaggaagatcgcttgagcccaggagtttgagaccatcctggacaagcttgcaggcctctgggaagcaagccatcgtgtggcagaggcccaggtggcaaggaaccaagggcggcttctggccaacagccagcgaggacctgagaccgtagcccaac

SEQ ID NO: 293318 - DNA, 1704 bp, Homo sapiens
cggggcgggcggcggctcctcggcggctccgcggcgcccgggccgcgcgccgccatgctgggcctggacgcgtgcgagctgggggcgcagctgctggagctgctccggctggcgctgtgcgcccgagtcctcctggctgacaaggagggtgggccgccggcagtggacgaggtgttggatgaggctgtgcccgagtaccgggcgccggggaggaagagcctcttggagatccggcagctggacccggacgacaggagcctggccaagtacaagcgggtgctgctggggcccctgccaccggccgtggacccaagcctgcccaatgtgcaggtgaccaggctgacactcctgtcggaacaggctccggggcccgtcgtcatggatctcacaggggacctggctgttctgaaggaccaggtgtttgtcctgaaggaaggtgttgattacagagtgaagatctccttcaaggtccacagggagattgtcagcggcctcaagtgtctgcaccacacctaccgccggggcctgcgcgtggacaagaccgtctacatggtgggcagctatggcccgagcgcccaggagtatgagtttgtgactccggtggaggaagcgccgaggggtgcgctggtgcggggcccctatctggtggtgtccctcttcaccgacgatgacaggacgcaccacctgtcctgggagtggggtctctgcatctgccaggactggaaggactgaacccccagtccgtgtctcccctacctccctcagttgttgcacagggacccccaagcatccccagcaccccccgtgagtgaccagaccctcccctgctgcccctgctgcccctgctgcccctgctctgtcccgggaccccctggcctggcgctgtcccctgagctgtcccattaaacatggccctgtctctctcggtgccctgggtgtcgtctctttctgcctcccctcccctgggggccgggggcggccgcatgggccttgtctttgctgggactgggcctgtgtgccacgtggcagctgctgcttggcttctggcccccttatctgcccccgccccacgcgccctggcagcaccatgagccgccagcttctgcctgtactgctgctgctgctgctcagggcttcgtgcccatggggtcaggaacagggagcgaggagcccctcggaggagcctccagaggaggaaatccccaaggaggatgggatcttggtgctgagccgccacaccctgggcctggccctgcgggagcaccctgccctgctggtggaattctgtgagtgctggggccagtggggctggggaccggcgggggaccggcagagcccacctgggggccccaccctttgccggcaaatgcagggcatgtgcccaagaggggcctccccgcaggcacttgcccccactgtgcccaggagctctctaggaggggcctgggggtctggttggggcaggcaggagcagtgtggtagtactgggggtacccacaggacttgagaacacctgtgcctccctgctcggccagcggccacggtgccagagtcaccaccttgccggccactcctccagctgccaggggcatcccacagactctgcagaggctcgggcagtatccaggctttgggggcccatggaggtccctgacgtgtgtgccctgtggtcttttcgcaacccttgacacacataggaactgt

SEQ ID NO: 293319 - DNA, 2218 bp, Homo sapiens
gtgggcagggactcagaaacccctgcccagggcaccagggagaggggcttcaggaggccaccagcccggggcgccatgggaggcggcgcagagcctgagcccagggatttggagacagccgcccccggcacccgagcaccatggggaggaactcctagactgtgggaaagtgttcagagaccccagtccagagcagggtggtggagggccctagagggtcagtaggcttggggggccgccgagggccctagagggtcagtaggtttgggggccgccgagggccctagagggtcagtaggtttgggggccgccgagggccgctgctctctagcaggtagcccctgaccctgggctgccctcatctgaagtcttcgctcccccgccctttggtctccgagtcagggagggggcccttgtggacatctgggccagaggagctgcaggcctggcggtctctggaggcccctcctgaaggtctgggtgcggtgcggcacctccccaggccgccctgctctctctgctcgctctctccctgagcccccagaggcttcccttgagtccctttggatagtgggaggtacagctggccagagggggctccagcctggtgctcgaatgccagggtccgctagtggctgctgctcacgcccctccccacccccagtcctcctggctgacaaggagggtgggccgccggcagtggacgaggtgttggatgaggctgtgcccgagtaccgggcgccggggaggaagagcctcttggagatccggcagctggacccggacgacaggagcctggccaagtacaagcgggtgctgctggggcccctgccaccggccgtgggtgaccaggctgacactcctgtcggaacaggctccggggcccgtcgtcatggatctcacaggggacctggctgttctgaaggaccaggtgtttgtcctgaaggaaggtgttgattacagagtgaagatctccttcaaggtccacagggagattgtcagcggcctcaagtgtctgcaccacacctaccgccggggcctgcgcgtggacaagaccgtctacatggtgggcagctatggcccgagcgcccaggagtatgagtttgtgactccggtggaggaagcgccgaggggtgcgctggtgcggggcccctatctggtggtgtccctcttcaccgacgatgacaggacgcaccacctgtcctgggagtggggtctctgcatctgccaggactggaaggactgaacccccagtccgtgtctcccctacctccctcagttgttgcacagggacccccaagcatccccagcaccccccgtgagtgaccagaccctcccctgctgcccctgctgcccctgctgcccctgctctgtcccgggaccccctggcctggcgctgtcccctgagctgtcccattaaacatggccctgtctctctcggtgccctgggtgtcgtctctttctgcctcccctcccctgggggccgggggcggccgcatgggccttgtctttgctgggactgggcctgtgtgccacgtggcagctgctgcttggcttctggcccccttatctgcccccgccccacgcgccctggcagcaccatgagccgccagcttctgcctgtactgctgctgctgctgctcagggcttcgtgcccatggggtcaggaacagggagcgaggagcccctcggaggagcctccagaggaggaaatccccaaggaggatgggatcttggtgctgagccgccacaccctgggcctggccctgcgggagcaccctgccctgctggtggaattctgtgagtgctggggccagtggggctggggaccggcgggggaccggcagagcccacctgggggccccaccctttgccggcaaatgcagggcatgtgcccaagaggggcctccccgcaggcacttgcccccactgtgcccaggagctctctaggaggggcctgggggtctggttggggcaggcaggagcagtgtggtagtactgggggtacccacaggacttgagaacacctgtgcctccctgctcggccagcggccacggtgccagagtcaccaccttgccggccactcctccagctgccaggggcatcccacagactctgcagaggctcgggcagtatccaggctttgggggcccatggaggtccctgacgtgtgtgccctgtggtcttttcgcaacccttgacacacataggaactgt

SEQ ID NO: 293320 - DNA, 1657 bp, Homo sapiens
cgcggcgccgaccccccggctggggtctggcaggggtgggggacttcatccaggctccagccctgtggggaagggaccagtcctcctggctgacaaggagggtgggccgccggcagtggacgaggtgttggatgaggctgtgcccgagtaccgggcgccggggaggaagagcctcttggagatccggcagctggacccggacgacaggagcctggccaagtacaagcgggtgctgctggggcccctgccaccggccgtggacccaagcctgcccaatgtgcaggtgaccaggctgacactcctgtcggaacaggctccggggcccgtcgtcatggatctcacaggggacctggctgttctgaaggaccaggtgtttgtcctgaaggaaggtgttgattacagagtgaagatctccttcaaggtccacagggagattgtcagcggcctcaagtgtctgcaccacacctaccgccggggcctgcgcgtggacaagaccgtctacatggtgggcagctatggcccgagcgcccaggagtatgagtttgtgactccggtggaggaagcgccgaggggtgcgctggtgcggggcccctatctggtggtgtccctcttcaccgacgatgacaggacgcaccacctgtcctgggagtggggtctctgcatctgccaggactggaaggactgaacccccagtccgtgtctcccctacctccctcagttgttgcacagggacccccaagcatccccagcaccccccgtgagtgaccagaccctcccctgctgcccctgctgcccctgctgcccctgctctgtcccgggaccccctggcctggcgctgtcccctgagctgtcccattaaacatggccctgtctctctcggtgccctgggtgtcgtctctttctgcctcccctcccctgggggccgggggcggccgcatgggccttgtctttgctgggactgggcctgtgtgccacgtggcagctgctgcttggcttctggcccccttatctgcccccgccccacgcgccctggcagcaccatgagccgccagcttctgcctgtactgctgctgctgctgctcagggcttcgtgcccatggggtcaggaacagggagcgaggagcccctcggaggagcctccagaggaggaaatccccaaggaggatgggatcttggtgctgagccgccacaccctgggcctggccctgcgggagcaccctgccctgctggtggaattctgtgagtgctggggccagtggggctggggaccggcgggggaccggcagagcccacctgggggccccaccctttgccggcaaatgcagggcatgtgcccaagaggggcctccccgcaggcacttgcccccactgtgcccaggagctctctaggaggggcctgggggtctggttggggcaggcaggagcagtgtggtagtactgggggtacccacaggacttgagaacacctgtgcctccctgctcggccagcggccacggtgccagagtcaccaccttgccggccactcctccagctgccaggggcatcccacagactctgcagaggctcgggcagtatccaggctttgggggcccatggaggtccctgacgtgtgtgccctgtggtcttttcgcaacccttgacacacataggaactgt

SEQ ID NO: 293321 - DNA, 986 bp, Homo sapiens
gaacttcttgctgacgccgccagcgccgaccaccagcagctgttttccctccatgaggcagcgcgccgaccgccgaagcatggtctccaccagcggcgccgccaccgcctcgtcggccgccggccccagccgcggcgcggcccacagcccctccagcgcgccgcacgcctccagacacaggccgccgttcagctccagggccactgggcttctccagcagcgccagcactgtgtccaccactgcacccagctctgcccgcgggtgcagacgccatgcctgccgcccccgccagcgccagccactgagcttcacagctacctgcagcaaggaggggaaaggggcctcctggacaccaccccagtgcagggctcgcggctggcaagaatgtacagctgacagagaacgagatccgcggtctgtgcctgaaatcccgggagatttttctgagaccagcccattcttctggagctggaggcacccctcaagatctgcggtgacactacacggccacgtactacgaaccttcctgccgactcattgagctatggccgcgcttccctcccgagagcaactacctctttctgggggactatgttggacaggggcaaagcagttccttggagaccatctgcctgcttgctggccctataagatcaaagtaccccggagaactctcttcctgctccgtgggaaccacgagtgtgccagaatcccgccgcgttctatgggttacgtacgcatgcagtgcaaagaagacgctaccaccattcacacctgctggcaacaacccgttcaactgacactgctttcaacttgcacttgcccaattcgcggaccattagctggacggataacgatccttcttggctgccaacggagggcctgctcccccgggaactgcagttctacatggagccaaactcagacaggacttcatgccggagcacatgacgcttcctacaccgtgcgcctgttgtgttacccg

SEQ ID NO: 293322 - DNA, 1991 bp, Homo sapiens
ggccttaccaatcgcgaaaacccgccgttcgcgctctgaccagcccgcagagccagcccccgaccccgggccacctgggcccccgggttccgccggcactctcgccaccaccgcgtgggtctgacaagatgtaccaggtcccactaccactggatcgggatgggaccctggtacggctccgcttcaccatggtggccctggtcacggtctgctgtccacttgtcgccttcctcttctgcatcctctggtccctgctcttccacttcaaggagacaacggccacacactgtggggccacgccctgcaggatgttctctgcggcctcccagcctttggaccccgatgggaccttgttccggcttcgcttcacagccatggtctggtgggccatcacttttcctgtgttcggcttcttcttctgcatcatctggtccctggtgttccactttgagtacacggtggccactgactgtggggtgcccaattacctgccctcggtgagctcagccatcggcggggaggtgccccagcgctacgtgtggcgtttctgcatcggcctgcactcggcgcctcgcttcttggtggccttcgcctactggaaccactacctcagctgcacctccccgtgttcctgctatcgcccgctctgccgcctcaacttcggcctcaatgtcgtggagaacctcgcgttgctagtgctcacttatgtctcctcctccgaggacttcaccatccacgaaaatgctttcattgtgttcattgcctcatccctcgggcacatgctcctcacctgcattctctggcggttgaccaagaagcacacagtaagtcaggaggatcgcaagtcctacagctggaaacagcggctcttcatcatcaacttcatctccttcttctcggcgctggctgtctactttcggcacaacatgtattgtgaggctggagtgtacaccatctttgccatcctggagtacactgttgtcttaaccaacatggcgttccacatgacggcctggtgggacttcgggaacaaggagctgctcataacctctcagcctgaggaaaagcgattctgaacccttcagtcctgcttgggaggacgcagcccactgcccagaaacaagaaacacgataccattctggccttccccaccccacatcctctcttggccttactgaagatgggggaagggtaagaaggaagggtgtaggccaaggctcaccccagtgctgctggcttctcctctccacccctcatatgggcgtggggtcctcaaacatcacctttacctgagaggccccaagaagctgagctggcagagagctccaccatttggtgctaaaaaaaaaaaacgtcctgaggttcatgaccaccatccagtttctggcctttacacagtcacctttcactgaggtcaggagcccctgagcagtggctgctccctgacaaccacagccatttctctgcacgggggtcattcataggactaatgtatttcatgatctactgtgcacatccaggcctgtggccacagtcccctgctaaagttgctcaggtgttctagtcctgacttcacctttttgatttggtgtgtgccctagggtatgtacccttccccatctgagcctcggtgtgtccatgtgtctggcgggggatgggtggactgtatgatttccaaggactctaccagtcagtggttctgatgtcatcgggtggaggtggtgttctatacctaaaggatgacctgctccagaaacagcaccagcacagcatgtattttcttctcttctgaaagttctggcttgtagacccctcccctcctttgcaaaggtatgggatagaggggtcagatgcagatctctactgtaaaatgggctccctggtatctcctgtcttccctactgctccaaaccctaaattttggttgtacattttatttgaaaggaaaataaattttttttttgggccaacagttgcctaggcttgctag

SEQ ID NO: 293323 - DNA, 2019 bp, Homo sapiens
aaaccgaactgaagggggaaggggcgagagggaagaggaggggcagaaggagttcggggaggcacagggtaggagcggtgagagggccgtggagtcccgcccctcgccgccgcggttggcgggagcgtgtcgtgacgtcacacagggcctctcgaagtgggcttgtgaatggctagattgggaagcaccggcggggtgtcgggaagggtggtgacgcaacatagagactccgcccccttccttggagcggcgcgactcgggctgagggagctcgggccaatcagagggacggccccagaatggcatggtagatggaacgcagctgagaggtctgacaagatgtaccaggtcccactaccactggatcgggatgggaccctggtacggctccgcttcaccatggtggccctggtcacggtctgctgtccacttgtcgccttcctcttctgcatcctctggtccctgctcttccacttcaaggagacaacggccacacactgtggggtgcccaattacctgccctcggtgagctcagccatcggcggggaggtgccccagcgctacgtgtggcgtttctgcatcggcctgcactcggcgcctcgcttcttggtggccttcgcctactggaaccactacctcagctgcacctccccgtgttcctgctatcgcccgctctgccgcctcaacttcggcctcaatgtcgtggagaacctcgcgttgctagtgctcacttatgtctcctcctccgaggacttcaccatccacgaaaatgctttcattgtgttcattgcctcatccctcgggcacatgctcctcacctgcattctctggcggttgaccaagaagcacacagtaagtcaggaggatcgcaagtcctacagctggaaacagcggctcttcatcatcaacttcatctccttcttctcggcgctggctgtctactttcggcacaacatgtattgtgaggctggagtgtacaccatctttgccatcctggagtacactgttgtcttaaccaacatggcgttccacatgacggcctggtgggacttcgggaacaaggagctgctcataacctctcagcctgaggaaaagcgattctgaacccttcagtcctgcttgggaggacgcagcccactgcccagaaacaagaaacacgataccattctggccttccccaccccacatcctctcttggccttactgaagatgggggaagggtaagaaggaagggtgtaggccaaggctcaccccagtgctgctggcttctcctctccacccctcatatgggcgtggggtcctcaaacatcacctttacctgagaggccccaagaagctgagctggcagagagctccaccatttggtgctaaaaaaaaaaaacgtcctgaggttcatgaccaccatccagtttctggcctttacacagtcacctttcactgaggtcaggagcccctgagcagtggctgctccctgacaaccacagccatttctctgcacgggggtcattcataggactaatgtatttcatgatctactgtgcacatccaggcctgtggccacagtcccctgctaaagttgctcaggtgttctagtcctgacttcacctttttgatttggtgtgtgccctagggtatgtacccttccccatctgagcctcggtgtgtccatgtgtctggcgggggatgggtggactgtatgatttccaaggactctaccagtcagtggttctgatgtcatcgggtggaggtggtgttctatacctaaaggatgacctgctccagaaacagcaccagcacagcatgtattttcttctcttctgaaagttctggcttgtagacccctcccctcctttgcaaaggtatgggatagaggggtcagatgcagatctctactgtaaaatgggctccctggtatctcctgtcttccctactgctccaaaccctaaattttggttgtacattttatttgaaaggaaaataaattttttttttgggccaacagttgcctaggcttgctag

SEQ ID NO: 293324 - DNA, 3019 bp, Homo sapiens
  misc_feature (1)..(2): n is a, c, g, or t
nngagcaaattcattcccttgctgggttgctgggctctggcactgcgctggccctcgttggaggtctgcagaagtgcacagaaagtgtgggcaatggactggccatttccacagttttggaaacttttaaaaatccatattcttgctgggattacagatgtgagccatcgtgcccagcccacccactttgttaatcatgatcagagcaggggtgccattctaccaccttggcacacctgcctagaggagtgagtggcgctgggagcagactgaggaacatcttagctgagcagtgaatccagcactgttctaaggaagctcagatggtctgtgactcatccctgtcctctggactgaatctgaggccttggaactcacccagggtcttagtggaggtacagctctgagctatgggtgtagagcatctgaacccatctacacattgaccaaacacaggcaggttccagtctgcgggggagatggagaaggtgccaccatgctgctgcacaaatcccaggatagctggggaatgagaatccagcactttgggcctaggacctggaaggagaggtcttttgggagaggtatggggacatctgaaggaggacttcttggaaggggaggggctggagcagaggcaagagtgattttgtcagatggagagaaggttctccacatgggcggggctggcagaggcagatgcccagacaggtcacaactctctgtgcccaattacctgccctcggtgagctcagccatcggcggggaggtgccccagcgctacgtgtggcgtttctgcatcggcctgcactcggcgcctcgcttcttggtggccttcgcctactggaaccactacctcagctgcacctccccgtgttcctgctatcgcccgctctgccgcctcaacttcggcctcaatgtcgtggagaacctcgcgttgctagtgctcacttatgtctcctcctccgaggacttcagtgggtgcctggatgagggaggagtggggaagtgttccctgaggggacgggcctgcccctaccacattcggaccttcctacttcgtggtgtgggcactccctgcaatgtggctcccaatcctctttccctccagccatccacgaaaatgctttcattgtgttcattgcctcatccctcgggcacatgctcctcacctgcattctctggcggttgaccaagaagcacacagtaagtcaggaggaggtacggtctatccctagcgggggctccaaggcagcccagaagaaaatcaaggacatctgtcctcaggattcgggtaatggtgaggtgggaactgagttctaatgggaaccctggcagaggggtgctggggttggggctggggcttgggaacaaactgagggtggttggtcagaatctaggactatagcactgtgtttgggtagtgtgggagactggagaatagaagagatggaggctgcaaatggggatagaatgaggagtcgcatctaggcggcagtgagttaggaacagtgtcagaggactggtctgtcataattccagcgccccacccatgtacatgggtttcttttcccccacagtatttggaggtggggttggtgggtgactccatgtaactttcatactccatccccctgaagtggaagcggcaggaataccactgctcctcggcccatcactcccccagaggcagggacgtgaacacatagtcgtcattcttgctgcccctgcctgtgctcccttccatgaccgctagtgggagccaagggagataaggcccagcccttaggagttagggctgagaggggagcccacgctctcatacccagcaagctgcagagtgatcagacagcccattccctaggatcgcaagtcctacagctggaaacagcggctcttcatcatcaacttcatctccttcttctcggcgctggctgtctactttcggcacaacatgtattgtgaggctggagtgtacaccatctttgccatcctggagtacactgttgtcttaaccaacatggcgttccacatgacggcctggtgggacttcgggaacaaggagctgctcataacctctcagcctgaggaaaagcgattctgaacccttcagtcctgcttgggaggacgcagcccactgcccagaaacaagaaacacgataccattctggccttccccaccccacatcctctcttggccttactgaagatgggggaagggtaagaaggaagggtgtaggccaaggctcaccccagtgctgctggcttctcctctccacccctcatatgggcgtggggtcctcaaacatcacctttacctgagaggccccaagaagctgagctggcagagagctccaccatttggtgctaaaaaaaaaaaacgtcctgaggttcatgaccaccatccagtttctggcctttacacagtcacctttcactgaggtcaggagcccctgagcagtggctgctccctgacaaccacagccatttctctgcacgggggtcattcataggactaatgtatttcatgatctactgtgcacatccaggcctgtggccacagtcccctgctaaagttgctcaggtgttctagtcctgacttcacctttttgatttggtgtgtgccctagggtatgtacccttccccatctgagcctcggtgtgtccatgtgtctggcgggggatgggtggactgtatgatttccaaggactctaccagtcagtggttctgatgtcatcgggtggaggtggtgttctatacctaaaggatgacctgctccagaaacagcaccagcacagcatgtattttcttctcttctgaaagttctggcttgtagacccctcccctcctttgcaaaggtatgggatagaggggtcagatgcagatctctactgtaaaatgggctccctggtatctcctgtcttccctactgctccaaaccctaaattttggttgtacattttatttgaaaggaaaataaattttttttttgggccaacagttgcctaggcttgctag

SEQ ID NO: 293325 - DNA, 2104 bp, Homo sapiens
aaaccgaactgaagggggaaggggcgagagggaagaggaggggcagaaggagttcggggaggcacagggtaggagcggtgagagggccgtggagtcccgcccctcgccgccgcggttggcgggagcgtgtcgtgacgtcacacagggcctctcgaagtgggcttgtgaatggctagattgggaagcaccggcggggtgtcgggaagggtggtgacgcaacatagagactccgcccccttccttggagcggcgcgactcgggctgagggagctcgggccaatcagagggacggccccagaatggcatggtagatggaacgcagctgagaggtctgacaagatgtaccaggtcccactaccactggatcgggatgggaccctggtacggctccgcttcaccatggtggccctggtcacggtctgctgtccacttgtcgccttcctcttctgcatcctctggtccctgctcttccacttcaaggagacaacggccacacactgtggggactgaagcttcaataggagttccaggcattaagatggatggtggagatgcacaagaacatggtcatttccttagactaccccaggtgcccaattacctgccctcggtgagctcagccatcggcggggaggtgccccagcgctacgtgtggcgtttctgcatcggcctgcactcggcgcctcgcttcttggtggccttcgcctactggaaccactacctcagctgcacctccccgtgttcctgctatcgcccgctctgccgcctcaacttcggcctcaatgtcgtggagaacctcgcgttgctagtgctcacttatgtctcctcctccgaggacttcaccatccacgaaaatgctttcattgtgttcattgcctcatccctcgggcacatgctcctcacctgcattctctggcggttgaccaagaagcacacagtaagtcaggaggatcgcaagtcctacagctggaaacagcggctcttcatcatcaacttcatctccttcttctcggcgctggctgtctactttcggcacaacatgtattgtgaggctggagtgtacaccatctttgccatcctggagtacactgttgtcttaaccaacatggcgttccacatgacggcctggtgggacttcgggaacaaggagctgctcataacctctcagcctgaggaaaagcgattctgaacccttcagtcctgcttgggaggacgcagcccactgcccagaaacaagaaacacgataccattctggccttccccaccccacatcctctcttggccttactgaagatgggggaagggtaagaaggaagggtgtaggccaaggctcaccccagtgctgctggcttctcctctccacccctcatatgggcgtggggtcctcaaacatcacctttacctgagaggccccaagaagctgagctggcagagagctccaccatttggtgctaaaaaaaaaaaacgtcctgaggttcatgaccaccatccagtttctggcctttacacagtcacctttcactgaggtcaggagcccctgagcagtggctgctccctgacaaccacagccatttctctgcacgggggtcattcataggactaatgtatttcatgatctactgtgcacatccaggcctgtggccacagtcccctgctaaagttgctcaggtgttctagtcctgacttcacctttttgatttggtgtgtgccctagggtatgtacccttccccatctgagcctcggtgtgtccatgtgtctggcgggggatgggtggactgtatgatttccaaggactctaccagtcagtggttctgatgtcatcgggtggaggtggtgttctatacctaaaggatgacctgctccagaaacagcaccagcacagcatgtattttcttctcttctgaaagttctggcttgtagacccctcccctcctttgcaaaggtatgggatagaggggtcagatgcagatctctactgtaaaatgggctccctggtatctcctgtcttccctactgctccaaaccctaaattttggttgtacattttatttgaaaggaaaataaattttttttttgggccaacagttgcctaggcttgctag

SEQ ID NO: 293326 - DNA, 1844 bp, Homo sapiens
aaaccgaactgaagggggaaggggcgagagggaagaggaggggcagaaggagttcggggaggcacagggtaggagcggtgagagggccgtggagtcccgcccctcgccgccgcggttggcgggagcgtgtcgtgacgtcacacagggcctctcgaagtgggcttgtgaatggctagattgggaagcaccggcggggtgtcgggaagggtggtgacgcaacatagagactccgcccccttccttggagcggcgcgactcgggctgagggagctcgggccaatcagagggacggccccagaatggcatggtagatggaacgcagctgagaggtgcccaattacctgccctcggtgagctcagccatcggcggggaggtgccccagcgctacgtgtggcgtttctgcatcggcctgcactcggcgcctcgcttcttggtggccttcgcctactggaaccactacctcagctgcacctccccgtgttcctgctatcgcccgctctgccgcctcaacttcggcctcaatgtcgtggagaacctcgcgttgctagtgctcacttatgtctcctcctccgaggacttcaccatccacgaaaatgctttcattgtgttcattgcctcatccctcgggcacatgctcctcacctgcattctctggcggttgaccaagaagcacacagtaagtcaggaggatcgcaagtcctacagctggaaacagcggctcttcatcatcaacttcatctccttcttctcggcgctggctgtctactttcggcacaacatgtattgtgaggctggagtgtacaccatctttgccatcctggagtacactgttgtcttaaccaacatggcgttccacatgacggcctggtgggacttcgggaacaaggagctgctcataacctctcagcctgaggaaaagcgattctgaacccttcagtcctgcttgggaggacgcagcccactgcccagaaacaagaaacacgataccattctggccttccccaccccacatcctctcttggccttactgaagatgggggaagggtaagaaggaagggtgtaggccaaggctcaccccagtgctgctggcttctcctctccacccctcatatgggcgtggggtcctcaaacatcacctttacctgagaggccccaagaagctgagctggcagagagctccaccatttggtgctaaaaaaaaaaaacgtcctgaggttcatgaccaccatccagtttctggcctttacacagtcacctttcactgaggtcaggagcccctgagcagtggctgctccctgacaaccacagccatttctctgcacgggggtcattcataggactaatgtatttcatgatctactgtgcacatccaggcctgtggccacagtcccctgctaaagttgctcaggtgttctagtcctgacttcacctttttgatttggtgtgtgccctagggtatgtacccttccccatctgagcctcggtgtgtccatgtgtctggcgggggatgggtggactgtatgatttccaaggactctaccagtcagtggttctgatgtcatcgggtggaggtggtgttctatacctaaaggatgacctgctccagaaacagcaccagcacagcatgtattttcttctcttctgaaagttctggcttgtagacccctcccctcctttgcaaaggtatgggatagaggggtcagatgcagatctctactgtaaaatgggctccctggtatctcctgtcttccctactgctccaaaccctaaattttggttgtacattttatttgaaaggaaaataaattttttttttgggccaacagttgcctaggcttgctag

SEQ ID NO: 293327 - DNA, 1751 bp, Homo sapiens
  misc_feature (1)..(1): n is a, c, g, or t
ntcggacccacgcgtccgggacggccccagaatggcatggtagatggaacgcagctgagaggtctgacaagatgtaccaggtcccactaccactggatcgggatgggaccctggtacggctccgcttcaccatggtggccctggtcacggtctgctgtccacttgtcgccttcctcttctgcatcctctggtccctgctcttccacttcaaggagacaacggccacacactgtggggtgcccaattacctgccctcggtgagctcagccatcggcggggaggtgccccagcgctacgtgtggcgtttctgcatcggcctgcactcggcgcctcgcttcttggtggccttcgcctactggaaccactacctcagctgcacctccccgtgttcctgctatcgcccgctctgccgcctcaacttcggcctcaatgtcgtggagaacctcgcgttgctagtgctcacttatgtctcctcctccgaggacttcaccatccacgaaaatgctttcattgtgttcattgcctcatccctcgggcacatgctcctcacctgcattctctggcggttgaccaagaagcacacagtaagtcaggaggatcgcaagtcctacagctggaaacagcggctcttcatcatcaacttcatctccttcttctcggcgctggctgtctactttcggcacaacatgtattgtgaggctggagtgtacaccatctttgccatcctggagtacactgttgtcttaaccaacatggcgttccacatgacggcctggtgggacttcgggaacaaggagctgctcataacctctcagcctgaggaaaagcgattctgaacccttcagtcctgcttgggaggacgcagcccactgcccagaaacaagaaacacgataccattctggccttccccaccccacatcctctcttggccttactgaagatgggggaagggtaagaaggaagggtgtaggccaaggctcaccccagtgctgctggcttctcctctccacccctcatatgggcgtggggtcctcaaacatcacctttacctgagaggccccaagaagctgagctggcagagagctccaccatttggtgctaaaaaaaaaaaacgtcctgaggttcatgaccaccatccagtttctggcctttacacagtcacctttcactgaggtcaggagcccctgagcagtggctgctccctgacaaccacagccatttctctgcacgggggtcattcataggactaatgtatttcatgatctactgtgcacatccaggcctgtggccacagtcccctgctaaagttgctcaggtgttctagtcctgacttcacctttttgatttggtgtgtgccctagggtatgtacccttccccatctgagcctcggtgtgtccatgtgtctggcgggggatgggtggactgtatgatttccaaggactctaccagtcagtggttctgatgtcatcgggtggaggtggtgttctatacctaaaggatgacctgctccagaaacagcaccagcacagcatgtattttcttctcttctgaaagttctggcttgtagacccctcccctcctttgcaaaggtatgggatagaggggtcagatgcagatctctactgtaaaatgggctccctggtatctcctgtcttccctactgctccaaaccctaaattttggttgtacattttatttgaaaggaaaataaattttttttttgggccaacagttgcctaggcttgctag

SEQ ID NO: 293328 - DNA, 1761 bp, Homo sapiens
ggccttaccaatcgcgaaaacccgccgttcgcgctctgaccagcccgcagagccagcccccgaccccgggccacctgggcccccgggttccgccggcactctcgccaccaccgcgtgggcaggttccagtctgcgggggagatggagaaggtgccaccatgctgctgcacaaatcccaggatagctggggaatgagaatccagcactttgggcctaggacctggaaggagaggtcttttgggagaggtgcccaattacctgccctcggtgagctcagccatcggcggggaggtgccccagcgctacgtgtggcgtttctgcatcggcctgcactcggcgcctcgcttcttggtggccttcgcctactggaaccactacctcagctgcacctccccgtgttcctgctatcgcccgctctgccgcctcaacttcggcctcaatgtcgtggagaacctcgcgttgctagtgctcacttatgtctcctcctccgaggacttcaccatccacgaaaatgctttcattgtgttcattgcctcatccctcgggcacatgctcctcacctgcattctctggcggttgaccaagaagcacacagtaagtcaggaggatcgcaagtcctacagctggaaacagcggctcttcatcatcaacttcatctccttcttctcggcgctggctgtctactttcggcacaacatgtattgtgaggctggagtgtacaccatctttgccatcctggagtacactgttgtcttaaccaacatggcgttccacatgacggcctggtgggacttcgggaacaaggagctgctcataacctctcagcctgaggaaaagcgattctgaacccttcagtcctgcttgggaggacgcagcccactgcccagaaacaagaaacacgataccattctggccttccccaccccacatcctctcttggccttactgaagatgggggaagggtaagaaggaagggtgtaggccaaggctcaccccagtgctgctggcttctcctctccacccctcatatgggcgtggggtcctcaaacatcacctttacctgagaggccccaagaagctgagctggcagagagctccaccatttggtgctaaaaaaaaaaaacgtcctgaggttcatgaccaccatccagtttctggcctttacacagtcacctttcactgaggtcaggagcccctgagcagtggctgctccctgacaaccacagccatttctctgcacgggggtcattcataggactaatgtatttcatgatctactgtgcacatccaggcctgtggccacagtcccctgctaaagttgctcaggtgttctagtcctgacttcacctttttgatttggtgtgtgccctagggtatgtacccttccccatctgagcctcggtgtgtccatgtgtctggcgggggatgggtggactgtatgatttccaaggactctaccagtcagtggttctgatgtcatcgggtggaggtggtgttctatacctaaaggatgacctgctccagaaacagcaccagcacagcatgtattttcttctcttctgaaagttctggcttgtagacccctcccctcctttgcaaaggtatgggatagaggggtcagatgcagatctctactgtaaaatgggctccctggtatctcctgtcttccctactgctccaaaccctaaattttggttgtacattttatttgaaaggaaaataaattttttttttgggccaacagttgcctaggcttgctag

SEQ ID NO: 293329 - DNA, 1808 bp, Homo sapiens
ggccttaccaatcgcgaaaacccgccgttcgcgctctgaccagcccgcagagccagcccccgaccccgggccacctgggcccccgggttccgccggcactctcgccaccaccgcgtgggtctgacaagatgtaccaggtcccactaccactggatcgggatgggaccctggtacggctccgcttcaccatggtggccctggtcacggtctgctgtccacttgtcgccttcctcttctgcatcctctggtccctgctcttccacttcaaggagacaacggccacacactgtggggtgcccaattacctgccctcggtgagctcagccatcggcggggaggtgccccagcgctacgtgtggcgtttctgcatcggcctgcactcggcgcctcgcttcttggtggccttcgcctactggaaccactacctcagctgcacctccccgtgttcctgctatcgcccgctctgccgcctcaacttcggcctcaatgtcgtggagaacctcgcgttgctagtgctcacttatgtctcctcctccgaggacttcaccatccacgaaaatgctttcattgtgttcattgcctcatccctcgggcacatgctcctcacctgcattctctggcggttgaccaagaagcacacagtaagtcaggaggatcgcaagtcctacagctggaaacagcggctcttcatcatcaacttcatctccttcttctcggcgctggctgtctactttcggcacaacatgtattgtgaggctggagtgtacaccatctttgccatcctggagtacactgttgtcttaaccaacatggcgttccacatgacggcctggtgggacttcgggaacaaggagctgctcataacctctcagcctgaggaaaagcgattctgaacccttcagtcctgcttgggaggacgcagcccactgcccagaaacaagaaacacgataccattctggccttccccaccccacatcctctcttggccttactgaagatgggggaagggtaagaaggaagggtgtaggccaaggctcaccccagtgctgctggcttctcctctccacccctcatatgggcgtggggtcctcaaacatcacctttacctgagaggccccaagaagctgagctggcagagagctccaccatttggtgctaaaaaaaaaaaacgtcctgaggttcatgaccaccatccagtttctggcctttacacagtcacctttcactgaggtcaggagcccctgagcagtggctgctccctgacaaccacagccatttctctgcacgggggtcattcataggactaatgtatttcatgatctactgtgcacatccaggcctgtggccacagtcccctgctaaagttgctcaggtgttctagtcctgacttcacctttttgatttggtgtgtgccctagggtatgtacccttccccatctgagcctcggtgtgtccatgtgtctggcgggggatgggtggactgtatgatttccaaggactctaccagtcagtggttctgatgtcatcgggtggaggtggtgttctatacctaaaggatgacctgctccagaaacagcaccagcacagcatgtattttcttctcttctgaaagttctggcttgtagacccctcccctcctttgcaaaggtatgggatagaggggtcagatgcagatctctactgtaaaatgggctccctggtatctcctgtcttccctactgctccaaaccctaaattttggttgtacattttatttgaaaggaaaataaattttttttttgggccaacagttgcctaggcttgctag

SEQ ID NO: 293330 - DNA, 2347 bp, Homo sapiens
aaaccgaactgaagggggaaggggcgagagggaagaggaggggcagaaggagttcggggaggcacagggtaggagcggtgagagggccgtggagtcccgcccctcgccgccgcggttggcgggagcgtgtcgtgacgtcacacagggcctctcgaagtgggcttgtgaatggctagattgggaagcaccggcggggtgtcgggaagggtggtgacgcaacatagagactccgcccccttccttggagcggcgcgactcgggctgagggagctcgggccaatcagagggacggccccagaatggcatgtaactattcgaccctttccttgccccggtccgccggcgctgctgggaaggcttcctagtctctctgcccgcacttcccgcccagaccacgtgcggagcctgagggccctcttggaaggtatggaacgcagctgagaggtctgacaagatgtaccaggtcccactaccactggatcgggatgggaccctggtacggctccgcttcaccatggtggccctggtcacggtctgctgtccacttgtcgccttcctcttctgcatcctctggtccctgctcttccacttcaaggagacaacggccacacactgtggggactgaagcttcaataggagttccaggcattaagatggatggtggagatgcacaagaacatggtcatttccttagactaccccaggcaggttccagtctgcgggggagatggagaaggtgccaccatgctgctgcacaaatcccaggatagctggggaatgagaatccagcactttgggcctaggacctggaaggagaggtcttttgggagaggtgcccaattacctgccctcggtgagctcagccatcggcggggaggtgccccagcgctacgtgtggcgtttctgcatcggcctgcactcggcgcctcgcttcttggtggccttcgcctactggaaccactacctcagctgcacctccccgtgttcctgctatcgcccgctctgccgcctcaacttcggcctcaatgtcgtggagaacctcgcgttgctagtgctcacttatgtctcctcctccgaggacttcaccatccacgaaaatgctttcattgtgttcattgcctcatccctcgggcacatgctcctcacctgcattctctggcggttgaccaagaagcacacagtaagtcaggaggatcgcaagtcctacagctggaaacagcggctcttcatcatcaacttcatctccttcttctcggcgctggctgtctactttcggcacaacatgtattgtgaggctggagtgtacaccatctttgccatcctggagtacactgttgtcttaaccaacatggcgttccacatgacggcctggtgggacttcgggaacaaggagctgctcataacctctcagcctgaggaaaagcgattctgaacccttcagtcctgcttgggaggacgcagcccactgcccagaaacaagaaacacgataccattctggccttccccaccccacatcctctcttggccttactgaagatgggggaagggtaagaaggaagggtgtaggccaaggctcaccccagtgctgctggcttctcctctccacccctcatatgggcgtggggtcctcaaacatcacctttacctgagaggccccaagaagctgagctggcagagagctccaccatttggtgctaaaaaaaaaaaacgtcctgaggttcatgaccaccatccagtttctggcctttacacagtcacctttcactgaggtcaggagcccctgagcagtggctgctccctgacaaccacagccatttctctgcacgggggtcattcataggactaatgtatttcatgatctactgtgcacatccaggcctgtggccacagtcccctgctaaagttgctcaggtgttctagtcctgacttcacctttttgatttggtgtgtgccctagggtatgtacccttccccatctgagcctcggtgtgtccatgtgtctggcgggggatgggtggactgtatgatttccaaggactctaccagtcagtggttctgatgtcatcgggtggaggtggtgttctatacctaaaggatgacctgctccagaaacagcaccagcacagcatgtattttcttctcttctgaaagttctggcttgtagacccctcccctcctttgcaaaggtatgggatagaggggtcagatgcagatctctactgtaaaatgggctccctggtatctcctgtcttccctactgctccaaaccctaaattttggttgtacattttatttgaaaggaaaataaattttttttttgggccaacagttgcctaggcttgctag

SEQ ID NO: 293331 - DNA, 2230 bp, Homo sapiens
tagcatgatacgatcgagctcgtaccccggaatatgaaaagagcctgacttcctgatgaataagcgattaaggattttaggtcggtttgacgtaagcagatagagctggttatgattatacctcatatggaaagcatgaggaatggataggctatgtagtttgttagtgggtttagaatagtagtgattcgcattatgccatagcttcctcatccttcctcagttctctttctgctacttattccctcaactctgcatcaggcagccctcatccagcatcacgtgcacaggctgtgggctccttgaagcacctctcaagccatccacgccagcgtctctctgcagcaacacagccctgggctcccaaggggtgcagactgtgttgggaagtagagaaccatcccatgctcttggataccctttctgctctggcttttccttatactctgaggagccatctctggaaaaggccccactttcccagacccaggtgtcctaccaggccccaagttgtatccctcgtgctgcttaggccacgccctgcaggatgttctctgcggcctcccagcctttggaccccgatgggaccttgttccggcttcgcttcacagccatggtctggtgggccatcacttttcctgtgttcggcttcttcttctgcatcatctggtccctggtgttccactttgagtacacggtggccactgactgtggggtgcccaattacctgccctcggtgagctcagccatcggcggggaggtgccccagcgctacgtgtggcgtttctgcatcggcctgcactcggcgcctcgcttcttggtggccttcgcctactggaaccactacctcagctgcacctccccgtgttcctgctatcgcccgctctgccgcctcaacttcggcctcaatgtcgtggagaacctcgcgttgctagtgctcacttatgtctcctcctccgaggacttcaccatccacgaaaatgctttcattgtgttcattgcctcatccctcgggcacatgctcctcacctgcattctctggcggttgaccaagaagcacacagtaagtcaggaggatcgcaagtcctacagctggaaacagcggctcttcatcatcaacttcatctccttcttctcggcgctggctgtctactttcggcacaacatgtattgtgaggctggagtgtacaccatctttgccatcctggagtacactgttgtcttaaccaacatggcgttccacatgacggcctggtgggacttcgggaacaaggagctgctcataacctctcagcctgaggaaaagcgattctgaacccttcagtcctgcttgggaggacgcagcccactgcccagaaacaagaaacacgataccattctggccttccccaccccacatcctctcttggccttactgaagatgggggaagggtaagaaggaagggtgtaggccaaggctcaccccagtgctgctggcttctcctctccacccctcatatgggcgtggggtcctcaaacatcacctttacctgagaggccccaagaagctgagctggcagagagctccaccatttggtgctaaaaaaaaaaaacgtcctgaggttcatgaccaccatccagtttctggcctttacacagtcacctttcactgaggtcaggagcccctgagcagtggctgctccctgacaaccacagccatttctctgcacgggggtcattcataggactaatgtatttcatgatctactgtgcacatccaggcctgtggccacagtcccctgctaaagttgctcaggtgttctagtcctgacttcacctttttgatttggtgtgtgccctagggtatgtacccttccccatctgagcctcggtgtgtccatgtgtctggcgggggatgggtggactgtatgatttccaaggactctaccagtcagtggttctgatgtcatcgggtggaggtggtgttctatacctaaaggatgacctgctccagaaacagcaccagcacagcatgtattttcttctcttctgaaagttctggcttgtagacccctcccctcctttgcaaaggtatgggatagaggggtcagatgcagatctctactgtaaaatgggctccctggtatctcctgtcttccctactgctccaaaccctaaattttggttgtacattttatttgaaaggaaaataaattttttttttgggccaacagttgcctaggcttgctag

SEQ ID NO: 293332 - DNA, 2099 bp, Homo sapiens
aaaccgaactgaagggggaaggggcgagagggaagaggaggggcagaaggagttcggggaggcacagggtaggagcggtgagagggccgtggagtcccgcccctcgccgccgcggttggcgggagcgtgtcgtgacgtcacacagggcctctcgaagtgggcttgtgaatggctagattgggaagcaccggcggggtgtcgggaagggtggtgacgcaacatagagactccgcccccttccttggagcggcgcgactcgggctgagggagctcgggccaatcagagggacggccccagaatggcatggtagatggaacgcagctgagaggtctgacaagatgtaccaggtcccactaccactggatcgggatgggaccctggtacggctccgcttcaccatggtggccctggtcacggtctgctgtccacttgtcgccttcctcttctgcatcctctggtccctgctcttccacttcaaggagacaacggccacacactgtggggtgcccaattacctgccctcggtgagctcagccatcggcggggaggtgccccagcgctacgtgtggcgtttctgcatcggcctgcactcggcgcctcgcttcttggtggccttcgcctactggaaccactacctcagctgcacctccccgtgttcctgctatcgcccgctctgccgcctcaacttcggcctcaatgtcgtggagaacctcgcgttgctagtgctcacttatgtctcctcctccgaggacttcaccatccacgaaaatgctttcattgtgttcattgcctcatccctcgggcacatgctcctcacctgcattctctggcggttgaccaagaagcacacagtaagtcaggaggaggtacggtctatccctagcgggggctccaaggcagcccagaagaaaatcaaggacatctgtcctcaggattcgggtaagatcgcaagtcctacagctggaaacagcggctcttcatcatcaacttcatctccttcttctcggcgctggctgtctactttcggcacaacatgtattgtgaggctggagtgtacaccatctttgccatcctggagtacactgttgtcttaaccaacatggcgttccacatgacggcctggtgggacttcgggaacaaggagctgctcataacctctcagcctgaggaaaagcgattctgaacccttcagtcctgcttgggaggacgcagcccactgcccagaaacaagaaacacgataccattctggccttccccaccccacatcctctcttggccttactgaagatgggggaagggtaagaaggaagggtgtaggccaaggctcaccccagtgctgctggcttctcctctccacccctcatatgggcgtggggtcctcaaacatcacctttacctgagaggccccaagaagctgagctggcagagagctccaccatttggtgctaaaaaaaaaaaacgtcctgaggttcatgaccaccatccagtttctggcctttacacagtcacctttcactgaggtcaggagcccctgagcagtggctgctccctgacaaccacagccatttctctgcacgggggtcattcataggactaatgtatttcatgatctactgtgcacatccaggcctgtggccacagtcccctgctaaagttgctcaggtgttctagtcctgacttcacctttttgatttggtgtgtgccctagggtatgtacccttccccatctgagcctcggtgtgtccatgtgtctggcgggggatgggtggactgtatgatttccaaggactctaccagtcagtggttctgatgtcatcgggtggaggtggtgttctatacctaaaggatgacctgctccagaaacagcaccagcacagcatgtattttcttctcttctgaaagttctggcttgtagacccctcccctcctttgcaaaggtatgggatagaggggtcagatgcagatctctactgtaaaatgggctccctggtatctcctgtcttccctactgctccaaaccctaaattttggttgtacattttatttgaaaggaaaataaattttttttttgggccaacagttgcctaggcttgctag

SEQ ID NO: 293333 - DNA, 1766 bp, Homo sapiens
aaaccgaactgaagggggaaggggcgagagggaagaggaggggcagaaggagttcggggaggcacagggtaggagcggtgagagggccgtggagtcccgcccctcgccgccgcggttggcgggagcgtgtcgtgacgtcacacagggcctctcgaagtgggcttgtgaatggctagattgggaagcaccggcggggtgtcgggaagggtggtgacgcaacatagagactccgcccccttccttggagcggcgcgactcgggctgagggagctcgggccaatcagagggacggccccagaatggcatggtagatggaacgcagctgagaggtctgacaagatgtaccaggtcccactaccactggatcgggatgggaccctggtacggctccgcttcaccatggtggccctggtcacggtctgctgtccacttgtcgccttcctcttctgcatcctctggtccctgctcttccacttcaaggagacaacggccacacactgtgggccatccacgaaaatgctttcattgtgttcattgcctcatccctcgggcacatgctcctcacctgcattctctggcggttgaccaagaagcacacagtaagtcaggaggatcgcaagtcctacagctggaaacagcggctcttcatcatcaacttcatctccttcttctcggcgctggctgtctactttcggcacaacatgtattgtgaggctggagtgtacaccatctttgccatcctggagtacactgttgtcttaaccaacatggcgttccacatgacggcctggtgggacttcgggaacaaggagctgctcataacctctcagcctgaggaaaagcgattctgaacccttcagtcctgcttgggaggacgcagcccactgcccagaaacaagaaacacgataccattctggccttccccaccccacatcctctcttggccttactgaagatgggggaagggtaagaaggaagggtgtaggccaaggctcaccccagtgctgctggcttctcctctccacccctcatatgggcgtggggtcctcaaacatcacctttacctgagaggccccaagaagctgagctggcagagagctccaccatttggtgctaaaaaaaaaaaacgtcctgaggttcatgaccaccatccagtttctggcctttacacagtcacctttcactgaggtcaggagcccctgagcagtggctgctccctgacaaccacagccatttctctgcacgggggtcattcataggactaatgtatttcatgatctactgtgcacatccaggcctgtggccacagtcccctgctaaagttgctcaggtgttctagtcctgacttcacctttttgatttggtgtgtgccctagggtatgtacccttccccatctgagcctcggtgtgtccatgtgtctggcgggggatgggtggactgtatgatttccaaggactctaccagtcagtggttctgatgtcatcgggtggaggtggtgttctatacctaaaggatgacctgctccagaaacagcaccagcacagcatgtattttcttctcttctgaaagttctggcttgtagacccctcccctcctttgcaaaggtatgggatagaggggtcagatgcagatctctactgtaaaatgggctccctggtatctcctgtcttccctactgctccaaaccctaaattttggttgtacattttatttgaaaggaaaataaattttttttttgggccaacagttgcctaggcttgctag

SEQ ID NO: 293334 - DNA, 2070 bp, Homo sapiens
ggccttaccaatcgcgaaaacccgccgttcgcgctctgaccagcccgcagagccagcccccgaccccgggccacctgggcccccgggttccgccggcactctcgccaccaccgcgtgggtctgacaagatgtaccaggtcccactaccactggatcgggatgggaccctggtacggctccgcttcaccatggtggccctggtcacggtctgctgtccacttgtcgccttcctcttctgcatcctctggtccctgctcttccacttcaaggagacaacggccacacactgtggggcaggttccagtctgcgggggagatggagaaggtgccaccatgctgctgcacaaatcccaggatagctggggaatgagaatccagcactttgggcctaggacctggaaggagaggtcttttgggagaggtgcccaattacctgccctcggtgagctcagccatcggcggggaggtgccccagcgctacgtgtggcgtttctgcatcggcctgcactcggcgcctcgcttcttggtggccttcgcctactggaaccactacctcagctgcacctccccgtgttcctgctatcgcccgctctgccgcctcaacttcggcctcaatgtcgtggagaacctcgcgttgctagtgctcacttatgtctcctcctccgaggacttcagtgggtgcctggatgagggaggagtggggaagtgttccctgaggggacgggcctgcccctaccacattcggaccttcctacttcgtggtgtgggcactccctgcaatgtggctcccaatcctctttccctccagccatccacgaaaatgctttcattgtgttcattgcctcatccctcgggcacatgctcctcacctgcattctctggcggttgaccaagaagcacacagtaagtcaggaggatcgcaagtcctacagctggaaacagcggctcttcatcatcaacttcatctccttcttctcggcgctggctgtctactttcggcacaacatgtattgtgaggctggagtgtacaccatctttgccatcctggagtacactgttgtcttaaccaacatggcgttccacatgacggcctggtgggacttcgggaacaaggagctgctcataacctctcagcctgaggaaaagcgattctgaacccttcagtcctgcttgggaggacgcagcccactgcccagaaacaagaaacacgataccattctggccttccccaccccacatcctctcttggccttactgaagatgggggaagggtaagaaggaagggtgtaggccaaggctcaccccagtgctgctggcttctcctctccacccctcatatgggcgtggggtcctcaaacatcacctttacctgagaggccccaagaagctgagctggcagagagctccaccatttggtgctaaaaaaaaaaaacgtcctgaggttcatgaccaccatccagtttctggcctttacacagtcacctttcactgaggtcaggagcccctgagcagtggctgctccctgacaaccacagccatttctctgcacgggggtcattcataggactaatgtatttcatgatctactgtgcacatccaggcctgtggccacagtcccctgctaaagttgctcaggtgttctagtcctgacttcacctttttgatttggtgtgtgccctagggtatgtacccttccccatctgagcctcggtgtgtccatgtgtctggcgggggatgggtggactgtatgatttccaaggactctaccagtcagtggttctgatgtcatcgggtggaggtggtgttctatacctaaaggatgacctgctccagaaacagcaccagcacagcatgtattttcttctcttctgaaagttctggcttgtagacccctcccctcctttgcaaaggtatgggatagaggggtcagatgcagatctctactgtaaaatgggctccctggtatctcctgtcttccctactgctccaaaccctaaattttggttgtacattttatttgaaaggaaaataaattttttttttgggccaacagttgcctaggcttgctag

SEQ ID NO: 293335 - DNA, 1323 bp, Homo sapiens
  misc_feature (1)..(1): n is a, c, g, or t
ntcggacccacgcgtccgggacggccccagaatggcatggtagatggaacgcagctgagagccatccacgaaaatgctttcattgtgttcattgcctcatccctcgggcacatgctcctcacctgcattctctggcggttgaccaagaagcacacagtaagtcaggaggatcgcaagtcctacagctggaaacagcggctcttcatcatcaacttcatctccttcttctcggcgctggctgtctactttcggcacaacatgtattgtgaggctggagtgtacaccatctttgccatcctggagtacactgttgtcttaaccaacatggcgttccacatgacggcctggtgggacttcgggaacaaggagctgctcataacctctcagcctgaggaaaagcgattctgaacccttcagtcctgcttgggaggacgcagcccactgcccagaaacaagaaacacgataccattctggccttccccaccccacatcctctcttggccttactgaagatgggggaagggtaagaaggaagggtgtaggccaaggctcaccccagtgctgctggcttctcctctccacccctcatatgggcgtggggtcctcaaacatcacctttacctgagaggccccaagaagctgagctggcagagagctccaccatttggtgctaaaaaaaaaaaacgtcctgaggttcatgaccaccatccagtttctggcctttacacagtcacctttcactgaggtcaggagcccctgagcagtggctgctccctgacaaccacagccatttctctgcacgggggtcattcataggactaatgtatttcatgatctactgtgcacatccaggcctgtggccacagtcccctgctaaagttgctcaggtgttctagtcctgacttcacctttttgatttggtgtgtgccctagggtatgtacccttccccatctgagcctcggtgtgtccatgtgtctggcgggggatgggtggactgtatgatttccaaggactctaccagtcagtggttctgatgtcatcgggtggaggtggtgttctatacctaaaggatgacctgctccagaaacagcaccagcacagcatgtattttcttctcttctgaaagttctggcttgtagacccctcccctcctttgcaaaggtatgggatagaggggtcagatgcagatctctactgtaaaatgggctccctggtatctcctgtcttccctactgctccaaaccctaaattttggttgtacattttatttgaaaggaaaataaattttttttttgggccaacagttgcctaggcttgctag

SEQ ID NO: 293336 - DNA, 2408 bp, Homo sapiens
aaaccgaactgaagggggaaggggcgagagggaagaggaggggcagaaggagttcggggaggcacagggtaggagcggtgagagggccgtggagtcccgcccctcgccgccgcggttggcgggagcgtgtcgtgacgtcacacagggcctctcgaagtgggcttgtgaatggctagattgggaagcaccggcggggtgtcgggaagggtggtgacgcaacatagagactccgcccccttccttggagcggcgcgactcgggctgagggagctcgggccaatcagagggacggccccagaatggcatgatggaacgcagctgagaggtctgacaagatgtaccaggtcccactaccactggatcgggatgggaccctggtacggctccgcttcaccatggtggccctggtcacggtctgctgtccacttgtcgccttcctcttctgcatcctctggtccctgctcttccacttcaaggagacaacggccacacactgtgggccatccacgaaaatgctttcattgtgttcattgcctcatccctcgggcacatgctcctcacctgcattctctggcggttgaccaagaagcacacagtaagtcaggaggaggtacggtctatccctagcgggggctccaaggcagcccagaagaaaatcaaggacatctgtcctcaggattcgggtaatggtgaggtgggaactgagttctaatgggaaccctggcagaggggtgctggggttggggctggggcttgggaacaaactgagggtggttggtcagaatctaggactatagcactgtgtttgggtagtgtgggagactggagaatagaagagatggaggctgcaaatggggatagaatgaggagtcgcatctaggcggcagtgagttaggaacagtgtcagaggactggtctgtcataattccagcgccccacccatgtacatgggtttcttttcccccacagtatttggaggtggggttggtgggtgactccatgtaactttcatactccatccccctgaagtggaagcggcaggaataccactgctcctcggcccatcactcccccagaggcagggacgtgaacacatagtcgtcattcttgctgcccctgcctgtgctcccttccatgaccgctagtgggagccaagggagataaggcccagcccttaggagttagggctgagaggggagcccacgctctcatacccagcaagctgcagagtgatcagacagcccattccctaggatcgcaagtcctacagctggaaacagcggctcttcatcatcaacttcatctccttcttctcggcgctggctgtctactttcggcacaacatgtattgtgaggctggagtgtacaccatctttgccatcctggagtacactgttgtcttaaccaacatggcgttccacatgacggcctggtgggacttcgggaacaaggagctgctcataacctctcagcctgaggaaaagcgattctgaacccttcagtcctgcttgggaggacgcagcccactgcccagaaacaagaaacacgataccattctggccttccccaccccacatcctctcttggccttactgaagatgggggaagggtaagaaggaagggtgtaggccaaggctcaccccagtgctgctggcttctcctctccacccctcatatgggcgtggggtcctcaaacatcacctttacctgagaggccccaagaagctgagctggcagagagctccaccatttggtgctaaaaaaaaaaaacgtcctgaggttcatgaccaccatccagtttctggcctttacacagtcacctttcactgaggtcaggagcccctgagcagtggctgctccctgacaaccacagccatttctctgcacgggggtcattcataggactaatgtatttcatgatctactgtgcacatccaggcctgtggccacagtcccctgctaaagttgctcaggtgttctagtcctgacttcacctttttgatttggtgtgtgccctagggtatgtacccttccccatctgagcctcggtgtgtccatgtgtctggcgggggatgggtggactgtatgatttccaaggactctaccagtcagtggttctgatgtcatcgggtggaggtggtgttctatacctaaaggatgacctgctccagaaacagcaccagcacagcatgtattttcttctcttctgaaagttctggcttgtagacccctcccctcctttgcaaaggtatgggatagaggggtcagatgcagatctctactgtaaaatgggctccctggtatctcctgtcttccctactgctccaaaccctaaattttggttgtacattttatttgaaaggaaaataaattttttttttgggccaacagttgcctaggcttgctag

SEQ ID NO: 293337 - DNA, 2661 bp, Homo sapiens
aaaccgaactgaagggggaaggggcgagagggaagaggaggggcagaaggagttcggggaggcacagggtaggagcggtgagagggccgtggagtcccgcccctcgccgccgcggttggcgggagcgtgtcgtgacgtcacacagggcctctcgaagtgggcttgtgaatggctagattgggaagcaccggcggggtgtcgggaagggtggtgacgcaacatagagactccgcccccttccttggagcggcgcgactcgggctgagggagctcgggccaatcagagggacggccccagaatggcatgatggaacgcagctgagaggtctgacaagatgtaccaggtcccactaccactggatcgggatgggaccctggtacggctccgcttcaccatggtggccctggtcacggtctgctgtccacttgtcgccttcctcttctgcatcctctggtccctgctcttccacttcaaggagacaacggccacacactgtggggtgcccaattacctgccctcggtgagctcagccatcggcggggaggtgccccagcgctacgtgtggcgtttctgcatcggcctgcactcggcgcctcgcttcttggtggccttcgcctactggaaccactacctcagctgcacctccccgtgttcctgctatcgcccgctctgccgcctcaacttcggcctcaatgtcgtggagaacctcgcgttgctagtgctcacttatgtctcctcctccgaggacttcaccatccacgaaaatgctttcattgtgttcattgcctcatccctcgggcacatgctcctcacctgcattctctggcggttgaccaagaagcacacagtaagtcaggaggaggtacggtctatccctagcgggggctccaaggcagcccagaagaaaatcaaggacatctgtcctcaggattcgggtaatggtgaggtgggaactgagttctaatgggaaccctggcagaggggtgctggggttggggctggggcttgggaacaaactgagggtggttggtcagaatctaggactatagcactgtgtttgggtagtgtgggagactggagaatagaagagatggaggctgcaaatggggatagaatgaggagtcgcatctaggcggcagtgagttaggaacagtgtcagaggactggtctgtcataattccagcgccccacccatgtacatgggtttcttttcccccacagtatttggaggtggggttggtgggtgactccatgtaactttcatactccatccccctgaagtggaagcggcaggaataccactgctcctcggcccatcactcccccagaggcagggacgtgaacacatagtcgtcattcttgctgcccctgcctgtgctcccttccatgaccgctagtgggagccaagggagataaggcccagcccttaggagttagggctgagaggggagcccacgctctcatacccagcaagctgcagagtgatcagacagcccattccctaggatcgcaagtcctacagctggaaacagcggctcttcatcatcaacttcatctccttcttctcggcgctggctgtctactttcggcacaacatgtattgtgaggctggagtgtacaccatctttgccatcctggagtacactgttgtcttaaccaacatggcgttccacatgacggcctggtgggacttcgggaacaaggagctgctcataacctctcagcctgaggaaaagcgattctgaacccttcagtcctgcttgggaggacgcagcccactgcccagaaacaagaaacacgataccattctggccttccccaccccacatcctctcttggccttactgaagatgggggaagggtaagaaggaagggtgtaggccaaggctcaccccagtgctgctggcttctcctctccacccctcatatgggcgtggggtcctcaaacatcacctttacctgagaggccccaagaagctgagctggcagagagctccaccatttggtgctaaaaaaaaaaaacgtcctgaggttcatgaccaccatccagtttctggcctttacacagtcacctttcactgaggtcaggagcccctgagcagtggctgctccctgacaaccacagccatttctctgcacgggggtcattcataggactaatgtatttcatgatctactgtgcacatccaggcctgtggccacagtcccctgctaaagttgctcaggtgttctagtcctgacttcacctttttgatttggtgtgtgccctagggtatgtacccttccccatctgagcctcggtgtgtccatgtgtctggcgggggatgggtggactgtatgatttccaaggactctaccagtcagtggttctgatgtcatcgggtggaggtggtgttctatacctaaaggatgacctgctccagaaacagcaccagcacagcatgtattttcttctcttctgaaagttctggcttgtagacccctcccctcctttgcaaaggtatgggatagaggggtcagatgcagatctctactgtaaaatgggctccctggtatctcctgtcttccctactgctccaaaccctaaattttggttgtacattttatttgaaaggaaaataaattttttttttgggccaacagttgcctaggcttgctag

SEQ ID NO: 293338 - DNA, 2279 bp, Homo sapiens
ggccttaccaatcgcgaaaacccgccgttcgcgctctgaccagcccgcagagccagcccccgaccccgggccacctgggcccccgggttccgccggcactctcgccaccaccgcgtgggtgcccaattacctgccctcggtgagctcagccatcggcggggaggtgccccagcgctacgtgtggcgtttctgcatcggcctgcactcggcgcctcgcttcttggtggccttcgcctactggaaccactacctcagctgcacctccccgtgttcctgctatcgcccgctctgccgcctcaacttcggcctcaatgtcgtggagaacctcgcgttgctagtgctcacttatgtctcctcctccgaggacttcaccatccacgaaaatgctttcattgtgttcattgcctcatccctcgggcacatgctcctcacctgcattctctggcggttgaccaagaagcacacagtaagtcaggaggaggtacggtctatccctagcgggggctccaaggcagcccagaagaaaatcaaggacatctgtcctcaggattcgggtaatggtgaggtgggaactgagttctaatgggaaccctggcagaggggtgctggggttggggctggggcttgggaacaaactgagggtggttggtcagaatctaggactatagcactgtgtttgggtagtgtgggagactggagaatagaagagatggaggctgcaaatggggatagaatgaggagtcgcatctaggcggcagtgagttaggaacagtgtcagaggactggtctgtcataattccagcgccccacccatgtacatgggtttcttttcccccacagtatttggaggtggggttggtgggtgactccatgtaactttcatactccatccccctgaagtggaagcggcaggaataccactgctcctcggcccatcactcccccagaggcagggacgtgaacacatagtcgtcattcttgctgcccctgcctgtgctcccttccatgaccgctagtgggagccaagggagataaggcccagcccttaggagttagggctgagaggggagcccacgctctcatacccagcaagctgcagagtgatcagacagcccattccctaggatcgcaagtcctacagctggaaacagcggctcttcatcatcaacttcatctccttcttctcggcgctggctgtctactttcggcacaacatgtattgtgaggctggagtgtacaccatctttgccatcctggagtacactgttgtcttaaccaacatggcgttccacatgacggcctggtgggacttcgggaacaaggagctgctcataacctctcagcctgaggaaaagcgattctgaacccttcagtcctgcttgggaggacgcagcccactgcccagaaacaagaaacacgataccattctggccttccccaccccacatcctctcttggccttactgaagatgggggaagggtaagaaggaagggtgtaggccaaggctcaccccagtgctgctggcttctcctctccacccctcatatgggcgtggggtcctcaaacatcacctttacctgagaggccccaagaagctgagctggcagagagctccaccatttggtgctaaaaaaaaaaaacgtcctgaggttcatgaccaccatccagtttctggcctttacacagtcacctttcactgaggtcaggagcccctgagcagtggctgctccctgacaaccacagccatttctctgcacgggggtcattcataggactaatgtatttcatgatctactgtgcacatccaggcctgtggccacagtcccctgctaaagttgctcaggtgttctagtcctgacttcacctttttgatttggtgtgtgccctagggtatgtacccttccccatctgagcctcggtgtgtccatgtgtctggcgggggatgggtggactgtatgatttccaaggactctaccagtcagtggttctgatgtcatcgggtggaggtggtgttctatacctaaaggatgacctgctccagaaacagcaccagcacagcatgtattttcttctcttctgaaagttctggcttgtagacccctcccctcctttgcaaaggtatgggatagaggggtcagatgcagatctctactgtaaaatgggctccctggtatctcctgtcttccctactgctccaaaccctaaattttggttgtacattttatttgaaaggaaaataaattttttttttgggccaacagttgcctaggcttgctag

SEQ ID NO: 293339 - DNA, 1902 bp, Homo sapiens
aaaccgaactgaagggggaaggggcgagagggaagaggaggggcagaaggagttcggggaggcacagggtaggagcggtgagagggccgtggagtcccgcccctcgccgccgcggttggcgggagcgtgtcgtgacgtcacacagggcctctcgaagtgggcttgtgaatggctagattgggaagcaccggcggggtgtcgggaagggtggtgacgcaacatagagactccgcccccttccttggagcggcgcgactcgggctgagggagctcgggccaatcagagggacggccccagaatggcatggtgcccaattacctgccctcggtgagctcagccatcggcggggaggtgccccagcgctacgtgtggcgtttctgcatcggcctgcactcggcgcctcgcttcttggtggccttcgcctactggaaccactacctcagctgcacctccccgtgttcctgctatcgcccgctctgccgcctcaacttcggcctcaatgtcgtggagaacctcgcgttgctagtgctcacttatgtctcctcctccgaggacttcaccatccacgaaaatgctttcattgtgttcattgcctcatccctcgggcacatgctcctcacctgcattctctggcggttgaccaagaagcacacagtaagtcaggaggaggtacggtctatccctagcgggggctccaaggcagcccagaagaaaatcaaggacatctgtcctcaggattcgggtaagatcgcaagtcctacagctggaaacagcggctcttcatcatcaacttcatctccttcttctcggcgctggctgtctactttcggcacaacatgtattgtgaggctggagtgtacaccatctttgccatcctggagtacactgttgtcttaaccaacatggcgttccacatgacggcctggtgggacttcgggaacaaggagctgctcataacctctcagcctgaggaaaagcgattctgaacccttcagtcctgcttgggaggacgcagcccactgcccagaaacaagaaacacgataccattctggccttccccaccccacatcctctcttggccttactgaagatgggggaagggtaagaaggaagggtgtaggccaaggctcaccccagtgctgctggcttctcctctccacccctcatatgggcgtggggtcctcaaacatcacctttacctgagaggccccaagaagctgagctggcagagagctccaccatttggtgctaaaaaaaaaaaacgtcctgaggttcatgaccaccatccagtttctggcctttacacagtcacctttcactgaggtcaggagcccctgagcagtggctgctccctgacaaccacagccatttctctgcacgggggtcattcataggactaatgtatttcatgatctactgtgcacatccaggcctgtggccacagtcccctgctaaagttgctcaggtgttctagtcctgacttcacctttttgatttggtgtgtgccctagggtatgtacccttccccatctgagcctcggtgtgtccatgtgtctggcgggggatgggtggactgtatgatttccaaggactctaccagtcagtggttctgatgtcatcgggtggaggtggtgttctatacctaaaggatgacctgctccagaaacagcaccagcacagcatgtattttcttctcttctgaaagttctggcttgtagacccctcccctcctttgcaaaggtatgggatagaggggtcagatgcagatctctactgtaaaatgggctccctggtatctcctgtcttccctactgctccaaaccctaaattttggttgtacattttatttgaaaggaaaataaattttttttttgggccaacagttgcctaggcttgctag

SEQ ID NO: 293340 - DNA, 1367 bp, Homo sapiens
cacgaggatggaacgcagctgagagccatccacgaaaatgctttcattgtgttcattgcctcatccctcgggcacatgctcctcacctgcattctctggcggttgaccaagaagcacacagtaagtcaggaggaggtacggtctatccctagcgggggctccaaggcagcccagaagaaaatcaaggacatctgtcctcaggattcgggtaagatcgcaagtcctacagctggaaacagcggctcttcatcatcaacttcatctccttcttctcggcgctggctgtctactttcggcacaacatgtattgtgaggctggagtgtacaccatctttgccatcctggagtacactgttgtcttaaccaacatggcgttccacatgacggcctggtgggacttcgggaacaaggagctgctcataacctctcagcctgaggaaaagcgattctgaacccttcagtcctgcttgggaggacgcagcccactgcccagaaacaagaaacacgataccattctggccttccccaccccacatcctctcttggccttactgaagatgggggaagggtaagaaggaagggtgtaggccaaggctcaccccagtgctgctggcttctcctctccacccctcatatgggcgtggggtcctcaaacatcacctttacctgagaggccccaagaagctgagctggcagagagctccaccatttggtgctaaaaaaaaaaaacgtcctgaggttcatgaccaccatccagtttctggcctttacacagtcacctttcactgaggtcaggagcccctgagcagtggctgctccctgacaaccacagccatttctctgcacgggggtcattcataggactaatgtatttcatgatctactgtgcacatccaggcctgtggccacagtcccctgctaaagttgctcaggtgttctagtcctgacttcacctttttgatttggtgtgtgccctagggtatgtacccttccccatctgagcctcggtgtgtccatgtgtctggcgggggatgggtggactgtatgatttccaaggactctaccagtcagtggttctgatgtcatcgggtggaggtggtgttctatacctaaaggatgacctgctccagaaacagcaccagcacagcatgtattttcttctcttctgaaagttctggcttgtagacccctcccctcctttgcaaaggtatgggatagaggggtcagatgcagatctctactgtaaaatgggctccctggtatctcctgtcttccctactgctccaaaccctaaattttggttgtacattttatttgaaaggaaaataaattttttttttgggccaacagttgcctaggcttgctag

SEQ ID NO: 293341 - DNA, 1982 bp, Homo sapiens
aaaccgaactgaagggggaaggggcgagagggaagaggaggggcagaaggagttcggggaggcacagggtaggagcggtgagagggccgtggagtcccgcccctcgccgccgcggttggcgggagcgtgtcgtgacgtcacacagggcctctcgaagtgggcttgtgaatggctagattgggaagcaccggcggggtgtcgggaagggtggtgacgcaacatagagactccgcccccttccttggagcggcgcgactcgggctgagggagctcgggccaatcagagggacggccccagaatggcatggtagatggaacgcagctgagaggtctgacaagatgtaccaggtcccactaccactggatcgggatgggaccctggtacggctccgcttcaccatggtggccctggtcacggtctgctgtccacttgtcgccttcctcttctgcatcctctggtccctgctcttccacttcaaggagacaacggccacacactgtggggtgcccaattacctgccctcggtgagctcagccatcggcggggaggtgccccagcgctacgtgtggcgtttctgcatcggcctgcactcggcgcctcgcttcttggtggccttcgcctactggaaccactacctcagctgcacctccccgtgttcctgctatcgcccgctctgccgcctcaacttcggcctcaatgtcgtggagaacctcgcgttgctagtgctcacttatgtctcctcctccgaggacttcaccatccacgaaaatgctttcattgtgttcattgcctcatccctcgggcacatgctcctcacctgcattctctggcggttgaccaagaagcacacagtaagtcaggaggatcgcaagtcctacagctggaaacagcggctcttcatcatcaacttcatctccttcttctcggcgctggctgtctactttcggcacaacatgtattgtgaggctggagtgtacaccatctttgccatcctggagtacactgttgtcttaaccaacatggcgttccacatgacggcctggtgggacttcgggaacaaggagctgctcataacctctcagcctgaggaaaagcgattctgaacccttcagtcctgcttgggaggacgcagcccactgcccagaaacaagaaacacgataccattctggccttccccaccccacatcctctcttggccttactgaagatgggggaagggtaagaaggaagggtgtaggccaaggctcaccccagtgctgctggcttctcctctccacccctcatatgggcgtggggtcctcaaacatcacctttacctgagaggccccaagaagctgagctggcagagagctccaccatttggtgctaaaaaaaaaaaacgtcctgaggttcatgaccaccatccagtttctggcctttacacagtcacctttcactgaggtcaggagcccctgagcagtggctgctccctgacaaccacagccatttctctgcacgggggtcattcataggactaatgtatttcatgatctactgtgcacatccaggcctgtggccacagtcccctgctaaagttgctcaggtgttctagtcctgacttcacctttttgatttggtgtgtgccctagggtatgtacccttccccatctgagcctcggtgtgtccatgtgtctggcgggggatgggtggactgtatgatttccaaggactctaccagtcagtggttctgatgtcatcgggtggaggtggtgttctatacctaaaggatgacctgctccagaaacagcaccagcacagcatgtattttcttctcttctgaaagttctggcttgtagacccctcccctcctttgcaaaggtatgggatagaggggtcagatgcagatctctacttgctccaaaccctaaattttggttgtacattttatttgaaaggaaaataaattttttttttgggccaacagttgcctaggcttgctag

SEQ ID NO: 293342 - DNA, 1673 bp, Homo sapiens
  misc_feature (1414)..(1414): n is a, c, g, or t
  misc_feature (1416)..(1416): n is a, c, g, or t
  misc_feature (1425)..(1426): n is a, c, g, or t
  misc_feature (1440)..(1441): n is a, c, g, or t
  misc_feature (1466)..(1466): n is a, c, g, or t
  misc_feature (1471)..(1471): n is a, c, g, or t
  misc_feature (1529)..(1529): n is a, c, g, or t
  misc_feature (1574)..(1574): n is a, c, g, or t
aaaccgaactgaagggggaaggggcgagagggaagaggaggggcagaaggagttcggggaggcacagggtaggagcggtgagagggccgtggagtcccgcccctcgccgccgcggttggcgggagcgtgtcgtgacgtcacacagggcctctcgaagtgggcttgtgaatggctagattgggaagcaccggcggggtgtcgggaagggtggtgacgcaacatagagactccgcccccttccttggagcggcgcgactcgggctgagggagctcgggccaatcagagggacggccccagaatggcatggtagatggaacgcagctgagaggtctgacaagatgtaccaggtcccactaccactggatcgggatgggaccctggtacggctccgcttcaccatggtggccctggtcacggtctgctgtccacttgtcgccttcctcttctgcatcctctggtccctgctcttccacttcaaggagacaacggccacacactgtggggtgcccaattacctgccctcggtgagctcagccatcggcggggaggtgccccagcgctacgtgtggcgtttctgcatcggcctgcactcggcgcctcgcttcttggtggccttcgcctactggaaccactacctcagctgcacctccccgtgttcctgctatcgcccgctctgccgcctcaacttcggcctcaatgtcgtggagaacctcgcgttgctagtgctcacttatgtctcctcctccgaggacttcaccatccacgaaaatgctttcattgtgttcattgcctcatccctcgggcacatgctcctcacctgcattctctggcggttgaccaagaagcacacagtaagtcaggaggatcgcaagtcctacagctggaaacagcggctcttcatcatcaacttcatctccttcttctcggcgctggctgtctactttcggcacaacatgtattgtgaggctggagtgtacaccatctttgccatcctggagtacactgttgtcttaaccaacatggcgttccacatgacggcctggtgggacttcgggaacaaggagctgctcataacctctcagcctgaggaaaagcgattctgaacccttcagtcctgcttgggaggacgcagcccactgcccagaaacaagaaacacgataccattctggccttccccaccccacatcctctcttggccttactgaagatgggggaagggtaagaaggaagggtgtaggccaaggctcaccccagtgctgctggcttctcctctccacccctcatatgggcgtggggtcctcaaacatcacctttacctgagaggccccaagaagctgagctggcagagagctccaccatttggtgctaaaaaaaaaaaaaaatgaggggtgggggcaactcaccactgccangnaactccctnnagggtgggagtggnntatcttctaggctcttacccgcggnagggnagggcattaacaattgcttcctttcattctcctttcccccaatccaattaagtgctgncacagggcagaagcacacaaaccaaccacacaagtttttgacttnctctcagcacctttgagttggttaaatggggctcacggggcaagaagttttgctggccttccccagcgtggtcacaaggttaattggactgccttgcct

SEQ ID NO: 293343 - DNA, 1591 bp, Homo sapiens
  misc_feature (1414)..(1414): n is a, c, g, or t
  misc_feature (1416)..(1416): n is a, c, g, or t
  misc_feature (1425)..(1426): n is a, c, g, or t
  misc_feature (1440)..(1441): n is a, c, g, or t
  misc_feature (1466)..(1466): n is a, c, g, or t
  misc_feature (1471)..(1471): n is a, c, g, or t
  misc_feature (1566)..(1566): n is a, c, g, or t
aaaccgaactgaagggggaaggggcgagagggaagaggaggggcagaaggagttcggggaggcacagggtaggagcggtgagagggccgtggagtcccgcccctcgccgccgcggttggcgggagcgtgtcgtgacgtcacacagggcctctcgaagtgggcttgtgaatggctagattgggaagcaccggcggggtgtcgggaagggtggtgacgcaacatagagactccgcccccttccttggagcggcgcgactcgggctgagggagctcgggccaatcagagggacggccccagaatggcatggtagatggaacgcagctgagaggtctgacaagatgtaccaggtcccactaccactggatcgggatgggaccctggtacggctccgcttcaccatggtggccctggtcacggtctgctgtccacttgtcgccttcctcttctgcatcctctggtccctgctcttccacttcaaggagacaacggccacacactgtggggtgcccaattacctgccctcggtgagctcagccatcggcggggaggtgccccagcgctacgtgtggcgtttctgcatcggcctgcactcggcgcctcgcttcttggtggccttcgcctactggaaccactacctcagctgcacctccccgtgttcctgctatcgcccgctctgccgcctcaacttcggcctcaatgtcgtggagaacctcgcgttgctagtgctcacttatgtctcctcctccgaggacttcaccatccacgaaaatgctttcattgtgttcattgcctcatccctcgggcacatgctcctcacctgcattctctggcggttgaccaagaagcacacagtaagtcaggaggatcgcaagtcctacagctggaaacagcggctcttcatcatcaacttcatctccttcttctcggcgctggctgtctactttcggcacaacatgtattgtgaggctggagtgtacaccatctttgccatcctggagtacactgttgtcttaaccaacatggcgttccacatgacggcctggtgggacttcgggaacaaggagctgctcataacctctcagcctgaggaaaagcgattctgaacccttcagtcctgcttgggaggacgcagcccactgcccagaaacaagaaacacgataccattctggccttccccaccccacatcctctcttggccttactgaagatgggggaagggtaagaaggaagggtgtaggccaaggctcaccccagtgctgctggcttctcctctccacccctcatatgggcgtggggtcctcaaacatcacctttacctgagaggccccaagaagctgagctggcagagagctccaccatttggtgctaaaaaaaaaaaaaaatgaggggtgggggcaactcaccactgccangnaactccctnnagggtgggagtggnntatcttctaggctcttacccgcggnagggnagggcattaacacctgtcttcctcccattctctttccccaatccattattgctgcacagggcataacccacaaaccaacacacagtcttgcttcntctaacactttagtggtgatggggc

SEQ ID NO: 293344 - DNA, 1420 bp, Homo sapiens
  misc_feature (1161)..(1161): n is a, c, g, or t
  misc_feature (1163)..(1163): n is a, c, g, or t
  misc_feature (1172)..(1173): n is a, c, g, or t
  misc_feature (1187)..(1188): n is a, c, g, or t
  misc_feature (1213)..(1213): n is a, c, g, or t
  misc_feature (1218)..(1218): n is a, c, g, or t
  misc_feature (1276)..(1276): n is a, c, g, or t
  misc_feature (1321)..(1321): n is a, c, g, or t
aaaccgaactgaagggggaaggggcgagagggaagaggaggggcagaaggagttcggggaggcacagggtaggagcggtgagagggccgtggagtcccgcccctcgccgccgcggttggcgggagcgtgtcgtgacgtcacacagggcctctcgaagtgggcttgtgaatggctagattgggaagcaccggcggggtgtcgggaagggtggtgacgcaacatagagactccgcccccttccttggagcggcgcgactcgggctgagggagctcgggccaatcagagggacggccccagaatggcatggtagatggaacgcagctgagaggtctgacaagatgtaccaggtcccactaccactggatcgggatgggaccctggtacggctccgcttcaccatggtggccctggtcacggtctgctgtccacttgtcgccttcctcttctgcatcctctggtccctgctcttccacttcaaggagacaacggccacacactgtgggccatccacgaaaatgctttcattgtgttcattgcctcatccctcgggcacatgctcctcacctgcattctctggcggttgaccaagaagcacacagtaagtcaggaggatcgcaagtcctacagctggaaacagcggctcttcatcatcaacttcatctccttcttctcggcgctggctgtctactttcggcacaacatgtattgtgaggctggagtgtacaccatctttgccatcctggagtacactgttgtcttaaccaacatggcgttccacatgacggcctggtgggacttcgggaacaaggagctgctcataacctctcagcctgaggaaaagcgattctgaacccttcagtcctgcttgggaggacgcagcccactgcccagaaacaagaaacacgataccattctggccttccccaccccacatcctctcttggccttactgaagatgggggaagggtaagaaggaagggtgtaggccaaggctcaccccagtgctgctggcttctcctctccacccctcatatgggcgtggggtcctcaaacatcacctttacctgagaggccccaagaagctgagctggcagagagctccaccatttggtgctaaaaaaaaaaaaaaatgaggggtgggggcaactcaccactgccangnaactccctnnagggtgggagtggnntatcttctaggctcttacccgcggnagggnagggcattaacaattgcttcctttcattctcctttcccccaatccaattaagtgctgncacagggcagaagcacacaaaccaaccacacaagtttttgacttnctctcagcacctttgagttggttaaatggggctcacggggcaagaagttttgctggccttccccagcgtggtcacaaggttaattggactgccttgcct

SEQ ID NO: 293345 - DNA, 346 bp, Homo sapiens
tgaggccaggataggatccacaggcggtcatgagtggctgcggggcagcaatgatgtttttgataatgggcaatggtcttggggactggctgccattgtgttctctgtggcagaccaatggtggtgtgatttatcaagaggcctctgagcgggtagctggaagttcaccatgtcctgttccttgtgtcctcacaacagtgtacaccatctttgccatcctggagtacactgttgtcttaaccaacatggcgttccacatgacggcctggtgggacttcgggaacaaggagctgctcataacctctcagcctgaggaaaagcgattctgaacccttcagtcctgctt

SEQ ID NO: 293346 - DNA, 274 bp, Homo sapiens
gctctagtggatccggctgatgttaagagagcctctcccatctttggcttccgtgtccccatctaaacccttgtacagtcatcccccatcctttcacctctcaaacaagcaagacaccagtccctgcagctgtgtattatcttctcctttttccttaaggactgaagcttcaataggagttccaggcattaagatggatggtggagatgcacaagaacatggtcatttccttagactaccccaggttaggagcacccactttcttttttctttt

SEQ ID NO: 293347 - DNA, 955 bp, Homo sapiens
gttccggctctgtcttgagattttctttgtaacttctctgtgcctcagttatttgggggtactttaattggctcagtagagaaaaagcatagagtatcgtggctaagaaggtagaccacctggagccagaatccctccctggttcagatctcgattctgcgtcttactagctgtatggcctccatttctgcatctgtacaatggggagagtaatagttcctacatctcaggatcgttgtgaggcataaatgcaatcgtggtccaggaccacgattttgtacactctgaagccctagtcagctctctctgactccccacagcaactcactttacgctgaaggagacgggctcagagagatgaggggctcacctgtggccatagcagtgctctacatcccagccctccatcccttcaacaactccccaccacttcccagtctgccagagagcaagccgtgtgcccgtcatttcctcctggcactaaaggcgtatgccccaccgaggccgaacacaacctcgcagggagaaatgcatttgcacggtgccgggcaggcttttcttagctcctggtatagcttgaacaggcgtctgcagagtgttctcagaggcaggaagaatgatgccagtaacagtgattagaaactcgaggcagtgtaggattctgacacatcgatggtaagatgactgaggcaacaaacgcaggagatggtgtgacaccggacacccacatttcagactcacagtctccaaatattcgcataactccatgttgagttcagattttcaggctaggaaaatacattttcctgttctgaattgttccaaccctaaccaaaatgtcatctctgaagaagctagggttgcctgttttacttctgtgggatctgtgttttcaggaagcaatcagttcctatagtaagtaactttgtggaactcaattacttgcagacgtgca

SEQ ID NO: 293348 - DNA, 1158 bp, Homo sapiens
ccgggtcactgttaagggggccgccatggcccggctgtggggcgcgctgagtctttggccactgtgggcggccgtgccgtggggcggggcggcagccgtcggtgtccgggcttgcagctccacggccgccccggacggcgtcgagggcccggcgctgcggcgctcctattggcgccacctgaggcgtctggtgctgggtcctcccgaaccgccgttctcgcacgtgtgccaagtcggggacccggtgctgcgcggcgtggcggccccggtggagcgggcgcagctaggcgggcccgagctgcagcggctgacgcaacggctggtccaggtgatgcggcggcggcgctgcgtgggcctaagcgcgccgcagctgggggtgccgcggcaggtgctggcgctggagctccccgaggcgctgtgtcgggagtgcccgccccgccagcgcgcgctccgccaaatggagcccttccccctgcgcgtgttcgtgaaccccagcctgcgagtgcttgacagccgcctggtcacctttcccgagggctgcgagagcgtcgccggcttcctggcctgcgtgccccgcttccaggcggtgcagatctcagggctggaccccaatggagaacaggtggtgtggcaggcgagcgggtgggcagcccgcatcatccagcacgagatggaccacctgcagggctgcctgtttattgacaaaatggacagcaggacgttcacaaacgtctattggatgaaggtgaatgactaaagctttgctactggggctgaggattccggataccaagacgcaaacactttcactttgagctgggcaaatcttacttggcatcaacttggatggctcgcatatgacaggaaactggattgccaaggcatggcagactgagctggaggaagatgtcagaaatgtttgccctgaaatcagttacggacaaaatgttggctacaacttgaggagaaaaatcacccccaaaggagtggacatttcctaacaattctgtatggaggaaggtggggtaattgcattcgtctgcagtagacacgagttcctcggacctgtataatctcccaaagccaaggtttggtaataatgtagtccccaaatacctgaaagctgtctttaaaaatgcaggtaagcatgtgactggc

SEQ ID NO: 293349 - DNA, 661 bp, Homo sapiens
  misc_feature (12)..(12): n is a, c, g, or t
  misc_feature (83)..(83): n is a, c, g, or t
  misc_feature (96)..(96): n is a, c, g, or t
ggggaaagaggncccaacctccccccacccacccccaccccacacccacccccaaccccccaccctccccccctacccacccncccctccctccanaacgcgggctggaccccaatggagaacaggtggtgtggcaggcgagcgggtgggcagcccgcatcatccagcacgagatggaccacctgcagggctgcctgtttattgacaaaatggacagcaggacgttcacaaacgtctattggatgaaggtgaatgactaaagctttgctactggggctgaggattccggataccaagacgcaaacactttcactttgagctgggcaaatcttacttggcatcaacttggatggctcgcatatgacaggaaactggattgccaaggcatggcagactgagctggaggaagatgtcagaaatgtttgccctgaaatcagttacggacaaaatgttggctacaacttgaggagaaaaatcacccccaaaggagtggacatttcctaacaattctgtatggaggaaggtggggtaattgcattcgtctgcagtagacacgagttcctcggacctgtataatctcccaaagccaaggtttggtaataatgtagtccccaaatacctgaaagctgtctttaaaaatgcaggtaagcatgtgactggc

SEQ ID NO: 293350 - DNA, 2481 bp, Homo sapiens
agttcggagtcagcgccccttgtggtccggaagggaagtgacgttgttgctgggaagatggcgaccgcggcgactatcccatcggtagccacggccacagcagcggctctcggcgaggtggaggatgaagggctcctggcgtcgctgttccgggaccgcttccccgaggcccagtggcgcgagcggcccgatgtgggccgctacctccgggagttgagcggctcggggctggagcggctgcggcgcgagcccgagcgcctggcggaggagcgggcgcagctgctgcagcagacgcgcgacttggccttcgctaactacaagaccttcatccgcggcgccgagtgcaccgagcgcatccaccgcctgtttggcgacgtggaggcgtcgctcggccgcctgctcgaccgtttgcccagcttccagcagagctgcaggaactttgtgaaggaagccgaggagatcagctccaaccgccggatgaatagcctgaccctaaaccggcacacagaaattttggaaatactggagattcctcagctcatggacacctgtgtccggaacagttattatgaagaggccctggagcttgcagcctacgtacgccgactggagaggaaatactcttccatccctgtcatccagggcatcgtgaacgaagtgcgccagtccatgcagctgatgctgagccagctgatccagcaactgaggaccaacatccagcttcctgcctgcctccgtgtcattggctacctgcggcgcatggacgtcttcactgaggctgagttgagggtgaagtttcttcaggcccgagatgcttggctccggtccatcctgactgccattcctaatgatgatccctatttccatattacaaaaaccatcgaggcctcccgtgtccatctctttgatatcatcacccagtaccgtgccatcttctcagacgaggacccactgctgccccctgccatgggtgagcacactgtgaatgagagtgccatcttccatggctgggtgctacagaaggtctcacaattcctgcaggtgctggagaccgacctttaccggggcataggcggccacctggactctctgctgggccagtgcatgtactttgggctgtccttcagccgggtgggagctgatttccggggtcagttggctcctgttttccagcgggtggccatcagcactttccagaaagcaattcaggaaacagtggagaaattccaggaagaaatgaactcctacatgctcatctcggctccagccatcctgggcaccagtaacatgcctgctgctgtgccagccacccagccggggacgctgcagccacccatggtgctcctagatttcccacccctcgcctgctttctcaacaatattctggttgccttcaatgatctgcgcctctgctgccctgtggccctggcgcaggatgtgactggggccttggaagatgcccttgccaaggtaactaaaataatcctggccttccatcgcgctgaagaggctgccttcagcagcggggagcaagagctctttgtccagttctgcactgtcttcctggaagaccttgttccgtatttaaatcgctgtctccaagtcctttttccaccagctcagatagcacagactttaggcattcctcccactcagctctccaagtacggtaacctagggcatgtgaacatcggcgccattcaggagcccctcgcctttatcctgccaaagagagagacgcttttcaccctggatgaccaggcgctggggcccgagctcacagctccagcaccagagcctcccgccgaggagccacgcctggagcccgcgggcccagcctgcccggagggagggcgagcggagacgcaggccgaaccgcccagcgtggggccctagccggcgtcccctgcctccagaacgcgggctggaccccaatggagaacaggtggtgtggcaggcgagcgggtgggcagcccgcatcatccagcacgagatggaccacctgcagggctgcctgtttattgacaaaatggacagcaggacgttcacaaacgtctattggatgaaggtgaatgactaaagctttgctactggggctgaggattccggataccaagacgcaaacactttcactttgagctgggcaaatcttacttggcatcaacttggatggctcgcatatgacaggaaactggattgccaaggcatggcagactgagctggaggaagatgtcagaaatgtttgccctgaaatcagttacggacaaaatgttggctacaacttgaggagaaaaatcacccccaaaggagtggacatttcctaacaattctgtatggaggaaggtggggtaattgcattcgtctgcagtagacacgagttcctcggacctgtataatctcccaaagccaaggtttggtaataatgtagtccccaaatacctgaaagctgtctttaaaaatgcaggtaagcatgtgactggc

SEQ ID NO: 293351 - DNA, 2632 bp, Homo sapiens
agttcggagtcagcgccccttgtggtccggaagggaagtgacgttgttgctgggaagatggcgaccgcggcgactatcccatcggtagccacggccacagcagcggctctcggcgaggtggaggatgaagggctcctggcgtcgctgttccgggaccgcttccccgaggcccagtggcgcgagcggcccgatgtgggccgctacctccgggagttgagcggctcggggctggagcggctgcggcgcgagcccgagcgcctggcggaggagcgggcgcagctgctgcagcagacgcgcgacttggccttcgctaactacaagaccttcatccgcggcgccgagtgcaccgagcgcatccaccgcctgtttggcgacgtggaggcgtcgctcggccgcctgctcgaccgtttgcccagcttccagcagagctgcaggtgcgacgcgcctggcgctaaaggggttttataactgtaaaagctgacatttacgatggtagaaataactaacacataaagcgtttaccacgttccaggttctctgctgagcgctttattaatccatttaaacctcacaacagccttcgaggaactttgtgaaggaagccgaggagatcagctccaaccgccggatgaatagcctgaccctaaaccggcacacagaaattttggaaatactggagattcctcagctcatggacacctgtgtccggaacagttattatgaagaggccctggagcttgcagcctacgtacgccgactggagaggaaatactcttccatccctgtcatccagggcatcgtgaacgaagtgcgccagtccatgcagctgatgctgagccagctgatccagcaactgaggaccaacatccagcttcctgcctgcctccgtgtcattggctacctgcggcgcatggacgtcttcactgaggctgagttgagggtgaagtttcttcaggcccgagatgcttggctccggtccatcctgactgccattcctaatgatgatccctatttccatattacaaaaaccatcgaggcctcccgtgtccatctctttgatatcatcacccagtaccgtgccatcttctcagacgaggacccactgctgccccctgccatgggtgagcacactgtgaatgagagtgccatcttccatggctgggtgctacagaaggtctcacaattcctgcaggtgctggagaccgacctttaccggggcataggcggccacctggactctctgctgggccagtgcatgtactttgggctgtccttcagccgggtgggagctgatttccggggtcagttggctcctgttttccagcgggtggccatcagcactttccagaaagcaattcaggaaacagtggagaaattccaggaagaaatgaactcctacatgctcatctcggctccagccatcctgggcaccagtaacatgcctgctgctgtgccagccacccagccggggacgctgcagccacccatggtgctcctagatttcccacccctcgcctgctttctcaacaatattctggttgccttcaatgatctgcgcctctgctgccctgtggccctggcgcaggatgtgactggggccttggaagatgcccttgccaaggtaactaaaataatcctggccttccatcgcgctgaagaggctgccttcagcagcggggagcaagagctctttgtccagttctgcactgtcttcctggaagaccttgttccgtatttaaatcgctgtctccaagtcctttttccaccagctcagatagcacagactttaggcattcctcccactcagctctccaagtacggtaacctagggcatgtgaacatcggcgccattcaggagcccctcgcctttatcctgccaaagagagagacgcttttcaccctggatgaccaggcgctggggcccgagctcacagctccagcaccagagcctcccgccgaggagccacgcctggagcccgcgggcccagcctgcccggagggagggcgagcggagacgcaggccgaaccgcccagcgtggggccctagccggcgtcccctgcctccagaacgcgggctggaccccaatggagaacaggtggtgtggcaggcgagcgggtgggcagcccgcatcatccagcacgagatggaccacctgcagggctgcctgtttattgacaaaatggacagcaggacgttcacaaacgtctattggatgaaggtgaatgactaaagctttgctactggggctgaggattccggataccaagacgcaaacactttcactttgagctgggcaaatcttacttggcatcaacttggatggctcgcatatgacaggaaactggattgccaaggcatggcagactgagctggaggaagatgtcagaaatgtttgccctgaaatcagttacggacaaaatgttggctacaacttgaggagaaaaatcacccccaaaggagtggacatttcctaacaattctgtatggaggaaggtggggtaattgcattcgtctgcagtagacacgagttcctcggacctgtataatctcccaaagccaaggtttggtaataatgtagtccccaaatacctgaaagctgtctttaaaaatgcaggtaagcatgtgactggc

SEQ ID NO: 293352 - DNA, 2029 bp, Homo sapiens
agttcggagtcagcgccccttgtggtccggaagggaagtgacgttgttgctgggaagatggcgaccgcggcgactatcccatcggtagccacggccacagcagcggctctcggcgaggtggaggatgaagggctcctggcgtcgctgttccgggaccgcttccccgaggcccagtggcgcgagcggcccgatgtgggccgctacctccgggagttgagcggctcggggctggagcggctgcggcgcgagcccgagcgcctggcggaggagcgggcgcagctgctgcagcagacgcgcgacttggccttcgctaactacaagaccttcatccgcggcgccgagtgcaccgagcgcatccaccgcctgtttggcgacgtggaggcgtcgctcggccgcctgctcgaccgtttgcccagcttccagcagagctgcaggaactttgtgaaggaagccgaggagatcagctccaaccgccggatgaatagcctgaccctaaaccggcacacagaaattttggaaatactggagattcctcagctcatggacacctgtgtccggaacagttattatgaagaggccctggagcttgcagcctacgtacgccgactggagaggaaatactcttccatccctgtcatccagggcatcgtgaacgaagtgcgccagtccatgcagctgatgctgagccagctgatccagcaactgaggaccaacatccagcttcctgcctgcctccgtgtcattggctacctgcggcgcatggacgtcttcactgaggctgagttgagggtgaagtttcttcaggcccgagatgcttggctccggtccatcctgactgccattcctaatgatgatccctatttccatattacaaaaaccatcgaggcctcccgtgtccatctctttgatatcatcacccagtaccgtgccatcttctcagacgaggacccactgctgccccctgccatgggtgagcacactgtgaatgagagtgccatcttccatggctgggtgctacagaaggtctcacaattcctgcaggtgctggagaccgacctttaccggggcataggcggccacctggactctctgctgggccagtgcatgtactttgggctgtccttcagccgggtgggagctgatttccggggtcagttggctcctgttttccagcgggtggccatcagcactttccagaaagcaattcaggaaacagtggagaaattccaggaagaaatgaactcctacatgctcatctcggctccagccatcctgggcaccagtaacatgcctgctgctgtgccagccacccagccggggacgctgcagccacccatggtgctcctagatttcccacccctcgcctgctttctcaacaatattctggttgccttcaatgatctgcgcctctgctgccctgtggccctggcgcaggatgtgactggggccttggaagatgcccttgccaagggctggaccccaatggagaacaggtggtgtggcaggcgagcgggtgggcagcccgcatcatccagcacgagatggaccacctgcagggctgcctgtttattgacaaaatggacagcaggacgttcacaaacgtctattggatgaaggtgaatgactaaagctttgctactggggctgaggattccggataccaagacgcaaacactttcactttgagctgggcaaatcttacttggcatcaacttggatggctcgcatatgacaggaaactggattgccaaggcatggcagactgagctggaggaagatgtcagaaatgtttgccctgaaatcagttacggacaaaatgttggctacaacttgaggagaaaaatcacccccaaaggagtggacatttcctaacaattctgtatggaggaaggtggggtaattgcattcgtctgcagtagacacgagttcctcggacctgtataatctcccaaagccaaggtttggtaataatgtagtccccaaatacctgaaagctgtctttaaaaatgcaggtaagcatgtgactggc

SEQ ID NO: 293353 - DNA, 2417 bp, Homo sapiens
cacaaagaaaaaggattcatgcaaagctcttattatcgggtctgacacagttaacattataggtgtgagctgaatatatgtgcacatttatatacttattttatacgaaagcgtggaccggaggtcatctgcttcaaaacttccattgacgggaaggtgacaaggaaatcctcgcatttgagggcatcagatatcaaaaagtctctccatttggatggctggatgtggtggctcagcctgtaatcccagcactttgggagcctgaggcttgaacccaggagttcgagagcagcctggccaacatggcaaaaccctgtctctataaaataaaaaattagctggtcgtggtggcgtgcgcctgtagtcccaggaactttgtgaaggaagccgaggagatcagctccaaccgccggatgaatagcctgaccctaaaccggcacacagaaattttggaaatactggagattcctcagctcatggacacctgtgtccggaacagttattatgaagaggccctggagcttgcagcctacgtacgccgactggagaggaaatactcttccatccctgtcatccagggcatcgtgaacgaagtgcgccagtccatgcagctgatgctgagccagctgatccagcaactgaggaccaacatccagcttcctgcctgcctccgtgtcattggctacctgcggcgcatggacgtcttcactgaggctgagttgagggtgaagtttcttcaggcccgagatgcttggctccggtccatcctgactgccattcctaatgatgatccctatttccatattacaaaaaccatcgaggcctcccgtgtccatctctttgatatcatcacccagtaccgtgccatcttctcagacgaggacccactgctgccccctgccatgggtgagcacactgtgaatgagagtgccatcttccatggctgggtgctacagaaggtctcacaattcctgcaggtgctggagaccgacctttaccggggcataggcggccacctggactctctgctgggccagtgcatgtactttgggctgtccttcagccgggtgggagctgatttccggggtcagttggctcctgttttccagcgggtggccatcagcactttccagaaagcaattcaggaaacagtggagaaattccaggaagaaatgaactcctacatgctcatctcggctccagccatcctgggcaccagtaacatgcctgctgctgtgccagccacccagccggggacgctgcagccacccatggtgctcctagatttcccacccctcgcctgctttctcaacaatattctggttgccttcaatgatctgcgcctctgctgccctgtggccctggcgcaggatgtgactggggccttggaagatgcccttgccaaggtaactaaaataatcctggccttccatcgcgctgaagaggctgccttcagcagcggggagcaagagctctttgtccagttctgcactgtcttcctggaagaccttgttccgtatttaaatcgctgtctccaagtcctttttccaccagctcagatagcacagactttaggcattcctcccactcagctctccaagtacggtaacctagggcatgtgaacatcggcgccattcaggagcccctcgcctttatcctgccaaagagagagacgcttttcaccctggatgaccaggcgctggggcccgagctcacagctccagcaccagagcctcccgccgaggagccacgcctggagcccgcgggcccagcctgcccggagggagggcgagcggagacgcaggccgaaccgcccagcgtggggccctagccggcgtcccctgcctccagaacgcgggctggaccccaatggagaacaggtggtgtggcaggcgagcgggtgggcagcccgcatcatccagcacgagatggaccacctgcagggctgcctgtttattgacaaaatggacagcaggacgttcacaaacgtctattggatgaaggtgaatgactaaagctttgctactggggctgaggattccggataccaagacgcaaacactttcactttgagctgggcaaatcttacttggcatcaacttggatggctcgcatatgacaggaaactggattgccaaggcatggcagactgagctggaggaagatgtcagaaatgtttgccctgaaatcagttacggacaaaatgttggctacaacttgaggagaaaaatcacccccaaaggagtggacatttcctaacaattctgtatggaggaaggtggggtaattgcattcgtctgcagtagacacgagttcctcggacctgtataatctcccaaagccaaggtttggtaataatgtagtccccaaatacctgaaagctgtctttaaaaatgcaggtaagcatgtgactggc

SEQ ID NO: 293354 - DNA, 1714 bp, Homo sapiens
agttcggagtcagcgccccttgtggtccggaagggaagtgacgttgttgctgggaagatggcgaccgcggcgactatcccatcggtagccacggccacagcagcggctctcggcgaggtggaggatgaagggctcctggcgtcgctgttccgggaccgcttccccgaggcccagtggcgcgagcggcccgatgtgggccgctacctccgggagttgagcggctcggggctggagcggctgcggcgcgagcccgagcgcctggcggaggagcgggcgcagctgctgcagcagacgcgcgacttggccttcgctaactacaagaccttcatccgcggcgccgagtgcaccgagcgcatccaccgcctgtttggcgacgtggaggcgtcgctcggccgcctgctcgaccgtttgcccagcttccagcagagctgcaggaactttgtgaaggaagccgaggagatcagctccaaccgccggatgaatagcctgaccctaaaccggcacacagaaattttggaaatactggagattcctcagctcatggacacctgtgtccggaacagttattatgaagaggccctggagcttgcagcctacgtacgccgactggagaggaaatactcttccatccctgtcatccagggcatcgtgaacgaagtgcgccagtccatgcagctgatgctgagccagctgatccagcaactgaggaccaacatccagcttcctgcctgcctccgtgtcattggctacctgcggcgcatggacgtcttcactgaggctgagttgagggtgaagtttcttcaggcccgagatgcttggctccggtccatcctgactgccattcctaatgatgatccctatttccatattacaaaaaccatcgaggcctcccgtgtccatctctttgatatcatcacccagtaccgtgccatcttctcagacgaggacccactgctgccccctgccatgggtgagcacactgtgaatgagagtgccatcttccatggctgggtgctacagaaggtctcacaattcctgcaggtgctggagaccgacctttaccggggcataggcggccacctggactctctgctgggccagtgcatgtactttgggctgtccttcagccgggtgggagctgatttccggggtcagttggctcctgttttccagcgggtggccatcagcactttccagaaagcaattcaggaaacagtggagaaattccaggaagaaatgaactcctacatgctcatctcggctccagccatcctgggcaccagtaacatgcctgctgctgtgccagccacccagccggggacgctgcagccacccatggtgctcctagatttcccacccctcgcctgctttctcaacaatattctggttgccttcaatgatctgcgcctctgctgccctgtggccctggcgcaggatgtgactggggccttggaagatgcccttgccaaggtaactaaaataatcctggccttccatcgcgctgaagaggctgccttcagcagcggggagcaagagctctttgtccagttctgcactgtcttcctggaagaccttgttccgtatttaaatcgctgtctccaagtcctttttccaccagctcagatagcacagactttaggtaagagaatgaaaattctgtaaactgccttactgatgtgtaattcacatactaaataattcatccatttgtgta

SEQ ID NO: 293355 - DNA, 1754 bp, Homo sapiens
agttcggagtcagcgccccttgtggtccggaagggaagtgacgttgttgctgggaagatggcgaccgcggcgactatcccatcggtagccacggccacagcagcggctctcggcgaggtggaggatgaagggctcctggcgtcgctgttccgggaccgcttccccgaggcccagtggcgcgagcggcccgatgtgggccgctacctccgggagttgagcggctcggggctggagcggctgcggcgcgagcccgagcgcctggcggaggagcgggcgcagctgctgcagcagacgcgcgacttggccttcgctaactacaagaccttcatccgcggcgccgagtgcaccgagcgcatccaccgcctgtttggcgacgtggaggcgtcgctcggccgcctgctcgaccgtttgcccagcttccagcagagctgcaggaactttgtgaaggaagccgaggagatcagctccaaccgccggatgaatagcctgaccctaaaccggcacacagaaattttggaaatactggagattcctcagctcatggacacctgtgtccggaacagttattatgaagaggccctggagcttgcagcctacgtacgccgactggagaggaaatactcttccatccctgtcatccagggcatcgtgaacgaagtgcgccagtccatgcagctgatgctgagccagctgatccagcaactgaggaccaacatccagcttcctgcctgcctccgtgtcattggctacctgcggcgcatggacgtcttcactgaggctgagttgagggtgaagtttcttcaggcccgagatgcttggctccggtccatcctgactgccattcctaatgatgatccctatttccatattacaaaaaccatcgaggcctcccgtgtccatctctttgatatcatcacccagtaccgtgccatcttctcagacgaggacccactgctgccccctgccatgggtgagcacactgtgaatgagagtgccatcttccatggctgggtgctacagaaggtctcacaattcctgcaggtgctggagaccgacctttaccggggcataggcggccacctggactctctgctgggccagtgcatgtactttgggctgtccttcagccgggtgggagctgatttccggggtcagttggctcctgttttccagcgggtggccatcagcactttccagaaagcaattcaggaaacagtggagaaattccaggaagaaatgaactcctacatgctcatctcggctccagccatcctgggcaccagtaacatgcctgctgctgtgccagccacccagccggggacgctgcagccacccatggtgctcctagatttcccacccctcgcctgctttctcaacaatattctggttgccttcaatgatctgcgcctctgctgccctgtggccctggcgcaggatgtgactggggccttggaagatgcccttgccaaggtaactaaaataatcctggccttccatcgcgctgaagaggctgccttcagcagcggggagcaagagctctttgtccagttctgcactgtcttcctggaagaccttgttccgtatttaaatcgctgtctccaagtcctttttccaccagctcagatagcacagactttaggtaagagaatgaaaattctgtaaactgccttactgatgtgtaattcacatactaaataattcatccatttgtgtaagtcagtgttttttagtaaatatgaatccaattttagaat

SEQ ID NO: 293356 - DNA, 2285 bp, Homo sapiens
agttcggagtcagcgccccttgtggtccggaagggaagtgacgttgttgctgggaagatggcgaccgcggcgactatcccatcggtagccacggccacagcagcggctctcggcgaggtggaggatgaagggctcctggcgtcgctgttccgggaccgcttccccgaggcccagtggcgcgagcggcccgatgtgggccgctacctccgggagttgagcggctcggggctggagcggctgcggcgcgagcccgagcgcctggcggaggagcgggcgcagctgctgcagcagacgcgcgacttggccttcgctaactacaagaccttcatccgcggcgccgagtgcaccgagcgcatccaccgcctgtttggcgacgtggaggcgtcgctcggccgcctgctcgaccgtttgcccagcttccagcagagctgcaggaactttgtgaaggaagccgaggagatcagctccaaccgccggatgaatagcctgaccctaaaccggcacacagaaattttggaaatactggagattcctcagctcatggacacctgtgtccggaacagttattatgaagaggccctggagcttgcagcctacgtacgccgactggagaggaaatactcttccatccctgtcatccagggcatcgtgaacgaagtgcgccagtccatgcagctgatgctgagccagctgatccagcaactgaggaccaacatccagcttcctgcctgcctccgtgtcattggctacctgcggcgcatggacgtcttcactgaggctgagttgagggtgaagtttcttcaggcccgagatgcttggctccggtccatcctgactgccattcctaatgatgatccctatttccatattacaaaaaccatcgaggcctcccgtgtccatctctttgatatcatcacccagtaccgtgccatcttctcagacgaggacccactgctgccccctgccatgggtgagcacactgtgaatgagagtgccatcttccatggctgggtgctacagaaggtctcacaattcctgcaggtgctggagaccgacctttaccggggcataggcggccacctggactctctgctgggccagtgcatgtactttgggctgtccttcagccgggtgggagctgatttccggggtcagttggctcctgttttccagcgggtggccatcagcactttccagaaagcaattcaggaaacagtggagaaattccaggaagaaatgaactcctacatgctcatctcggctccagccatcctgggcaccagtaacatgcctgctgctgtgccagccacccagccggggacgctgcagccacccatggtgctcctagatttcccacccctcgcctgctttctcaacaatattctggttgccttcaatgatctgcgcctctgctgccctgtggccctggcgcaggatgtgactggggccttggaagatgcccttgccaaggtgagcacattctgttggttttctgctaccctgggccttctctggtaatgggtggccagatttttgtaataaacccgtctatttgacggtgtctgctgacatggagaggtctagtgtggttttggaggttctcctgattgagaagctctggccagttgcccttcatgggacctaggacagtccatgaagtgatttgcctatagtaacaattcggtaatacacgtattagctttctagtgctgcataacaaatttccacaaacttagtagcttccagcaacacatttattaccttccagttttggtgggtcaggagtccaggcacagcacaaccgggtcctctctgctcagggtcttacagggttgccatcaaggtgttggctggactatggcctcatctggaggttggggctccatttcagactcatgcaagttggcaggggtcagttctttgcaattgcagaactgaagcctcagctcctagaggctgtccactccataggcagctgacaacatggctgtttgcttcctcaaggccagcaggagagctactctcttgagtctcttcttttaggtacctccttttaaaaacttcatttgattaagtcagatgattagggactttaattacatctacaaaaccctttacctttagcatattcttttatttttattgttaaaagtgttttattttacagagagatagtgtctccctatgttgcctaggctggtctcaaactcctggactcaagtgatcctcctgctacagaccctcaaagtgtgggattacaggtgtgagtcacttgaacttgggaa

SEQ ID NO: 293357 - DNA, 1538 bp, Homo sapiens
agttcggagtcagcgccccttgtggtccggaagggaagtgacgttgttgctgggaagatggcgaccgcggcgactatcccatcggtagccacggccacagcagcggctctcggcgaggtggaggatgaagggctcctggcgtcgctgttccgggaccgcttccccgaggcccagtggcgcgagcggcccgatgtgggccgctacctccgggagttgagcggctcggggctggagcggctgcggcgcgagcccgagcgcctggcggaggagcgggcgcagctgctgcagcagacgcgcgacttggccttcgctaactacaagaccttcatccgcggcgccgagtgcaccgagcgcatccaccgcctgtttggcgacgtggaggcgtcgctcggccgcctgctcgaccgtttgcccagcttccagcagagctgcaggaactttgtgaaggaagccgaggagatcagctccaaccgccggatgaatagcctgaccctaaaccggcacacagaaattttggaaatactggagattcctcagctcatggacacctgtgtccggaacagttattatgaagaggccctggagcttgcagcctacgtacgccgactggagaggaaatactcttccatccctgtcatccagggcatcgtgaacgaagtgcgccagtccatgcagctgatgctgagccagctgatccagcaactgaggaccaacatccagcttcctgcctgcctccgtgtcattggctacctgcggcgcatggacgtcttcactgaggctgagttgagggtgaagtttcttcaggcccgagatgcttggctccggtccatcctgactgccattcctaatgatgatccctatttccatattacaaaaaccatcgaggcctcccgtgtccatctctttgatatcatcacccagtaccgtgccatcttctcagacgaggacccactgctgccccctgccatgggtgagcacactgtgaatgagagtgccatcttccatggctgggtgctacagaaggtctcacaattcctgcaggtgctggagaccgacctttaccggggcataggcggccacctggactctctgctgggccagtgcatgtactttgggctgtccttcagccgggtgggagctgatttccggggtcagttggctcctgttttccagcgggtggccatcagcactttccagaaagcaaatcttacttggcatcaacttggatggctcgcatatgacaggaaactggattgccaaggcatggcagactgagctggaggaagatgtcagaaatgtttgccctgaaatcagttacggacaaaatgttggctacaacttgaggagaaaaatcacccccaaaggagtggacatttcctaacaattctgtatggaggaaggtggggtaattgcattcgtctgcagtagacacgagttcctcggacctgtataatctcccaaagccaaggtttggtaataatgtagtccccaaatacctgaaagctgtctttaaaaatgcaggtaagcatgtgactggc

SEQ ID NO: 293358 - DNA, 1199 bp, Homo sapiens
agttcggagtcagcgccccttgtggtccggaagggaagtgacgttgttgctgggaagatggcgaccgcggcgactatcccatcggtagccacggccacagcagcggctctcggcgaggtggaggatgaagggctcctggcgtcgctgttccgggaccgcttccccgaggcccagtggcgcgagcggcccgatgtgggccgctacctccgggagttgagcggctcggggctggagcggctgcggcgcgagcccgagcgcctggcggaggagcgggcgcagctgctgcagcagacgcgcgacttggccttcgctaactacaagaccttcatccgcggcgccgagtgcaccgagcgcatccaccgcctgtttggcgacgtggaggcgtcgctcggccgcctgctcgaccgtttgcccagcttccagcagagctgcaggaactttgtgaaggaagccgaggagatcagctccaaccgccggatgaatagcctgaccctaaaccggcacacagaaattttggaaatactggagattcctcagctcatggacacctgtgtccggaacagttattatgaagaggccctggagcttgcagcctacgtacgccgactggagaggaaatactcttccatccctgtcatccagggcatcgtgaacgaagtgcgccagtccatgcagctgatgctgagccagctgatccagcaactgaggaccaacatccagcttcctgcctgcctccgtgtcattggctacctgcggcgcatggacgtcttcaccattgcccaagtgaagcagcttttaactctcttgcccaaagtcctctgagaatttcttcactttcaggaggtcgtctgcattcaccgtgggccgggtggtggccagagaccgcagcatgtccgactgtgaaggcaacagtatgtgcctgagcaggagccaggctccaggtccccaacctcccctcagcacacaacaggcgcagctgagggtgggaagaggtttgccttcaaggccaccccagaggcctgcttgaatctgcctatggcagggaccctcttccctctcgaggcagctcagatgggcctcctcctggtctgagaatctaagctccatcatctcataactccccttacgaacttgctttcttttttttttttttttttttggggagacggagtctgtcacccaggctggagtgcagtggc

SEQ ID NO: 293359 - DNA, 878 bp, Homo sapiens
gaggaggagccaagatggccgaataggaacagctccggtctacagctcccagcgtgagcgacgcagaagacgggtgatgtctgcatttccatctgagcttctgccatgaccggaagcttcctgaggcctccctagaagctgagcagatgccagcactgtgcttcctgtacagcctgcagaactggcacctctggtgggattccctccccttctggatgggtgcaggctgtaccacttgtcccttggatttgcaattccaggaggaaaataatgagccagcattgtgggaaaatgtcactctgccccagtgatcagtctctaagactggggagggaagtcaagcttgaaacggcagagtggattttctcttcaaggagcacttttaaagaaaacaaaggcttctgtgatcaatattttatgtcaaacatcctgtgaggatgaagggcccttctatgcttcaccattttaacctctcatttggaaaagcaaaaaggcctgggagaagctgcgttcgcaaaatctctcctggatgacttgttcagaagccagttcagtaaattcaaactgttccagagtccccttttgaaaaccacagatgccgtggacccactaaggttgagacgcagtgtttgtcccctccaggagacacagtgttcaaggcgccatcttggaagcagagaccaagcccttgccatactaaacaggctagcactgtgatcttggacttgtcagcctccacaatggctcacagttagactacattcctagcctcctgaagagttaggtacagctgtgtgactgaattcctgccaatgaaatgtggtgagaaccacttccaggcctggcccacagaaacctcccatagacaattcttcatc

SEQ ID NO: 293360 - DNA, 1131 bp, Homo sapiens
tcgcagaaggctttttattcattattattaatgtcctttgaaaaaagaccctttaattaatgttcctattgggcacagagctttttaaagacaccactccctccctaacacacacagctgtgttttatagactaattgtcacctaaccaagggaccccacagggatctgcaatttgtcccacctctgccctgccacacttccctgcaacgctcctaattgctgaatcccattcagcctcatgaaagtggtggccgatatttaaagttcatttcaggaaggcttcataataactggggaaaataacataatctcgttttaaaacatttccttcctctgttctgctgatagaatcaaacaatccagagttccatctgtcctgtcacaggtccagattttaggatgtggttttgaagttacttgttttctttgtttcagggcacctctggtgggattccctccccttctggatgggtgcaggctgtaccacttgtcccttggatttgcaattccaggaggaaaataatgagccagcattgtgggaaaatgtcactctgccccagtgatcagtctctaagactggggagggaagtcaagcttgaaacggcagagtggattttctcttcaaggagcacttttaaagaaaacaaaggcttctgtgatcaatattttatgtcaaacatcctgtgaggatgaagggcccttctatgcttcaccattttaacctctcatttggaaaagcaaaaaggcctgggagaagctgcgttcgcaaaatctctcctggatgacttgttcagaagccagttcagtaaattcaaactgttccagagtccccttttgaaaaccacagatgccgtggacccactaaggttgagacgcagtgtttgtcccctccaggagacacagtgttcaaggcgccatcttggaagcagagaccaagcccttgccatactaaacaggctagcactgtgatcttggacttgtcagcctccacaatggctcacagttagactacattcctagcctcctgaagagttaggtacagctgtgtgactgaattcctgccaatgaaatgtggtgagaaccacttccaggcctggcccacagaaacctcccatagacaattcttcatc

SEQ ID NO: 293361 - DNA, 331 bp, Homo sapiens
tctggtgggattccctccccttctggatgggtgcaggctgtaccacttgtcccttggatttgcaattccaggaggaaaataatgagccagcattgtgggaaaatgtcactctgccccagtgatcagtctctaagactggggagggaagtcaagcttgaaacggcagagtggattttctcttcaaggagcacttttaaaggtaatagaggccaggtgcagtggttcatgcctgtaattccagcactttgggaggccgaggcaggtggatcacttgaggtcaggagttcgagaccagcctgaccaacatggcgaaaccccatctctactaaaa

SEQ ID NO: 293362 - DNA, 939 bp, Homo sapiens
cgtcaatgcgacgtcctcctactcccacctcagagctgtcacagagactgtcagttccgtccctccccttcagccctttaacgcacgtcttcccgaccgcataacttgctcagtccctgcggccaactggggcgggccaatggctgtgacggataaggggtgtggggtgcggggacaatgggccagagcttctcatgcagcctgcaccagcgccgggtcggagagtcagaggccaccctgagatggaccgagatcttcagttggggaggcgcctccggtgagcttgcggccagatgccccctcagtagtcctccgcaacaggtgccgcgcagccgagtggcgggctagcataccgcctgcccgcaattcggccaggcctcgagcctgctccgccttcccgctgcggtagcgccgcttggtggcatgcatgtttagtcccagctacacagcagggaggctgaggctgaaggaatacttgagcccaggaattcaagactagcctgcacaacatagtgagaccctgactttaaaataaatttaaaaaaattaaaagcaacaagactttctgcttgtatatgatgatgttagtatgctgacttacaaggttagatcattttgatatgtgtgatgtaggttttcaaagctggcactgttttatgcttcaaatattatttttattcattggttctcatgggatttcatcactaagctgtaaatcaataatcataatgttgaggggaggggattacaaaatagctcttcaaaatcatctttgcatttctcaataaacagcattcccttttggactacagtgaaaaatattgagctttgtttactttgaaaatgagtcttagtctatgaatgcctgggtagggtcaagaatgaaaaatgagaggaagagagaagcatcaggaagataaaatgatcaatctcacaaaa

SEQ ID NO: 293363 - DNA, 1026 bp, Homo sapiens
cgtcaatgcgacgtcctcctactcccacctcagagctgtcacagagactgtcagttccgtccctccccttcagccctttaacgcacgtcttcccgaccgcataacttgctcagtccctgcggccaactggggcgggccaatggctgtgacggataaggggtgtggggtgcggggacaatgggccagagcttctcatgcagcctgcaccagcgccgggtcggagagtcagaggccaccctgagatggaccgagatcttcagttggggaggcgcctccggtgagcttgcggccagatgccccctcagtagtcctccgcaacaggtgccgcgcagccgagtggcgggctagcataccgcctgcccgcaattcggccaggcctcgagcctgctccgccttcccgctgcggtagcgccgccggggaaacgccgccacgggctgcatgggcagcgctcgcgccccgccgctgagccgccggggagccgtccagtcttcgaatcccagcttggtggcatgcatgtttagtcccagctacacagcagggaggctgaggctgaaggaatacttgagcccaggaattcaagactagcctgcacaacatagtgagaccctgactttaaaataaatttaaaaaaattaaaagcaacaagactttctgcttgtatatgatgatgttagtatgctgacttacaaggttagatcattttgatatgtgtgatgtaggttttcaaagctggcactgttttatgcttcaaatattatttttattcattggttctcatgggatttcatcactaagctgtaaatcaataatcataatgttgaggggaggggattacaaaatagctcttcaaaatcatctttgcatttctcaataaacagcattcccttttggactacagtgaaaaatattgagctttgtttactttgaaaatgagtcttagtctatgaatgcctgggtagggtcaagaatgaaaaatgagaggaagagagaagcatcaggaagataaaatgatcaatctcacaaaa

SEQ ID NO: 293364 - DNA, 1029 bp, Homo sapiens
agctgccgggatcccagccggaaggggcgggcgaaaggcagggttgctgggggcgggcgaaaggcagggttgctggaggcgcgcgtaggttcgagtagggactggaatgcgggccaacagtgtgggggttattaggggggagggtaggcaggtcggaggagggagttgggaggaaagcggcggcggtggcggcttcaacagcagctcttgcccttaaggaacaatgaaacacaaagatggtgcagacccaggccctgctttgactgggagaaagatgcattcagttgactaaaacttgaaagggcagtttacttctatagaagggtgcaccctcacagatggaccaatgtgtcaggagaattcagtcacacccaaagcaggaggtaataagacaccgaagtgaggacttcacaggctgcttgggagaagacaatcatccgtgggcttgggaaagggagaaatgcctactgagtttagggaattgcttgctggaagaaatgatggcttggtggcatgcatgtttagtcccagctacacagcagggaggctgaggctgaaggaatacttgagcccaggaattcaagactagcctgcacaacatagtgagaccctgactttaaaataaatttaaaaaaattaaaagcaacaagactttctgcttgtatatgatgatgttagtatgctgacttacaaggttagatcattttgatatgtgtgatgtaggttttcaaagctggcactgttttatgcttcaaatattatttttattcattggttctcatgggatttcatcactaagctgtaaatcaataatcataatgttgaggggaggggattacaaaatagctcttcaaaatcatctttgcatttctcaataaacagcattcccttttggactacagtgaaaaatattgagctttgtttactttgaaaatgagtcttagtctatgaatgcctgggtagggtcaagaatgaaaaatgagaggaagagagaagcatcaggaagataaaatgatcaatctcacaaaa

SEQ ID NO: 293365 - DNA, 1069 bp, Homo sapiens
cgtcaatgcgacgtcctcctactcccacctcagagctgtcacagagactgtcagttccgtccctccccttcagccctttaacgcacgtcttcccgaccgcataacttgctcagtccctgcggccaactggggcgggccaatggctgtgacggataaggggtgtggggtgcggggacaatgggccagagcttctcatgcagcctgcaccagcgccgggtcggagagtcagaggccaccctgagatggaccgagatcttcagttggggaggcgcctccggtgagcttgcggccagatgccccctcagtagtcctccgcaacaggtgccgcgcagccgagtggcgggctagcataccgcctgcccgcaattcggccaggcctcgagcctgctccgccttcccgctgcggtagcgccgccggggaaacgccgccacgggctgcatgggcagcgctcgcgccccgccgctgagccgccggggagccgtccagtcttcgaatcccagtttgtgatgaagaaataaacaatgcccagttcctgccctggagaagctcattgcatagaaaaaggaaaaaggcagatatacatgccacagtacagtgctgagacaacataaatcacaagcaaccaagtacaaagtgaattatacagaatctggttttcttctgtttggatttgatactgagctatactggattcactgacaagaagagtttgaattagcagcatgctgagaatggacacagtgtttgaagagactgataaagaaagtacaggaggagttttatttttggaagaagaaatggtccttgggcacagaccccatatgagttttcctttcagcgttctctgctcagctgttctctgctgtggtgaggcgcctatgctttgtatatgtctgaaattaattgaaaagctagtgacagattctgatgtcatttgccatgagctttattattgtgcaggtaattttggatcaaatcaccctaacgtttttcaacaaagactttagaagaaataaagctgcattactttttcttggcgcattcttcctttaggacctatagtgaggt

SEQ ID NO: 293366 - DNA, 1071 bp, Homo sapiens
cgtcaatgcgacgtcctcctactcccacctcagagctgtcacagagactgtcagttccgtccctccccttcagccctttaacgcacgtcttcccgaccgcataacttgctcagtccctgcggccaactggggcgggccaatggctgtgacggataaggggtgtggggtgcggggacaatgggccagagcttctcatgcagcctgcaccagcgccgggtcggagagtcagaggccaccctgagatggaccgagatcttcagttggggaggcgcctccggtgagcttgcggccagatgccccctcagtagtcctccgcaacaggtgccgcgcagccgagtggcgggctagcataccgcctgcccgcaattcggccaggcctcgagcctgctccgccttcccgctgcggtagcgccgccggggaaacgccgccacgggctgcatgggcagcgctcgcgccccgccgctgagccgccggggagccgtccagtcttcgaatcccagaaacacaaagatggtgcagacccaggccctgctttgactgggagaaagatgcattcagttgactaaaacttgaacggtcggctccaccagtgcaaggattgtgcctgtcctcttcccgggctgatcttcccctgtgcctggaacagcacctgctatataaattatgtgctggatacacacactcgaaaagcaagagatcaggctccctgagaaaagggcagtttacttctatagaagggtgcaccctcacagatggaccaatgtgtcaggagaattcagtcacacccaaagcaggagatgcgggaggccagatgcgcaagatggacactcggctcctccttcgtccccgcctctcctcgcttccagggtagcagcctcaacaagggaaactattgttccagtggaggctgcgaggatgtcggtgatttacgcgccgagctgtagctgcaaaaggacaagggcaagtgccggcccgacctagggcccaccggtctctggcttgctcttgtgagtaggtgcaccctgcccgcttgtggtggcctcaggggtaagaaatcaggacccacccag

SEQ ID NO: 293367 - DNA, 803 bp, Homo sapiens
cgtcaatgcgacgtcctcctactcccacctcagagctgtcacagagactgtcagttccgtccctccccttcagccctttaacgcacgtcttcccgaccgcataacttgctcagtccctgcggccaactggggcgggccaatggctgtgacggataaggggtgtggggtgcggggacaatgggccagagcttctcatgcagcctgcaccagcgccgggtcggagagtcagaggccaccctgagatggaccgagatcttcagttggggaggcgcctccggcttggtggcatgcatgtttagtcccagctacacagcagggaggctgaggctgaaggaatacttgagcccaggaattcaagactagcctgcacaacatagtgagaccctgactttaaaataaatttaaaaaaattaaaagcaacaagactttctgcttgtatatgatgatgttagtatgctgacttacaaggttagatcattttgatatgtgtgatgtaggttttcaaagctggcactgttttatgcttcaaatattatttttattcattggttctcatgggatttcatcactaagctgtaaatcaataatcataatgttgaggggaggggattacaaaatagctcttcaaaatcatctttgcatttctcaataaacagcattcccttttggactacagtgaaaaatattgagctttgtttactttgaaaatgagtcttagtctatgaatgcctgggtagggtcaagaatgaaaaatgagaggaagagagaagcatcaggaagataaaatgatcaatctcacaaaa

SEQ ID NO: 293368 - DNA, 462 bp, Homo sapiens
atcccataaatggagtctgggacagaaacctacacattggggcttggtggcatgcatgtttagtcccagctacacagcagggaggctgaggctgaaggaatacttgagcccaggaattcaagactagcctgcacaacataagcctcctctgtcacctgggctggagtgcgatggtgtcatcttgggtcactgcagcttctgcctcttaggttcaagtgattctcatgcctcagcttcccaagtagctgggattacaggcatgcgccaccaggcccagcaaagttttgtatttatagtagaaatggggtttcactgtgttagccaggttgttctcaaactcctcacctcaggtgatcacctgcctctgcctcccaaagtgctgggattaaaggaatgagccactgggtcgggcaaacacagagataaattgaaagcatatttaaatgtttcctgtttcatcag

SEQ ID NO: 293369 - DNA, 1112 bp, Homo sapiens
cgtcaatgcgacgtcctcctactcccacctcagagctgtcacagagactgtcagttccgtccctccccttcagccctttaacgcacgtcttcccgaccgcataacttgctcagtccctgcggccaactggggcgggccaatggctgtgacggataaggggtgtggggtgcggggacaatgggccagagcttctcatgcagcctgcaccagcgccgggtcggagagtcagaggccaccctgagatggaccgagatcttcagttggggaggcgcctccggtgagcttgcggccagatgccccctcagtagtcctccgcaacaggtgccgcgcagccgagtggcgggctagcataccgcctgcccgcaattcggccaggcctcgagcctgctccgccttcccgctgcggtagcgccgccggggaaacgccgccacgggctgcatgggcagcgctcgcgccccgccgctgagccgccggggagccgtccagtcttcgaatcccagaaacacaaagatggtgcagacccaggccctgctttgactgggagaaagatgcattcagttgactaaaacttgaaccacagcatgttccgaagagatgattggaagatggaagtggagggttaaataatgaaatgcagctaacatttcggaaagtttctaaaagttgtacaacatgccctacagctactctttaaatctccaaatcaaatgagaaatgcaacaacttgagcaagagtgatcagttactaagaggagtacctaacgtccttagaagaaaagattcagatcatagggattttatttacagaaatgtatttacctgtttgtaatgtatgccagtttagatggagtctagctctgtgtccaggctggagtgcagggacaagatctcggctcactgcaacctccacctcctgtgttcaagtgattccacaggcttagcctccctagaagctgggactacagtctcgttctgtcacccgggctggagtgcaggaggacaatctcggctcgctgaaacctctgccgcctgggttcaagcaattctctgggtcagcgtcctgcgtagctgggattacaagcgcctgccaccacagttggctaatgtttaa

SEQ ID NO: 293370 - DNA, 343 bp, Homo sapiens
ttatatttgagtgctgtttcttttgcggcacaaaactttataacaatttggggggctcacctgtaattacattcctctcagggcccaccggtctctggcttgctcttgtgagtaggtgcaccctgcccgcttgtggtggcctcaggggtaagaaatcaggacccacccagtgagagaaataacccaagctgtcagcaacgcggaaagaaatgggctagcaacctcttaaagcatcctcacgtactgcggcgatgactctgtgcacagaccaaggaaggagagaggccgcggaagtcaggtaaagtacttccttggtggtcagattctggagggctaaacgtgt

SEQ ID NO: 293371 - DNA, 1893 bp, Homo sapiens
gcacctcctacgacactgccgaatggaaaaagtgagggcagcgtacgcctggtagggggcgcgaacctgtgtcagggccgagtggagatcctgcacagtggcctgtggggcaccgtgtgtgacgacgactgggggctgccggatgccgctgtggtctgtcgtcagctgggctgcggggcggccatggccgccaccaccaacgccttcttcggctatggcaccggacacatcctgctggacaacgtgcactgcgaaggcggcgagccccgcctggcagcctgccagagcctgggctggggtgtgcacaactgcggccaccacgaggacgcgggcgcgctctgcgcaggcctgggtcccccaacgctcacagcactgccatcctcagccacaagagaggactgggcttggcagacagatccgtccgctacaggagttggcccccagccttcccgggagacagcactgctcaccaccgccgcctgggccgcggggaagaaaagtgggcggctgcgactggtgggcggcccgggtccgtgccgcggccgcgtggaggtgttgcacgccgggggctggggcaccgtgtgcgacgatgactgggactttgcggacgcgcgcgtggcctgccgcgaagcgggctgcgggcctgcgctgggcgctacgggacgaggctcgcctgagcgactgcttccacctgggctggggccagcacaactgcggccaccacgaggacgcgggagcgctctgcgcaggtgaggctgacagcgaaggcccagaggagctgggactgcaagtccagcaggatggttctgagaccacgcgggtgcccactcctcggcccagggacgggcatctacgtctggtcaatggagcccaccgatgcgagggacgtgtagagctctacctagggcaacggtggggcactgtctgtgatgatgcttgggacctgcgggcagccggtgtcctgtgccgccagctgggctgtggccaggccctcgcagcccctggcgaggctcactttggcccaggccgaggccccattctcctggacaatgtcaagtgccgtggggaagaaagtgctctgctgctctgctctcatatccgctgggatgcccacaactgtgaccacagcgaggatgccagtgtcctgtgccagccttcatgacccagcccgctctgcagaccacctcttcttctgggagctgtgacctcccttcctcctccaggaagccctcctcttgtgatgactacagttcactttgcccctccttcccttgcctgggagagagcctacctagacagtgcagtcctgcttgggggagcctggctgtacccccgtccacttactgcgtgacctcagcctgtcatcgactgttgtgagcccaattcagtgaaagctcctgtggttttgctcagccaaaaccaaaacgaggggaagaggatgattcctaactcttctgtttggtggggctctttttatagcaccagactctgccttccttgacctagatccaggaggctcaggggctctttaaatggggtatctcctcttcccccaacccatcttgggatccccaagaagagggaaggcaggaggggcctacagctcctaccttgggccctcaggggctgcagaggaacctgggtccctgtcctgccctgctccgcgagggcctggactaactcagatggtgctcggctggacaaggggactgggggaggggccaaagcagggacagtggcccctccctgcagctggaaccagcatctctgatttatgccgtctccaccacagagcctccactttgcaggagtgaagaaccctgggggcctgtagccaccagttcataggtgccaagtcaataaagcattgtcccccgtctcttataactgcag

SEQ ID NO: 293372 - DNA, 2000 bp, Homo sapiens
gctgtatcaaaaaaaaaaaaaaaaattagctgggcatggtgggtcgcaccagtcctagcactttggaataccgaggcaggaggatcacttgaggccagaagttctaggctgcagtgagctatgatcgcaccactgcactccagcctgggcgacagagcaagaccctgtctcgaaattaaaaaaacttttttttcaatgggatgatgctgagattgggaattgagagaccttatgagggggtcgattgagatgaaggttgagtcaaggttagcagtgcaattgggaattaggataggaactatccctgggcctgaagttagggtaatacctagaattagctttcggttcattcaaccaagtttcccggagatcccaacccgcgcccagacaacgtggtgactctggggttgcagctgagtgggggtacgggtgtggtagggttgggggtcttggtaggcgtccccgtgccctgctgcaggacagaaggcctcctcgtccccttcgaacgccctagatgccctgtctccacagctacaggagttggcccccagccttcccgggagacagcactgctcaccaccgccgcctgggccgcggggaagaaaagtgggcggctgcgactggtgggcggcccgggtccgtgccgcggccgcgtggaggtgttgcacgccgggggctggggcaccgtgtgcgacgatgactgggactttgcggacgcgcgcgtggcctgccgcgaagcgggctgcgggcctgcgctgggcgctacgggacgaggctcgcctgagcgactgcttccacctgggctggggccagcacaactgcggccaccacgaggacgcgggagcgctctgcgcaggtgaggctgacagcgaaggcccagaggagctgggactgcaagtccagcaggatggttctgagaccacgcgggtgcccactcctcggcccagggacgggcatctacgtctggtcaatggagcccaccgatgcgagggacgtgtagagctctacctagggcaacggtggggcactgtctgtgatgatgcttgggacctgcgggcagccggtgtcctgtgccgccagctgggctgtggccaggccctcgcagcccctggcgaggctcactttggcccaggccgaggccccattctcctggacaatgtcaagtgccgtggggaagaaagtgctctgctgctctgctctcatatccgctgggatgcccacaactgtgaccacagcgaggatgccagtgtcctgtgccagccttcatgacccagcccgctctgcagaccacctcttcttctgggagctgtgacctcccttcctcctccaggaagccctcctcttgtgatgactacagttcactttgcccctccttcccttgcctgggagagagcctacctagacagtgcagtcctgcttgggggagcctggctgtacccccgtccacttactgcgtgacctcagcctgtcatcgactgttgtgagcccaattcagtgaaagctcctgtggttttgctcagccaaaaccaaaacgaggggaagaggatgattcctaactcttctgtttggtggggctctttttatagcaccagactctgccttccttgacctagatccaggaggctcaggggctctttaaatggggtatctcctcttcccccaacccatcttgggatccccaagaagagggaaggcaggaggggcctacagctcctaccttgggccctcaggggctgcagaggaacctgggtccctgtcctgccctgctccgcgagggcctggactaactcagatggtgctcggctggacaaggggactgggggaggggccaaagcagggacagtggcccctccctgcagctggaaccagcatctctgatttatgccgtctccaccacagagcctccactttgcaggagtgaagaaccctgggggcctgtagccaccagttcataggtgccaagtcaataaagcattgtcccccgtctcttataactgcag

SEQ ID NO: 293373 - DNA, 1472 bp, Homo sapiens
gcacctcctacgacactgccgaatggaaaaagtgagggcagcgtacgcctggtagggggcgcgaacctgtgtcagggccgagtggagatcctgcacagtggcctgtggggcaccgtgtgtgacgacgactgggggctgccggatgccgctgtggtctgtcgtcagctgggctgcggggcggccatggccgccaccaccaacgccttcttcggctatggcaccggacacatcctgctggacaacgtgcactgcgaaggcggcgagccccgcctggcagcctgccagagcctgggctggggtgtgcacaactgcggccaccacgaggacgcgggcgcgctctgcgcaggcccagaggagctgggactgcaagtccagcaggatggttctgagaccacgcgggtgcccactcctcggcccagggacgggcatctacgtctggtcaatggagcccaccgatgcgagggacgtgtagagctctacctagggcaacggtggggcactgtctgtgatgatgcttgggacctgcgggcagccggtgtcctgtgccgccagctgggctgtggccaggccctcgcagcccctggcgaggctcactttggcccaggccgaggccccattctcctggacaatgtcaagtgccgtggggaagaaagtgctctgctgctctgctctcatatccgctgggatgcccacaactgtgaccacagcgaggatgccagtgtcctgtgccagccttcatgacccagcccgctctgcagaccacctcttcttctgggagctgtgacctcccttcctcctccaggaagccctcctcttgtgatgactacagttcactttgcccctccttcccttgcctgggagagagcctacctagacagtgcagtcctgcttgggggagcctggctgtacccccgtccacttactgcgtgacctcagcctgtcatcgactgttgtgagcccaattcagtgaaagctcctgtggttttgctcagccaaaaccaaaacgaggggaagaggatgattcctaactcttctgtttggtggggctctttttatagcaccagactctgccttccttgacctagatccaggaggctcaggggctctttaaatggggtatctcctcttcccccaacccatcttgggatccccaagaagagggaaggcaggaggggcctacagctcctaccttgggccctcaggggctgcagaggaacctgggtccctgtcctgccctgctccgcgagggcctggactaactcagatggtgctcggctggacaaggggactgggggaggggccaaagcagggacagtggcccctccctgcagctggaaccagcatctctgatttatgccgtctccaccacagagcctccactttgcaggagtgaagaaccctgggggcctgtagccaccagttcataggtgccaagtcaataaagcattgtcccccgtctcttataactgcag

SEQ ID NO: 293374 - DNA, 301 bp, Homo sapiens
gtgcgacgatgactgggactttgcggacgcgcgcgtggcctgccgcgaagcgggctgcgggcctgcgctgggcgctacgggactgggccacttcggctacggccgcggccccgtgctgctggacaacgtgggctgcgccggcaccgaggctcgcctgagcgactgcttccacctgggctggggccagcacaactgcggccaccacgaggacgcgggagcgctctgcgcaggtgaggctgacagcgaaggtgaggctgacagcggggccgcgcactgcggcgtgggaggggcggggcggcgc

SEQ ID NO: 293375 - DNA, 1762 bp, Homo sapiens
ctcaaatacacatcaccaaacaaattttctctattatttgggctgagtcatcactagagagtgggaaggggcagcagcagagaatccaaaccctaaagctgatatcacaaagtaccatttctccaagttgggggctcagaggggagtcatcatgagcgatgttaccattgtgaaagaaggttgggttcagaagaggggagaatatataaaaaactggaggccaagatacttccttttgaagacagatggctcattcataggatataaagagaaacctcaagatgtggatttaccttatcccctcaacaacttttcagtggcaaaatgccagttaatgaaaacagaacgaccaaagccaaacacatttataatcagatgtctccagtggactactgttatagagagaacatttcatgtagatactccagaggaaagggaagaatggacagaagctatccaggctgtagcagacagactgcagaggcaagaagaggagagaatgaattgtagtccaacttcacaaattgataatataggagaggaagagatggatgcctctacaacccatcataaaagaaagacaatgaatgattttgactatttgaaactactaggtaaaggcacttttgggaaagttattttggttcgagagaaggcaagtggaaaatactatgctatgaagattctgaagaaagaagtcattattgcaaaggatgaagtggcacacactctaactgaaagcagagtattaaagaacactagacatccctttttaacatccttgaaatattccttccagacaaaagaccgtttgtgttttgtgatggaatatgttaatgggggcgagctgtttttccatttgtcgagagagcgggtgttctctgaggaccgcacacgtttctatggtgcagaaattgtctctgccttggactatctacattccggaaagattgtgtaccgtgatctcaagttggagaatctaatgctggacaaagatggccacataaaaattacagattttggactttgcaaagaagggatcacagatgcagccaccatgaagacattctgtggcactccagaatatctggcaccagaggtgttagaagataatgactatggccgagcagtagactggtggggcctaggggttgtcatgtatgaaatgatgtgtgggaggttacctttctacaaccaggaccatgagaaactttttgaattaatattaatggaagacattaaatttcctcgaacactctcttcagatgcaaaatcattgctttcagggctcttgataaaggatccaaataaacgccttggtggaggaccagatgatgcaaaagaaattatgagacacagtttcttctctggagtaaactggcaagatgtatatgataaaaagcttgtacctccttttaaacctcaagtaacatctgagacagatactagatattttgatgaagaatttacagctcagactattacaataacaccacctgaaaaatgtcagcaatcagattgtggcatgctgggtaactggaaaaaataataaaaagtaagtttcaatagctcatgttcttcaatgttatttgtcttctcatttgctggtttagtcaccttttatgatgaaaactgttgttggagaaaaaaacctgttgctaaaaatgtggaaattatatgaaaagtttgtgcctcatcttgtccacatcaaagcccttcacatatgaaataaggttaactggtttaatgggttaaatttgaa

SEQ ID NO: 293376 - DNA, 1268 bp, Homo sapiens
aaaatttaacttttcatgtaaatgattttaactcgagttttcaacaatttttttcttctctttttttctttaacatacttccaaaaaatgctactacagactttaggcatgtggtgaatgaaatgctcttaggattattttcactttggggtgatggtgagagtgtatgcttatctgtgttgagtgtgtttgatctctgaatagattttatttgtattgatttcatagtttataaaaggaaaatatttaaatcatttaccatcttctattaatgggaaattttactcatttttatagggaagaatggacagaagctatccaggctgtagcagacagactgcagaggcaagaagaggagagaatgaattgtagtccaacttcacaaattgataatataggagaggaagagatggatgcctctacaacccatcataaaagaaagacaatgaatgattttgactatttgaaactactaggtaaaggcacttttgggaaagttattttggttcgagagaaggcaagtggaaaatactatgctatgaagattctgaagaaagaagtcattattgcaaaggatgaagtggcacacactctaactgaaagcagagtattaaagaacactagacatccctttttaacatccttgaaatattccttccagacaaaagaccgtttgtgttttgtgatggaatatgttaatgggggcgagatggagtttcgctctgtcgtcaggctggagtgcagcagcacaatctaagcttactaccacctctgcctcccgggttcaagcgattctcctgcctcagccccccgagtagttgagactacaggcgcgcaccgccacacccagctaatttttgtatttttagtagagatggggtttcaccatgttggccaggatggtctcgatctcctgaccttgtgatccgtctgcctcagcctcccaaagtgctgggattacaggcgtgagccaccacgccgggcctaccatgactatatttaagagactgacaatattttggagataaatttaatatttttattagcacatttcactcattcctttattccttctcctttctcttccttggttttgatcacagtcaatgtgagggaaaagtaaatttactggaaaagctaactggaaatatttttattgtgggctttctgaaataaatttaattattaaatagggtcttgtttgtgtctcatgaacttaaaatattcttattttccaaaataaataattaaatatcctttatggaatt

SEQ ID NO: 293377 - DNA, 7504 bp, Homo sapiens
gatgtgtgggaggttacctttctacaaccaggaccatgagaaactttttgaattaatattaatggaagacattaaatttcctcgaacactctcttcagatgcaaaatcattgctttcagggctcttgataaaggatccaaataaacgccttggtggaggaccagatgatgcaaaagaaattatgagacacagtttcttctctggagtaaactggcaagatgtatatgataaaaaggctgagtcatcactagagagtgggaaggggcagcagcagagaatccaaaccctaaagctgatatcacaaagtaccatttctccaagttgggggctcagaggggagtcatcatgagcgatgttaccattgtgaaagaaggttgggttcagaagaggggagaatatataaaaaactggaggccaagatacttccttttgaagacagatggctcattcataggatataaagagaaacctcaagatgtggatttaccttatcccctcaacaacttttcagtggcaaaatgccagttaatgaaaacagaacgaccaaagccaaacacatttataatcagatgtctccagtggactactgttatagagagaacatttcatgtagatactccagaggaaagggaagaatggacagaagctatccaggctgtagcagacagactgcagaggcaagaagaggagagaatgaattgtagtccaacttcacaaattgataatataggagaggaagagatggatgcctctacaacccatcataaaagaaagacaatgaatgattttgactatttgaaactactaggtaaaggcacttttgggaaagttattttggttcgagagaaggcaagtggaaaatactatgctatgaagattctgaagaaagaagtcattattgcaaaggatgaagtggcacacactctaactgaaagcagagtattaaagaacactagacatccctttttaacatccttgaaatattccttccagacaaaagaccgtttgtgttttgtgatggaatatgttaatgggggcgagctgtttttccatttgtcgagagagcgggtgttctctgaggaccgcacacgtttctatggtgcagaaattgtctctgccttggactatctacattccggaaagattgtgtaccgtgatctcaagttggagaatctaatgctggacaaagatggccacataaaaattacagattttggactttgcaaagaagggatcacagatgcagccaccatgaagacattctgtggcactccagaatatctggcaccagaggtgttagaagataatgactatggccgagcagtagactggtggggcctaggggttgtcatgtatgaaatgatgtgtgggaggttacctttctacaaccaggaccatgagaaactttttgaattaatattaatggaagacattaaatttcctcgaacactctcttcagatgcaaaatcattgctttcagggctcttgataaaggatccaaataaacgccttggtggaggaccagatgatgcaaaagaaattatgagacacagtttcttctctggagtaaactggcaagatgtatatgataaaaagcttgtacctccttttaaacctcaagtaacatctgagacagatactagatattttgatgaagaatttacagctcagactattacaataacaccacctgaaaaatatgatgaggatggtatggactgcatggacaatgagaggcggccgcatttccctcaattttcctactctgcaagtggacgagaataagtctctttcattctgctacttcactgtcatcttcaatttattactgaaaatgattcctggacatcaccagtcctagctcttacacatagcaggggcaccttccgacatcccagaccagccaagggtcctcacccctcgccacctttcaccctcatgaaaacacacatacacgcaaatacactccagtttttgtttttgcatgaaattgtatctcagtctaaggtctcatgctgttgctgctactgtcttactattatagcaactttaagaagtaattttccaacctttggaagtcatgagcccaccattgttcatttgtgcaccaattatcatcttttgatcttttagtttttccctcagtgaaggctaaatgagatacactgattctaggtacattttttaactttctagaagagaaaaactaactagactaagaagatttagtttataaattcagaacaagcaattgtggaagggtggtggcgtgcatatgtaaagcacatcagatccgtgcgtgaagtaggcatatatcactaagctgtggctggaattgattaggaagcatttggtagaaggactgaacaactgttgggatatatatatatatatataattttttttttttaaattcctggtggatactgtagaagcagcccatatcacatgtggatgtcgagacttcacgggcaatcatgagcaagtgaacactgttctaccaagaactgaaggcatatgcacagtcaaggtcacttaaagggtcttatgaaacaatttgagccagagagcatctttcccctgtgcttggaaaccttttttccttcttgacatttatcacctctgatggctgaagaatgtagacaggtataatgatactgcttttcaccaaaatttctacaccaaggtaaacaggtgtttgccttatttaattttttactttcagttctacgtgaattagctttttctcagatgttgaaactttgaatgtccttttatgattttgtttatattgcagtagtatttattttttagtgatgagaattgtatgtcatgttagcaaacgcagctccaacttatataaaatagacttactgcagttacttttgacccatgtgcaaggattgtacacgctgatgagaatcatgcactttttctcctctgttaaaaaaaatgataaggctctgaaatggaatatattggttagaatttggctttgggagaagagatgctgccatttaaccccttggtactgaaaatgagaaaatccccaactatgcatgccaaggggttaatgaaacaaatagctgttgacgtttgctcatttaagaatttgaaacgttatgatgacctggcaacaaaaagtaatgaagaaaattgagacctgagtgaagataagaaatgatctttacgtggcaaaatgaacacatcttgagtatttaggaaatgggcagtgaaggctaagaacctggtgtgtttcttgggatcatggtacatttatcactgaattaagccatcagggaaaaaacaacaaaaaaagagaacacctccagcttttctttttctgtatatactcatgtcccccagattccaacatttctcactgaaagggggcatgtatgcaaacctcatctttctccttcattaatgatgatcttcagattaaaccctttggtgctaggagctgacaatttccaaagcagcctgtgaagtcctaggggctgggggccactcttgcggcaagcagaaggccatcctactccgcggagtgatcatggaaatgtattttagttaaactctgacagctcccaaacggaagactacagcatgacgtagtattatgattgcattgtatgaaagagcaagtgactttctaagtaggatgaatcatattcatatgcagatgtcttagcctcttgacgctggaagtgtggatttatagctatgaaaccactgctggcagtgggtgggccactgggactgacgggggttaaagggcattttactaaggcagctaagacatattcagacatcaacgttatccttctttttcatatttctacctgagtgaagttcatccttagtattgagtaggaagttacagtaaatggtagttcattcttacttacacacatagctaatcttttttttttcacttggaattatgttgaatgtttcattttgacaaaaaagtagactagaaggtatgttctttaagttgtcttgcatccattatataagaaagaaacaggtgagaggaagagcagaaagctgagactggctgatgttcagagcacttactcctctagagggaaagcatgacaccgaacactaagcacacagctttttgttgttttggttttttctcccgcaaatcttaaagtgattcccatgaccttggccaaggacacttcttaaagattaatgactggcactgacattgccccaggcgggccactcctcacactggctctcagttcccagccatgcctggggctcagtcacttctattccaccctctgagactccattggtgtcacacaaggtgtcttcttggctttgattttgagaatcccctattttcacttccagatctgtcagctgccatggaggaataatagaaaaccagaaatgcgtgtagagggagatttctaaaacttcccttgtgtcgcccatagttgtagttttgggttctggcaggtggaacaccctgaaacctggaatcattctatgagaatacagttcagactttgcagactccagcccatactaactgtcatgaagcttgacttcttgtcataatgcagccatcttggaggaaattggccatttctgcttagatggttggcagggtcgcgctcagctttgctttctacactaattacatagcattattcaagtattgttttccatttcccatccctgatttccagcttcttaaagctgactgttcttgcaggggccacttgcttctcctagagtacaaaagtaagggccttccttactaactgcagggtctctctattacacctcaacatacacactttgctgctactgtttgtactgtctacagtagaatttccttatcttgctcctggtagtgcattacaggcaagcatgaaatgtaaagtatttatttaaataaaaagaaaacctctaaattggtaattgaattacctccctgtagctttatagtttgtgacatttcttgaccttgctagttctttcattagatctgcgcaagatctagtcatctggttaaggattttaagcagatgcaactataaacccaagaaactgtattactattactgttggtcatactaaacctgtctatttcctgaagtatatgacccacaaggatgtggaataactaggagaaactgtttttgtacactgtacatccttagtatttttacacgtatatgatagggatgaacatgattttccttcgtacagacagcttaaataaagcactatgtcaatctgctacttctctgtttattgttgttggatgtggttctataatccccccaaattaaatcttctttaatgaaaacatgatttttaatagccccagctggtattaacctaccttgtataaaatgtgacaggaaaatatagaaataattccttgtagctcacacacacacacataggggatcatttttacttcagtgaaatggcagtagtgcggttgtgcaaactttgatgaacggctgcttctgaggggaaacgctgacctctcagcactggatttaggatggatgtactgtgaagccagggatgaaggaggtctcagaccctggggacattcagacccgaatcatctatacaacacacggtttggacccagaatctgaaggaatgtagcttttcattaacgtcttcctgataatgtactgctctgcatatttcctttcttagagtgtatttctaacaacatgtcatggcaaattaacaaacttagacgtgggtgatgtagatgggtaggatggctggactgcagtctgacttcacgttgaatcattctggatggggcctttttctgattttacctcataaagctactattgtagaaacttggctttgctcctgtgacgaagccagacagaggaatggcttttgggaccagagtgagtcaagcatgtatgtgtatgtcacacggccaaatttgagggcattctcacatgtgctcttctctcaaaaccactggggttgacagatccaggaggctaaaaaaaagtgacctctataattctttaaaggtgctatttttagaatattgtataatttattcacagtatatctaaaacagaattaaggacaattaaaatatcttatgtgacagcctttatgtctagcacatttgatgaaataaaaaacttctgaatctgaatagaagttctactgtttcaggcttgaaccttttacatgctcaagagattcaaatggtctctgtgtgtagatcatgccaccgcctccaaagcctaatccacatcacttctgagaggcaaggctgagcatatggtgacatcagctctgtgttgagatggtgatgaggatgatggctcgctggccaggcagggcagccgaaggtcagggacctgtcctaactaactgcagccttgcctttagtgtttgtcattctcagatacaacacggtatgtccagtgtccgtttttattactttaaagcatttgagggcttaattgtgtatagtagaaatactattttagacaaataattatctgtgtacagatatttgatatactctaagtaaattttctaatttcactaagtacgtttttaggctcctctcaaatactgcgtattgaagaaaaaaatctgacaccaccgagccaaagatgcttttttgtctgttttcgttgtttaacagaatggaaagagtaatgcatagtgcttcctggtgtctcctgattgattgattgtgcacaaagtaggacgataaataaataaaatggagtctgatgggacattgattaaaggtgaaggatgattgatatatagatcatgaaaagaaaaatgaatggcaggaaaaaaagtttggtccttaatatactttggcctagttaaaatatgtgcctttttggtgtgttttgttcatcactacaagataaaaaggaaacattacaactcaagtctttaaaaagttcatttattgaaaatcatatgtataacctagcatacgaatgagcagatttaaacacataacttcaagccatttctgaaaacatacaccaggagctctgctcagctagagtcagactccagctccagcccgactgcgtgcggggacagcgcccgcgttgatgaggaccagccccactgcaggctgaggcggtgtcaccctgggaaggtcgtggtgcgttgtggcatattaagtctaaaccagatgaatgtaaatatctctttgtaaatcatttatttcactctgttccatccaggtcagcaatcagattgtggcatgctgggtaactggaaaaaataataaaaagtaagtttcaatagctcatgttcttcaatgttatttgtcttctcatttgctggtttagtcaccttttatgatgaaaactgttgttggagaaaaaaacctgttgctaaaaatgtggaaattatatgaaaagtttgtgcctcatcttgtccacatcaaagcccttcacatatgaaataaggttaactggtttaatgggttaaatttgaa

SEQ ID NO: 293378 - DNA, 7446 bp, Homo sapiens
gatgtgtgggaggttacctttctacaaccaggaccatgagaaactttttgaattaatattaatggaagacattaaatttcctcgaacactctcttcagatgcaaaatcattgctttcagggctcttgataaaggatccaaataaacgccttggtggaggaccagatgatgcaaaagaaattatgagacacagtttcttctctggagtaaactggcaagatgtatatgataaaaaggctgagtcatcactagagagtgggaaggggcagcagcagagaatccaaaccctaaagctgatatcacaaagtaccatttctccaagttgggggctcagaggggagtcatcatgagcgatgttaccattgtgaaagaaggttgggttcagaagaggggagaatatataaaaaactggaggccaagatacttccttttgaagacagatggctcattcataggatataaagagaaacctcaagatgtggatttaccttatcccctcaacaacttttcagtggcaaaatgccagttaatgaaaacagaacgaccaaagccaaacacatttataatcagatgtctccagtggactactgttatagagagaacatttcatgtagatactccagaggaaagggaagaatggacagaagctatccaggctgtagcagacagactgcagaggcaagaagaggagagaatgaattgtagtccaacttcacaaattgataatataggagaggaagagatggatgcctctacaacccatcataaaagaaagacaatgaatgattttgactatttgaaactactaggtaaaggcacttttgggaaagttattttggttcgagagaaggcaagtggaaaatactatgctatgaagattctgaagaaagaagtcattattgcaaaggatgaagtggcacacactctaactgaaagcagagtattaaagaacactagacatccctttttaacatccttgaaatattccttccagacaaaagaccgtttgtgttttgtgatggaatatgttaatgggggcgagctgtttttccatttgtcgagagagcgggtgttctctgaggaccgcacacgtttctatggtgcagaaattgtctctgccttggactatctacattccggaaagattgtgtaccgtgatctcaagttggagaatctaatgctggacaaagatggccacataaaaattacagattttggactttgcaaagaagggatcacagatgcagccaccatgaagacattctgtggcactccagaatatctggcaccagaggtgttagaagataatgactatggccgagcagtagactggtggggcctaggggttgtcatgtatgaaatgatgtgtgggaggttacctttctacaaccaggaccatgagaaactttttgaattaatattaatggaagacattaaatttcctcgaacactctcttcagatgcaaaatcattgctttcagggctcttgataaaggatccaaataaacgccttggtggaggaccagatgatgcaaaagaaattatgagacacagtttcttctctggagtaaactggcaagatgtatatgataaaaagcttgtacctccttttaaacctcaagtaacatctgagacagatactagatattttgatgaagaatttacagctcagactattacaataacaccacctgaaaaatatgatgaggatggtatggactgcatggacaatgagaggcggccgcatttccctcaattttcctactctgcaagtggacgagaataagtctctttcattctgctacttcactgtcatcttcaatttattactgaaaatgattcctggacatcaccagtcctagctcttacacatagcaggggcaccttccgacatcccagaccagccaagggtcctcacccctcgccacctttcaccctcatgaaaacacacatacacgcaaatacactccagtttttgtttttgcatgaaattgtatctcagtctaaggtctcatgctgttgctgctactgtcttactattatagcaactttaagaagtaattttccaacctttggaagtcatgagcccaccattgttcatttgtgcaccaattatcatcttttgatcttttagtttttccctcagtgaaggctaaatgagatacactgattctaggtacattttttaactttctagaagagaaaaactaactagactaagaagatttagtttataaattcagaacaagcaattgtggaagggtggtggcgtgcatatgtaaagcacatcagatccgtgcgtgaagtaggcatatatcactaagctgtggctggaattgattaggaagcatttggtagaaggactgaacaactgttgggatatatatatatatatataattttttttttttaaattcctggtggatactgtagaagcagcccatatcacatgtggatgtcgagacttcacgggcaatcatgagcaagtgaacactgttctaccaagaactgaaggcatatgcacagtcaaggtcacttaaagggtcttatgaaacaatttgagccagagagcatctttcccctgtgcttggaaaccttttttccttcttgacatttatcacctctgatggctgaagaatgtagacaggtataatgatactgcttttcaccaaaatttctacaccaaggtaaacaggtgtttgccttatttaattttttactttcagttctacgtgaattagctttttctcagatgttgaaactttgaatgtccttttatgattttgtttatattgcagtagtatttattttttagtgatgagaattgtatgtcatgttagcaaacgcagctccaacttatataaaatagacttactgcagttacttttgacccatgtgcaaggattgtacacgctgatgagaatcatgcactttttctcctctgttaaaaaaaatgataaggctctgaaatggaatatattggttagaatttggctttgggagaagagatgctgccatttaaccccttggtactgaaaatgagaaaatccccaactatgcatgccaaggggttaatgaaacaaatagctgttgacgtttgctcatttaagaatttgaaacgttatgatgacctggcaacaaaaagtaatgaagaaaattgagacctgagtgaagataagaaatgatctttacgtggcaaaatgaacacatcttgagtatttaggaaatgggcagtgaaggctaagaacctggtgtgtttcttgggatcatggtacatttatcactgaattaagccatcagggaaaaaacaacaaaaaaagagaacacctccagcttttctttttctgtatatactcatgtcccccagattccaacatttctcactgaaagggggcatgtatgcaaacctcatctttctccttcattaatgatgatcttcagattaaaccctttggtgctaggagctgacaatttccaaagcagcctgtgaagtcctaggggctgggggccactcttgcggcaagcagaaggccatcctactccgcggagtgatcatggaaatgtattttagttaaactctgacagctcccaaacggaagactacagcatgacgtagtattatgattgcattgtatgaaagagcaagtgactttctaagtaggatgaatcatattcatatgcagatgtcttagcctcttgacgctggaagtgtggatttatagctatgaaaccactgctggcagtgggtgggccactgggactgacgggggttaaagggcattttactaaggcagctaagacatattcagacatcaacgttatccttctttttcatatttctacctgagtgaagttcatccttagtattgagtaggaagttacagtaaatggtagttcattcttacttacacacatagctaatcttttttttttcacttggaattatgttgaatgtttcattttgacaaaaaagtagactagaaggtatgttctttaagttgtcttgcatccattatataagaaagaaacaggtgagaggaagagcagaaagctgagactggctgatgttcagagcacttactcctctagagggaaagcatgacaccgaacactaagcacacagctttttgttgttttggttttttctcccgcaaatcttaaagtgattcccatgaccttggccaaggacacttcttaaagattaatgactggcactgacattgccccaggcgggccactcctcacactggctctcagttcccagccatgcctggggctcagtcacttctattccaccctctgagactccattggtgtcacacaaggtgtcttcttggctttgattttgagaatcccctattttcacttccagatctgtcagctgccatggaggaataatagaaaaccagaaatgcgtgtagagggagatttctaaaacttcccttgtgtcgcccatagttgtagttttgggttctggcaggtggaacaccctgaaacctggaatcattctatgagaatacagttcagactttgcagactccagcccatactaactgtcatgaagcttgacttcttgtcataatgcagccatcttggaggaaattggccatttctgcttagatggttggcagggtcgcgctcagctttgctttctacactaattacatagcattattcaagtattgttttccatttcccatccctgatttccagcttcttaaagctgactgttcttgcaggggccacttgcttctcctagagtacaaaagtaagggccttccttactaactgcagggtctctctattacacctcaacatacacactttgctgctactgtttgtactgtctacagtagaatttccttatcttgctcctggtagtgcattacaggcaagcatgaaatgtaaagtatttatttaaataaaaagaaaacctctaaattggtaattgaattacctccctgtagctttatagtttgtgacatttcttgaccttgctagttctttcattagatctgcgcaagatctagtcatctggttaaggattttaagcagatgcaactataaacccaagaaactgtattactattactgttggtcatactaaacctgtctatttcctgaagtatatgacccacaaggatgtggaataactaggagaaactgtttttgtacactgtacatccttagtatttttacacgtatatgatagggatgaacatgattttccttcgtacagacagcttaaataaagcactatgtcaatctgctacttctctgtttattgttgttggatgtggttctataatccccccaaattaaatcttctttaatgaaaacatgatttttaatagccccagctggtattaacctaccttgtataaaatgtgacaggaaaatatagaaataattccttgtagctcacacacacacacataggggatcatttttacttcagtgaaatggcagtagtgcggttgtgcaaactttgatgaacggctgcttctgaggggaaacgctgacctctcagcactggatttaggatggatgtactgtgaagccagggatgaaggaggtctcagaccctggggacattcagacccgaatcatctatacaacacacggtttggacccagaatctgaaggaatgtagcttttcattaacgtcttcctgataatgtactgctctgcatatttcctttcttagagtgtatttctaacaacatgtcatggcaaattaacaaacttagacgtgggtgatgtagatgggtaggatggctggactgcagtctgacttcacgttgaatcattctggatggggcctttttctgattttacctcataaagctactattgtagaaacttggctttgctcctgtgacgaagccagacagaggaatggcttttgggaccagagtgagtcaagcatgtatgtgtatgtcacacggccaaatttgagggcattctcacatgtgctcttctctcaaaaccactggggttgacagatccaggaggtttattcacagtatatctaaaacagaattaaggacaattaaaatatcttatgtgacagcctttatgtctagcacatttgatgaaataaaaaacttctgaatctgaatagaagttctactgtttcaggcttgaaccttttacatgctcaagagattcaaatggtctctgtgtgtagatcatgccaccgcctccaaagcctaatccacatcacttctgagaggcaaggctgagcatatggtgacatcagctctgtgttgagatggtgatgaggatgatggctcgctggccaggcagggcagccgaaggtcagggacctgtcctaactaactgcagccttgcctttagtgtttgtcattctcagatacaacacggtatgtccagtgtccgtttttattactttaaagcatttgagggcttaattgtgtatagtagaaatactattttagacaaataattatctgtgtacagatatttgatatactctaagtaaattttctaatttcactaagtacgtttttaggctcctctcaaatactgcgtattgaagaaaaaaatctgacaccaccgagccaaagatgcttttttgtctgttttcgttgtttaacagaatggaaagagtaatgcatagtgcttcctggtgtctcctgattgattgattgtgcacaaagtaggacgataaataaataaaatggagtctgatgggacattgattaaaggtgaaggatgattgatatatagatcatgaaaagaaaaatgaatggcaggaaaaaaagtttggtccttaatatactttggcctagttaaaatatgtgcctttttggtgtgttttgttcatcactacaagataaaaaggaaacattacaactcaagtctttaaaaagttcatttattgaaaatcatatgtataacctagcatacgaatgagcagatttaaacacataacttcaagccatttctgaaaacatacaccaggagctctgctcagctagagtcagactccagctccagcccgactgcgtgcggggacagcgcccgcgttgatgaggaccagccccactgcaggctgaggcggtgtcaccctgggaaggtcgtggtgcgttgtggcatattaagtctaaaccagatgaatgtaaatatctctttgtaaatcatttatttcactctgttccatccaggtcagcaatcagattgtggcatgctgggtaactggaaaaaataataaaaagtaagtttcaatagctcatgttcttcaatgttatttgtcttctcatttgctggtttagtcaccttttatgatgaaaactgttgttggagaaaaaaacctgttgctaaaaatgtggaaattatatgaaaagtttgtgcctcatcttgtccacatcaaagcccttcacatatgaaataaggttaactggtttaatgggttaaatttgaa

SEQ ID NO: 293379 - DNA, 7450 bp, Homo sapiens
gatgtgtgggaggttacctttctacaaccaggaccatgagaaactttttgaattaatattaatggaagacattaaatttcctcgaacactctcttcagatgcaaaatcattgctttcagggctcttgataaaggatccaaataaacgccttggtggaggaccagatgatgcaaaagaaattatgagacacagtttcttctctggagtaaactggcaagatgtatatgataaaaaggctgagtcatcactagagagtgggaaggggcagcagcagagaatccaaaccctaaagctgatatcacaaagtaccatttctccaagttgggggctcagaggggagtcatcatgagcgatgttaccattgtgaaagaaggttgggttcagaagaggggagaatatataaaaaactggaggccaagatacttccttttgaagacagatggctcattcataggatataaagagaaacctcaagatgtggatttaccttatcccctcaacaacttttcagtggcaaaatgccagttaatgaaaacagaacgaccaaagccaaacacatttataatcagatgtctccagtggactactgttatagagagaacatttcatgtagatactccagaggaaagggaagaatggacagaagctatccaggctgtagcagacagactgcagaggcaagaagaggagagaatgaattgtagtccaacttcacaaattgataatataggagaggaagagatggatgcctctacaacccatcataaaagaaagacaatgaatgattttgactatttgaaactactaggtaaaggcacttttgggaaagttattttggttcgagagaaggcaagtggaaaatactatgctatgaagattctgaagaaagaagtcattattgcaaaggatgaagtggcacacactctaactgaaagcagagtattaaagaacactagacatccctttttaacatccttgaaatattccttccagacaaaagaccgtttgtgttttgtgatggaatatgttaatgggggcgagctgtttttccatttgtcgagagagcgggtgttctctgaggaccgcacacgtttctatggtgcagaaattgtctctgccttggactatctacattccggaaagattgtgtaccgtgatctcaagttggagaatctaatgctggacaaagatggccacataaaaattacagattttggactttgcaaagaagggatcacagatgcagccaccatgaagacattctgtggcactccagaatatctggcaccagaggtgttagaagataatgactatggccgagcagtagactggtggggcctaggggttgtcatgtatgaaatgatgtgtgggaggttacctttctacaaccaggaccatgagaaactttttgaattaatattaatggaagacattaaatttcctcgaacactctcttcagatgcaaaatcattgctttcagggctcttgataaaggatccaaataaacgccttggtggaggaccagatgatgcaaaagaaattatgagacacagtttcttctctggagtaaactggcaagatgtatatgataaaaagcttgtacctccttttaaacctcaagtaacatctgagacagatactagatattttgatgaagaatttacagctcagactattacaataacaccacctgaaaaatatgatgaggatggtatggactgcatggacaatgagaggcggccgcatttccctcaattttcctactctgcaagtggacgagaataagtctctttcattctgctacttcactgtcatcttcaatttattactgaaaatgattcctggacatcaccagtcctagctcttacacatagcaggggcaccttccgacatcccagaccagccaagggtcctcacccctcgccacctttcaccctcatgaaaacacacatacacgcaaatacactccagtttttgtttttgcatgaaattgtatctcagtctaaggtctcatgctgttgctgctactgtcttactattatagcaactttaagaagtaattttccaacctttggaagtcatgagcccaccattgttcatttgtgcaccaattatcatcttttgatcttttagtttttccctcagtgaaggctaaatgagatacactgattctaggtacattttttaactttctagaagagaaaaactaactagactaagaagatttagtttataaattcagaacaagcaattgtggaagggtggtggcgtgcatatgtaaagcacatcagatccgtgcgtgaagtaggcatatatcactaagctgtggctggaattgattaggaagcatttggtagaaggactgaacaactgttgggatatatatatatatatataattttttttttttaaattcctggtggatactgtagaagcagcccatatcacatgtggatgtcgagacttcacgggcaatcatgagcaagtgaacactgttctaccaagaactgaaggcatatgcacagtcaaggtcacttaaagggtcttatgaaacaatttgagccagagagcatctttcccctgtgcttggaaaccttttttccttcttgacatttatcacctctgatggctgaagaatgtagacaggtataatgatactgcttttcaccaaaatttctacaccaaggtaaacaggtgtttgccttatttaattttttactttcagttctacgtgaattagctttttctcagatgttgaaactttgaatgtccttttatgattttgtttatattgcagtagtatttattttttagtgatgagaattgtatgtcatgttagcaaacgcagctccaacttatataaaatagacttactgcagttacttttgacccatgtgcaaggattgtacacgctgatgagaatcatgcactttttctcctctgttaaaaaaaatgataaggctctgaaatggaatatattggttagaatttggctttgggagaagagatgctgccatttaaccccttggtactgaaaatgagaaaatccccaactatgcatgccaaggggttaatgaaacaaatagctgttgacgtttgctcatttaagaatttgaaacgttatgatgacctggcaacaaaaagtaatgaagaaaattgagacctgagtgaagataagaaatgatctttacgtggcaaaatgaacacatcttgagtatttaggaaatgggcagtgaaggctaagaacctggtgtgtttcttgggatcatggtacatttatcactgaattaagccatcagggaaaaaacaacaaaaaaagagaacacctccagcttttctttttctgtatatactcatgtcccccagattccaacatttctcactgaaagggggcatgtatgcaaacctcatctttctccttcattaatgatgatcttcagattaaaccctttggtgctaggagctgacaatttccaaagcagcctgtgaagtcctaggggctgggggccactcttgcggcaagcagaaggccatcctactccgcggagtgatcatggaaatgtattttagttaaactctgacagctcccaaacggaagactacagcatgacgtagtattatgattgcattgtatgaaagagcaagtgactttctaagtaggatgaatcatattcatatgcagatgtcttagcctcttgacgctggaagtgtggatttatagctatgaaaccactgctggcagtgggtgggccactgggactgacgggggttaaagggcattttactaaggcagctaagacatattcagacatcaacgttatccttctttttcatatttctacctgagtgaagttcatccttagtattgagtaggaagttacagtaaatggtagttcattcttacttacacacatagctaatcttttttttttcacttggaattatgttgaatgtttcattttgacaaaaaagtagactagaaggtatgttctttaagttgtcttgcatccattatataagaaagaaacaggtgagaggaagagcagaaagctgagactggctgatgttcagagcacttactcctctagagggaaagcatgacaccgaacactaagcacacagctttttgttgttttggttttttctcccgcaaatcttaaagtgattcccatgaccttggccaaggacacttcttaaagattaatgactggcactgacattgccccaggcgggccactcctcacactggctctcagttcccagccatgcctggggctcagtcacttctattccaccctctgagactccattggtgtcacacaaggtgtcttcttggctttgattttgagaatcccctattttcacttccagatctgtcagctgccatggaggaataatagaaaaccagaaatgcgtgtagagggagatttctaaaacttcccttgtgtcgcccatagttgtagttttgggttctggcaggtggaacaccctgaaacctggaatcattctatgagaatacagttcagactttgcagactccagcccatactaactgtcatgaagcttgacttcttgtcataatgcagccatcttggaggaaattggccatttctgcttagatggttggcagggtcgcgctcagctttgctttctacactaattacatagcattattcaagtattgttttccatttcccatccctgatttccagcttcttaaagctgactgttcttgcaggggccacttgcttctcctagagtacaaaagtaagggccttccttactaactgcagggtctctctattacacctcaacatacacactttgctgctactgtttgtactgtctacagtagaatttccttatcttgctcctggtagtgcattacaggcaagcatgaaatgtaaagtatttatttaaataaaaagaaaacctctaaattggtaattgaattacctccctgtagctttatagtttgtgacatttcttgaccttgctagttctttcattagatctgcgcaagatctagtcatctggttaaggattttaagcagatgcaactataaacccaagaaactgtattactattactgttggtcatactaaacctgtctatttcctgaagtatatgacccacaaggatgtggaataactaggagaaactgtttttgtacactgtacatccttagtatttttacacgtatatgatagggatgaacatgattttccttcgtacagacagcttaaataaagcactatgtcaatctgctacttctctgtttattgttgttggatgtggttctataatccccccaaattaaatcttctttaatgaaaacatgatttttaatagccccagctggtattaacctaccttgtataaaatgtgacaggaaaatatagaaataattccttgtagctcacacacacacacataggggatcatttttacttcagtgaaatggcagtagtgcggttgtgcaaactttgatgaacggctgcttctgaggggaaacgctgacctctcagcactggatttaggatggatgtactgtgaagccagggatgaaggaggtctcagaccctggggacattcagacccgaatcatctatacaacacacggtttggacccagaatctgaaggaatgtagcttttcattaacgtcttcctgataatgtactgctctgcatatttcctttcttagagtgtatttctaacaacatgtcatggcaaattaacaaacttagacgtgggtgatgtagatgggtaggatggctggactgcagtctgacttcacgttgaatcattctggatggggcctttttctgattttacctcataaagctactattgtagaaacttggctttgctcctgtgacgaagccagacagaggaatggcttttgggaccagagtgagtcaagcatgtatgtgtatgtcacacggccaaatttgagggcattctcacatgtgctcttctctcaaaaccactggggttgacagatccaggaggctaaaaaaaagtgacctctataattctttaaaggtgctatttttagaatattgtataatttattcacagtatatctaaaacagaattaaggacaattaaaatatcttatgtgacagcctttatgtctagcacatttgatgaaataatgctcaagagattcaaatggtctctgtgtgtagatcatgccaccgcctccaaagcctaatccacatcacttctgagaggcaaggctgagcatatggtgacatcagctctgtgttgagatggtgatgaggatgatggctcgctggccaggcagggcagccgaaggtcagggacctgtcctaactaactgcagccttgcctttagtgtttgtcattctcagatacaacacggtatgtccagtgtccgtttttattactttaaagcatttgagggcttaattgtgtatagtagaaatactattttagacaaataattatctgtgtacagatatttgatatactctaagtaaattttctaatttcactaagtacgtttttaggctcctctcaaatactgcgtattgaagaaaaaaatctgacaccaccgagccaaagatgcttttttgtctgttttcgttgtttaacagaatggaaagagtaatgcatagtgcttcctggtgtctcctgattgattgattgtgcacaaagtaggacgataaataaataaaatggagtctgatgggacattgattaaaggtgaaggatgattgatatatagatcatgaaaagaaaaatgaatggcaggaaaaaaagtttggtccttaatatactttggcctagttaaaatatgtgcctttttggtgtgttttgttcatcactacaagataaaaaggaaacattacaactcaagtctttaaaaagttcatttattgaaaatcatatgtataacctagcatacgaatgagcagatttaaacacataacttcaagccatttctgaaaacatacaccaggagctctgctcagctagagtcagactccagctccagcccgactgcgtgcggggacagcgcccgcgttgatgaggaccagccccactgcaggctgaggcggtgtcaccctgggaaggtcgtggtgcgttgtggcatattaagtctaaaccagatgaatgtaaatatctctttgtaaatcatttatttcactctgttccatccaggtcagcaatcagattgtggcatgctgggtaactggaaaaaataataaaaagtaagtttcaatagctcatgttcttcaatgttatttgtcttctcatttgctggtttagtcaccttttatgatgaaaactgttgttggagaaaaaaacctgttgctaaaaatgtggaaattatatgaaaagtttgtgcctcatcttgtccacatcaaagcccttcacatatgaaataaggttaactggtttaatgggttaaatttgaa

SEQ ID NO: 293380 - DNA, 5271 bp, Homo sapiens
gatgtgtgggaggttacctttctacaaccaggaccatgagaaactttttgaattaatattaatggaagacattaaatttcctcgaacactctcttcagatgcaaaatcattgctttcagggctcttgataaaggatccaaataaacgccttggtggaggaccagatgatgcaaaagaaattatgagacacagtttcttctctggagtaaactggcaagatgtatatgataaaaaggctgagtcatcactagagagtgggaaggggcagcagcagagaatccaaaccctaaagctgatatcacaaagtaccatttctccaagttgggggctcagaggggagtcatcatgagcgatgttaccattgtgaaagaaggttgggttcagaagaggggagaatatataaaaaactggaggccaagatacttccttttgaagacagatggctcattcataggatataaagagaaacctcaagatgtggatttaccttatcccctcaacaacttttcagtggcaaaatgccagttaatgaaaacagaacgaccaaagccaaacacatttataatcagatgtctccagtggactactgttatagagagaacatttcatgtagatactccagaggaaagggaagaatggacagaagctatccaggctgtagcagacagactgcagaggcaagaagaggagagaatgaattgtagtccaacttcacaaattgataatataggagaggaagagatggatgcctctacaacccatcataaaagaaagacaatgaatgattttgactatttgaaactactaggtaaaggcacttttgggaaagttattttggttcgagagaaggcaagtggaaaatactatgctatgaagattctgaagaaagaagtcattattgcaaaggatgaagtggcacacactctaactgaaagcagagtattaaagaacactagacatccctttttaacatccttgaaatattccttccagacaaaagaccgtttgtgttttgtgatggaatatgttaatgggggcgagctgtttttccatttgtcgagagagcgggtgttctctgaggaccgcacacgtttctatggtgcagaaattgtctctgccttggactatctacattccggaaagattgtgtaccgtgatctcaagttggagaatctaatgctggacaaagatggccacataaaaattacagattttggactttgcaaagaagggatcacagatgcagccaccatgaagacattctgtggcactccagaatatctggcaccagaggtgttagaagataatgactatggccgagcagtagactggtggggcctaggggttgtcatgtatgaaatgatgtgtgggaggttacctttctacaaccaggaccatgagaaactttttgaattaatattaatggaagacattaaatttcctcgaacactctcttcagatgcaaaatcattgctttcagggctcttgataaaggatccaaataaacgccttggtggaggaccagatgatgcaaaagaaattatgagacacagtttcttctctggagtaaactggcaagatgtatatgataaaaagcttgtacctccttttaaacctcaagtaacatctgagacagatactagatattttgatgaagaatttacagctcagactattacaataacaccacctgaaaaatatgatgaggatggtatggactgcatggacaatgagaggcggccgcatttccctcaattttcctactctgcaagtggacgagaataagtctctttcattctgctacttcactgtcatcttcaatttattactgaaaatgattcctggacatcaccagtcctagctcttacacatagcaggggcaccttccgacatcccagaccagccaagggtcctcacccctcgccacctttcaccctcatgaaaacacacatacacgcaaatacactccagtttttgtttttgcatgaaattgtatctcagtctaaggtctcatgctgttgctgctactgtcttactattatagcaactttaagaagtaattttccaacctttggaagtcatgagcccaccattgttcatttgtgcaccaattatcatcttttgatcttttagtttttccctcagtgaaggctaaatgagatacactgattctaggtacattttttaactttctagaagagaaaaactaactagactaagaagatttagtttataaattcagaacaagcaattgtggaagggtggtggcgtgcatatgtaaagcacatcagatccgtgcgtgaagtaggcatatatcactaagctgtggctggaattgattaggaagcatttggtagaaggactgaacaactgttgggatatatatatatatatataattttttttttttaaattcctggtggatactgtagaagcagcccatatcacatgtggatgtcgagacttcacgggcaatcatgagcaagtgaacactgttctaccaagaactgaaggcatatgcacagtcaaggtcacttaaagggtcttatgaaacaatttgagccagagagcatctttcccctgtgcttggaaaccttttttccttcttgacatttatcacctctgatggctgaagaatgtagacaggtataatgatactgcttttcaccaaaatttctacaccaaggtaaacaggtgtttgccttatttaattttttactttcagttctacgtgaattagctttttctcagatgttgaaactttgaatgtccttttatgattttgtttatattgcagtagtatttattttttagtgatgagaattgtatgtcatgttagcaaacgcagctccaacttatataaaatagacttactgcagttacttttgacccatgtgcaaggattgtacacgctgatgagaatcatgcactttttctcctctgttaaaaaaaatgataaggctctgaaatggaatatattggttagaatttggctttgggagaagagatgctgccatttaaccccttggtactgaaaatgagaaaatccccaactatgcatgccaaggggttaatgaaacaaatagctgttgacgtttgctcatttaagaatttgaaacgttatgatgacctggcaacaaaaagtaatgaagaaaattgagacctgagtgaagataagaaatgatctttacgtggcaaaatgaacacatcttgagtatttaggaaatgggcagtgaaggctaagaacctggtgtgtttcttgggatcatggtacatttatcactgaattaagccatcagggaaaaaacaacaaaaaaagagaacacctccagcttttctttttctgtatatactcatgtcccccagattccaacatttctcactgaaagggggcatgtatgcaaacctcatctttctccttcattaatgatgatcttcagattaaaccctttggtgctaggagctgacaatttccaaagcagcctgtgaagtcctaggggctgggggccactcttgcggcaagcagaaggccatcctactccgcggagtgatcatggaaatgtattttagttaaactctgacagctcccaaacggaagactacagcatgacgtagtattatgattgcattgtatgaaagagcaagtgactttctaagtaggatgaatcatattcatatgcagatgtcttagcctcttgacgctggaagtgtggatttatagctatgaaaccactgctggcagtgggtgggccactgggactgacgggggttaaagggcattttactaaggcagctaagacatattcagacatcaacgttatccttctttttcatatttctacctgagtgaagttcatccttagtattgagtaggaagttacagtaaatggtagttcattcttacttacacacatagctaatcttttttttttcacttggaattatgttgaatgtttcattttgacaaaaaagtagactagaaggtatgttctttaagttgtcttgcatccattatataagaaagaaacaggtgagaggaagagcagaaagctgagactggctgatgttcagagcacttactcctctagagggaaagcatgacaccgaacactaagcacacagctttttgttgttttggttttttctcccgcaaatcttaaagtgattcccatgaccttggccaaggacacttcttaaagattaatgactggcactgacattgccccaggcgggccactcctcacactggctctcagttcccagccatgcctggggctcagtcacttctattccaccctctgagactccattggtgtcacacaaggtgtcttcttggctttgattttgagaatcccctattttcacttccagatctgtcagctgccatggaggaataatagaaaaccagaaatgcgtgtagagggagatttctaaaacttcccttgtgtcgcccatagttgtagttttgggttctggcaggtggaacaccctgaaacctggaatcattctatgagaatacagttcagactttgcagactccagcccatactaactgtcatgaagcttgacttcttgtcataatgcagccatcttggaggaaattggccatttctgcttagatggttggcagggtcgcgctcagctttgctttctacactaattacatagcattattcaagtattgttttccatttcccatccctgatttccagcttcttaaagctgactgttcttgcaggggccacttgcttctcctagagtacaaaagtaagggccttccttactaactgcagggtctctctattacacctcaacatacacactttgctgctactgtttgtactgtctacagtagaatttccttatcttgctcctggtagtgcattacaggcaagcatgaaatgtaaagtatttatttaaataaaaagaaaacctctaaattggtaattgaattacctccctgtagctttatagtttgtgacatttcttgaccttgctagttctttcattagatctgcgcaagatctagtcatctggttaaggattttaagcagatgcaactataaacccaagaaactgtattactattactgttggtcatactaaacctgtctatttcctgaagtatatgacccacaaggatgtggaataactaggagaaactgtttttgtacactgtacatccttagtatttttacacgtatatgatagggatgaacatgattttccttcgtacagacagcttaaataaagcactatgtcaatctgcta

SEQ ID NO: 293381 - DNA, 7466 bp, Homo sapiens
gatgtgtgggaggttacctttctacaaccaggaccatgagaaactttttgaattaatattaatggaagacattaaatttcctcgaacactctcttcagatgcaaaatcattgctttcagggctcttgataaaggatccaaataaacgccttggtggaggaccagatgatgcaaaagaaattatgagacacagtttcttctctggagtaaactggcaagatgtatatgataaaaaggctgagtcatcactagagagtgggaaggggcagcagcagagaatccaaaccctaaagctgatatcacaaagtaccatttctccaagttgggggctcagaggggagtcatcatgagcgatgttaccattgtgaaagaaggttgggttcagaagaggggagaatatataaaaaactggaggccaagatacttccttttgaagacagatggctcattcataggatataaagagaaacctcaagatgtggatttaccttatcccctcaacaacttttcagtggcaaaatgccagttaatgaaaacagaacgaccaaagccaaacacatttataatcagatgtctccagtggactactgttatagagagaacatttcatgtagatactccagaggaaagggaagaatggacagaagctatccaggctgtagcagacagactgcagaggcaagaagaggagagaatgaattgtagtccaacttcacaaattgataatataggagaggaagagatggatgcctctacaacccatcataaaagaaagacaatgaatgattttgactatttgaaactactaggtaaaggcacttttgggaaagttattttggttcgagagaaggcaagtggaaaatactatgctatgaagattctgaagaaagaagtcattattgcaaaggatgaagtggcacacactctaactgaaagcagagtattaaagaacactagacatccctttttaacatccttgaaatattccttccagacaaaagaccgtttgtgttttgtgatggaatatgttaatgggggcgagctgtttttccatttgtcgagagagcgggtgttctctgaggaccgcacacgtttctatggtgcagaaattgtctctgccttggactatctacattccggaaagattgtgtaccgtgatctcaagttggagaatctaatgctggacaaagatggccacataaaaattacagattttggactttgcaaagaagggatcacagatgcagccaccatgaagacattctgtggcactccagaatatctggcaccagaggtgttagaagataatgactatggccgagcagtagactggtggggcctaggggttgtcatgtatgaaatgatgtgtgggaggttacctttctacaaccaggaccatgagaaactttttgaattaatattaatggaagacattaaatttcctcgaacactctcttcagatgcaaaatcattgctttcagggctcttgataaaggatccaaataaacgccttggtggaggaccagatgatgcaaaagaaattatgagacacagtttcttctctggagtaaactggcaagatgtatatgataaaaagcttgtacctccttttaaacctcaagtaacatctgagacagatactagatattttgatgaagaatttacagctcagactattacaataacaccacctgaaaaatatgatgaggatggtatggactgcatggacaatgagaggcggccgcatttccctcaattttcctactctgcaagtggacgagaataagtctctttcattctgctacttcactgtcatcttcaatttattactgaaaatgattcctggacatcaccagtcctagctcttacacatagcaggggcaccttccgacatcccagaccagccaagggtcctcacccctcgccacctttcaccctcatgaaaacacacatacacgcaaatacactccagtttttgtttttgcatgaaattgtatctcagtctaaggtctcatgctgttgctgctactgtcttactattatagcaactttaagaagtaattttccaacctttggaagtcatgagcccaccattgttcatttgtgcaccaattatcatcttttgatcttttagtttttccctcagtgaaggctaaatgagatacactgattctaggtacattttttaactttctagaagagaaaaactaactagactaagaagatttagtttataaattcagaacaagcaattgtggaagggtggtggcgtgcatatgtaaagcacatcagatccgtgcgtgaagtaggcatatatcactaagctgtggctggaattgattaggaagcatttggtagaaggactgaacaactgttgggatatatatatatatatataattttttttttttaaattcctggtggatactgtagaagcagcccatatcacatgtggatgtcgagacttcacgggcaatcatgagcaagtgaacactgttctaccaagaactgaaggcatatgcacagtcaaggtcacttaaagggtcttatgaaacaatttgagccagagagcatctttcccctgtgcttggaaaccttttttccttcttgacatttatcacctctgatggctgaagaatgtagacaggtataatgatactgcttttcaccaaaatttctacaccaaggtaaacaggtgtttgccttatttaattttttactttcagttctacgtgaattagctttttctcagatgttgaaactttgaatgtccttttatgattttgtttatattgcagtagtatttattttttagtgatgagaattgtatgtcatgttagcaaacgcagctccaacttatataaaatagacttactgcagttacttttgacccatgtgcaaggattgtacacgctgatgagaatcatgcactttttctcctctgttaaaaaaaatgataaggctctgaaatggaatatattggttagaatttggctttgggagaagagatgctgccatttaaccccttggtactgaaaatgagaaaatccccaactatgcatgccaaggggttaatgaaacaaatagctgttgacgtttgctcatttaagaatttgaaacgttatgatgacctggcaacaaaaagtaatgaagaaaattgagacctgagtgaagataagaaatgatctttacgtggcaaaatgaacacatcttgagtatttaggaaatgggcagtgaaggctaagaacctggtgtgtttcttgggatcatggtacatttatcactgaattaagccatcagggaaaaaacaacaaaaaaagagaacacctccagcttttctttttctgtatatactcatgtcccccagattccaacatttctcactgaaagggggcatgtatgcaaacctcatctttctccttcattaatgatgatcttcagattaaaccctttggtgctaggagctgacaatttccaaagcagcctgtgaagtcctaggggctgggggccactcttgcggcaagcagaaggccatcctactccgcggagtgatcatggaaatgtattttagttaaactctgacagctcccaaacggaagactacagcatgacgtagtattatgattgcattgtatgaaagagcaagtgactttctaagtaggatgaatcatattcatatgcagatgtcttagcctcttgacgctggaagtgtggatttatagctatgaaaccactgctggcagtgggtgggccactgggactgacgggggttaaagggcattttactaaggcagctaagacatattcagacatcaacgttatccttctttttcatatttctacctgagtgaagttcatccttagtattgagtaggaagttacagtaaatggtagttcattcttacttacacacatagctaatcttttttttttcacttggaattatgttgaatgtttcattttgacaaaaaagtagactagaaggtatgttctttaagttgtcttgcatccattatataagaaagaaacaggtgagaggaagagcagaaagctgagactggctgatgttcagagcacttactcctctagagggaaagcatgacaccgaacactaagcacacagctttttgttgttttggttttttctcccgcaaatcttaaagtgattcccatgaccttggccaaggacacttcttaaagattaatgactggcactgacattgccccaggcgggccactcctcacactggctctcagttcccagccatgcctggggctcagtcacttctattccaccctctgagactccattggtgtcacacaaggtgtcttcttggctttgattttgagaatcccctattttcacttccagatctgtcagctgccatggaggaataatagaaaaccagaaatgcgtgtagagggagatttctaaaacttcccttgtgtcgcccatagttgtagttttgggttctggcaggtggaacaccctgaaacctggaatcattctatgagaatacagttcagactttgcagactccagcccatactaactgtcatgaagcttgacttcttgtcataatgcagccatcttggaggaaattggccatttctgcttagatggttggcagggtcgcgctcagctttgctttctacactaattacatagcattattcaagtattgttttccatttcccatccctgatttccagcttcttaaagctgactgttcttgcaggggccacttgcttctcctagagtacaaaagtaagggccttccttactaactgcagggtctctctattacacctcaacatacacactttgctgctactgtttgtactgtctacagtagaatttccttatcttgctcctggtagtgcattacaggcaagcatgaaatgtaaagtatttatttaaataaaaagaaaacctctaaattggtaattgaattacctccctgtagctttatagtttgtgacatttcttgaccttgctagttctttcattagatctgcgcaagatctagtcatctggttaaggattttaagcagatgcaactataaacccaagaaactgtattactattactgttggtcatactaaacctgtctatttcctgaagtatatgacccacaaggatgtggaataactaggagaaactgtttttgtacactgtacatccttagtatttttacacgtatatgatagggatgaacatgattttccttcgtacagacagcttaaataaagcactatgtcaatctgctacttctctgtttattgttgttggatgtggttctataatccccccaaattaaatcttctttaatgaaaacatgatttttaatagccccagctggtattaacctaccttgtataaaatgtgacaggaaaatatagaaataattccttgtagctcacacacacacacataggggatcatttttacttcagtgaaatggcagtagtgcggttgtgcaaactttgatgaacggctgcttctgaggggaaacgctgacctctcagcactggatttaggatggatgtactgtgaagccagggatgaaggaggtctcagaccctggggacattcagacccgaatcatctatacaacacacggtttggacccagaatctgaaggaatgtagcttttcattaacgtcttcctgataatgtactgctctgcatatttcctttcttagagtgtatttctaacaacatgtcatggcaaattaacaaacttagacgtgggtgatgtagatgggtaggatggctggactgcagtctgacttcacgttgaatcattctggatggggcctttttctgattttacctcataaagctactattgtagaaacttggctttgctcctgtgacgaagccagacagaggaatggcttttgggaccagagtgagtcaagcatgtatgtgtatgtcacacggccaaatttgagggcattctcacatgtgctcttctctcaaaaccactggggttgacagatccaggaggctaaaaaaaagtgacctctataattctttaaaggtgctatttttagaatattgtataatttattcacagtatatctaaaacagaattaaggacaattaaaatatcttatgtgacagcctttatgtctagcacatttgatgaaataaaaaacttctgaatctgaatagaagttctactgtttcaggcttgaaccttttacatgctcaagagattcaaatggtctctgtgtgtagatcatgccaccgcctccaaagcctaatccacatcacttctgagaggcaaggctgagcatatggtgacatcagctctgtgttgagatggtgatgaggatgatggctcgctggccaggcagggcagccgaaggtcagggacctgtcctaactaactgcagccttgcctttagtgtttgtcattctcagatacaacacggtatgtccagtgtccgtttttattactttaaagcatttgagggcttaattgtgtatagtagaaatactattttagacaaataattatctgtgtacagatatttgatatactctaagtaaattttctaatttcactaagtacgtttttaggctcctctcaaatactgcgtattgaagaaaaaaatctgacaccaccgagccaaagatgcttttttgtctgttttcgttgtttaacagaatggaaagagtaatgcatagtgcttcctggtgtctcctgattgattgattgtgcacaaagtaggacgataaataaataaaatggagtctgatgggacattgattaaaggtgaaggatgattgatatatagatcatgaaaagaaaaatgaatggcaggaaaaaaagtttggtccttaatatactttggcctagttaaaatatgtgcctttttggtgtgttttgttcatcactacaagataaaaaggaaacattacaactcaagtctttaaaaagttcatttattgaaaatcatatgtataacctagcatacgaatgagcagatttaaacacataacttcaagccatttctgaaaacatacaccaggagctctgctcagctagagtcagactccagctccagcccgactgcgtgcggggacagcgcccgcgttgatgaggaccagccccactgcaggctgaggcggtgtcaccctgggaaggtcgtggtgcgttgtggcatattaagtctaaaccagatgaatgtaaatatctctttgtaaatcatttatttcactctgttccatccaggtcagcaatcagattgtggcatgctgggtaactgggtccgcagccggtccacctcttccgacaggctctgcctctccaggagaagctggttctgcttgctgaggagctgcaccagctgctgggctgtggcctggctgtgcttatccagctgccttagctaaaaatttgttgggttttgaggttttacggcaagagtagattatacataatttcgaccat

SEQ ID NO: 293382 - DNA, 7350 bp, Homo sapiens
gatgtgtgggaggttacctttctacaaccaggaccatgagaaactttttgaattaatattaatggaagacattaaatttcctcgaacactctcttcagatgcaaaatcattgctttcagggctcttgataaaggatccaaataaacgccttggtggaggaccagatgatgcaaaagaaattatgagacacagtttcttctctggagtaaactggcaagatgtatatgataaaaaggctgagtcatcactagagagtgggaaggggcagcagcagagaatccaaaccctaaagctgatatcacaaagtaccatttctccaagttgggggctcagaggggagtcatcatgagcgatgttaccattgtgaaagaaggttgggttcagaagaggggagaatatataaaaaactggaggccaagatacttccttttgaagacagatggctcattcataggatataaagagaaacctcaagatgtggatttaccttatcccctcaacaacttttcagtggcaaaatgccagttaatgaaaacagaacgaccaaagccaaacacatttataatcagatgtctccagtggactactgttatagagagaacatttcatgtagatactccagaggaaagggaagaatggacagaagctatccaggctgtagcagacagactgcagaggcaagaagaggagagaatgaattgtagtccaacttcacaaattgataatataggagaggaagagatggatgcctctacaacccatcataaaagaaagacaatgaatgattttgactatttgaaactactaggtaaaggcacttttgggaaagttattttggttcgagagaaggcaagtggaaaatactatgctatgaagattctgaagaaagaagtcattattgcaaaggatgaagtggcacacactctaactgaaagcagagtattaaagaacactagacatccctttttaacatccttgaaatattccttccagacaaaagaccgtttgtgttttgtgatggaatatgttaatgggggcgagctgtttttccatttgtcgagagagcgggtgttctctgaggaccgcacacgtttctatggtgcagaaattgtctctgccttggactatctacattccggaaagattgtgtaccgtgatctcaagttggagaatctaatgctggacaaagatggccacataaaaattacagattttggactttgcaaagaagggatcacagatgcagccaccatgaagacattctgtggcactccagaatatctggcaccagaggtgttagaagataatgactatggccgagcagtagactggtggggcctaggggttgtcatgtatgaaatgatgtgtgggaggttacctttctacaaccaggaccatgagaaactttttgaattaatattaatggaagacattaaatttcctcgaacactctcttcagatgcaaaatcattgctttcagggctcttgataaaggatccaaataaacgccttggtggaggaccagatgatgcaaaagaaattatgagacacagtttcttctctggagtaaactggcaagatgtatatgataaaaagcttgtacctccttttaaacctcaagtaacatctgagacagatactagatattttgatgaagaatttacagctcagactattacaataacaccacctgaaaaatatgatgaggatggtatggactgcatggacaatgagaggcggccgcatttccctcaattttcctactctgcaagtggacgagaataagtctctttcattctgctacttcactgtcatcttcaatttattactgaaaatgattcctggacatcaccagtcctagctcttacacatagcaggggcaccttccgacatcccagaccagccaagggtcctcacccctcgccacctttcaccctcatgaaaacacacatacacgcaaatacactccagtttttgtttttgcatgaaattgtatctcagtctaaggtctcatgctgttgctgctactgtcttactattatagcaactttaagaagtaattttccaacctttggaagtcatgagcccaccattgttcatttgtgcaccaattatcatcttttgatcttttagtttttccctcagtgaaggctaaatgagatacactgattctaggtacattttttaactttctagaagagaaaaactaactagactaagaagatttagtttataaattcagaacaagcaattgtggaagggtggtggcgtgcatatgtaaagcacatcagatccgtgcgtgaagtaggcatatatcactaagctgtggctggaattgattaggaagcatttggtagaaggactgaacaactgttgggatatatatatatatatataattttttttttttaaattcctggtggatactgtagaagcagcccatatcacatgtggatgtcgagacttcacgggcaatcatgagcaagtgaacactgttctaccaagaactgaaggcatatgcacagtcaaggtcacttaaagggtcttatgaaacaatttgagccagagagcatctttcccctgtgcttggaaaccttttttccttcttgacatttatcacctctgatggctgaagaatgtagacaggtataatgatactgcttttcaccaaaatttctacaccaaggtaaacaggtgtttgccttatttaattttttactttcagttctacgtgaattagctttttctcagatgttgaaactttgaatgtccttttatgattttgtttatattgcagtagtatttattttttagtgatgagaattgtatgtcatgttagcaaacgcagctccaacttatataaaatagacttactgcagttacttttgacccatgtgcaaggattgtacacgctgatgagaatcatgcactttttctcctctgttaaaaaaaatgataaggctctgaaatggaatatattggttagaatttggctttgggagaagagatgctgccatttaaccccttggtactgaaaatgagaaaatccccaactatgcatgccaaggggttaatgaaacaaatagctgttgacgtttgctcatttaagaatttgaaacgttatgatgacctggcaacaaaaagtaatgaagaaaattgagacctgagtgaagataagaaatgatctttacgtggcaaaatgaacacatcttgagtatttaggaaatgggcagtgaaggctaagaacctggtgtgtttcttgggatcatggtacatttatcactgaattaagccatcagggaaaaaacaacaaaaaaagagaacacctccagcttttctttttctgtatatactcatgtcccccagattccaacatttctcactgaaagggggcatgtatgcaaacctcatctttctccttcattaatgatgatcttcagattaaaccctttggtgctaggagctgacaatttccaaagcagcctgtgaagtcctaggggctgggggccactcttgcggcaagcagaaggccatcctactccgcggagtgatcatggaaatgtattttagttaaactctgacagctcccaaacggaagactacagcatgacgtagtattatgattgcattgtatgaaagagcaagtgactttctaagtaggatgaatcatattcatatgcagatgtcttagcctcttgacgctggaagtgtggatttatagctatgaaaccactgctggcagtgggtgggccactgggactgacgggggttaaagggcattttactaaggcagctaagacatattcagacatcaacgttatccttctttttcatatttctacctgagtgaagttcatccttagtattgagtaggaagttacagtaaatggtagttcattcttacttacacacatagctaatcttttttttttcacttggaattatgttgaatgtttcattttgacaaaaaagtagactagaaggtatgttctttaagttgtcttgcatccattatataagaaagaaacaggtgagaggaagagcagaaagctgagactggctgatgttcagagcacttactcctctagagggaaagcatgacaccgaacactaagcacacagctttttgttgttttggttttttctcccgcaaatcttaaagtgattcccatgaccttggccaaggacacttcttaaagattaatgactggcactgacattgccccaggcgggccactcctcacactggctctcagttcccagccatgcctggggctcagtcacttctattccaccctctgagactccattggtgtcacacaaggtgtcttcttggctttgattttgagaatcccctattttcacttccagatctgtcagctgccatggaggaataatagaaaaccagaaatgcgtgtagagggagatttctaaaacttcccttgtgtcgcccatagttgtagttttgggttctggcaggtggaacaccctgaaacctggaatcattctatgagaatacagttcagactttgcagactccagcccatactaactgtcatgaagcttgacttcttgtcataatgcagccatcttggaggaaattggccatttctgcttagatggttggcagggtcgcgctcagctttgctttctacactaattacatagcattattcaagtattgttttccatttcccatccctgatttccagcttcttaaagctgactgttcttgcaggggccacttgcttctcctagagtacaaaagtaagggccttccttactaactgcagggtctctctattacacctcaacatacacactttgctgctactgtttgtactgtctacagtagaatttccttatcttgctcctggtagtgcattacaggcaagcatgaaatgtaaagtatttatttaaataaaaagaaaacctctaaattggtaattgaattacctccctgtagctttatagtttgtgacatttcttgaccttgctagttctttcattagatctgcgcaagatctagtcatctggttaaggattttaagcagatgcaactataaacccaagaaactgtattactattactgttggtcatactaaacctgtctatttcctgaagtatatgacccacaaggatgtggaataactaggagaaactgtttttgtacactgtacatccttagtatttttacacgtatatgatagggatgaacatgattttccttcgtacagacagcttaaataaagcactatgtcaatctgctacttctctgtttattgttgttggatgtggttctataatccccccaaattaaatcttctttaatgaaaacatgatttttaatagccccagctggtattaacctaccttgtataaaatgtgacaggaaaatatagaaataattccttgtagctcacacacacacacataggggatcatttttacttcagtgaaatggcagtagtgcggttgtgcaaactttgatgaacggctgcttctgaggggaaacgctgacctctcagcactggatttaggatggatgtactgtgaagccagggatgaaggaggtctcagaccctggggacattcagacccgaatcatctatacaacacacggtttggacccagaatctgaaggaatgtagcttttcattaacgtcttcctgataatgtactgctctgcatatttcctttcttagagtgtatttctaacaacatgtcatggcaaattaacaaacttagacgtgggtgatgtagatgggtaggatggctggactgcagtctgacttcacgttgaatcattctggatggggcctttttctgattttacctcataaagctactattgtagaaacttggctttgctcctgtgacgaagccagacagaggaatggcttttgggaccagagtgagtcaagcatgtatgtgtatgtcacacggccaaatttgagggcattctcacatgtgctcttctctcaaaaccactggggttgacagatccaggaggctaaaaaaaagtgacctctataattctttaaaggtgctatttttagaatattgtataatttattcacagtatatctaaaacagaattaaggacaattaaaatatcttatgtgacagcctttatgtctagcacatttgatgaaataaaaaacttctgaatctgaatagaagttctactgtttcaggcttgaaccttttacatgctcaagagattcaaatggtctctgtgtgtagatcatgccaccgcctccaaagcctaatccacatcacttctgagaggcaaggctgagcatatggtgacatcagctctgtgttgagatggtgatgaggatgatggctcgctggccaggcagggcagccgaaggtcagggacctgtcctaactaactgcagccttgcctttagtgtttgtcattctcagatacaacacggtatgtccagtgtccgtttttattactttaaagcatttgagggcttaattgtgtatagtagaaatactattttagacaaataattatctgtgtacagatatttgatatactctaagtaaattttctaatttcactaagtacgtttttaggctcctctcaaatactgcgtattgaagaaaaaaatctgacaccaccgagccaaagatgcttttttgtctgttttcgttgtttaacagaatggaaagagtaatgcatagtgcttcctggtgtctcctgattgattgattgtgcacaaagtaggacgataaataaataaaatggagtctgatgggacattgattaaaggtgaaggatgattgatatatagatcatgaaaagaaaaatgaatggcaggaaaaaaagtttggtccttaatatactttggcctagttaaaatatgtgcctttttggtgtgttttgttcatcactacaagataaaaaggaaacattacaactcaagtctttaaaaagttcatttattgaaaatcatatgtataacctagcatacgaatgagcagatttaaacacataacttcaagccatttctgaaaacatacaccaggagctctgctcagctagagtcagactccagctccagcccgactgcgtgcggggacagcgcccgcgttgatgaggaccagccccactgcaggctgaggcggtgtcaccctgggaaggtcgtggtgcgttgtggcatattaagtctaaaccagatgaatgtaaatatctctttgtaaatcatttatttcactctgttccatccaggtcagcaatcagattgtggcatgctgggtaactttgcttcatcgtctcatgtactctcccatgctggacacactgttcctccaattcttcatttcttctctgt

SEQ ID NO: 293383 - DNA, 7623 bp, Homo sapiens
gatgtgtgggaggttacctttctacaaccaggaccatgagaaactttttgaattaatattaatggaagacattaaatttcctcgaacactctcttcagatgcaaaatcattgctttcagggctcttgataaaggatccaaataaacgccttggtggaggaccagatgatgcaaaagaaattatgagacacagtttcttctctggagtaaactggcaagatgtatatgataaaaaggctgagtcatcactagagagtgggaaggggcagcagcagagaatccaaaccctaaagctgatatcacaaagtaccatttctccaagttgggggctcagaggggagtcatcatgagcgatgttaccattgtgaaagaaggttgggttcagaagaggggagaatatataaaaaactggaggccaagatacttccttttgaagacagatggctcattcataggatataaagagaaacctcaagatgtggatttaccttatcccctcaacaacttttcagtggcaaaatgccagttaatgaaaacagaacgaccaaagccaaacacatttataatcagatgtctccagtggactactgttatagagagaacatttcatgtagatactccagaggaaagggaagaatggacagaagctatccaggctgtagcagacagactgcagaggcaagaagaggagagaatgaattgtagtccaacttcacaaattgataatataggagaggaagagatggatgcctctacaacccatcataaaagaaagacaatgaatgattttgactatttgaaactactaggtaaaggcacttttgggaaagttattttggttcgagagaaggcaagtggaaaatactatgctatgaagattctgaagaaagaagtcattattgcaaaggatgaagtggcacacactctaactgaaagcagagtattaaagaacactagacatccctttttaacatccttgaaatattccttccagacaaaagaccgtttgtgttttgtgatggaatatgttaatgggggcgagctgtttttccatttgtcgagagagcgggtgttctctgaggaccgcacacgtttctatggtgcagaaattgtctctgccttggactatctacattccggaaagattgtgtaccgtgatctcaagttggagaatctaatgctggacaaagatggccacataaaaattacagattttggactttgcaaagaagggatcacagatgcagccaccatgaagacattctgtggcactccagaatatctggcaccagaggtgttagaagataatgactatggccgagcagtagactggtggggcctaggggttgtcatgtatgaaatgatgtgtgggaggttacctttctacaaccaggaccatgagaaactttttgaattaatattaatggaagacattaaatttcctcgaacactctcttcagatgcaaaatcattgctttcagggctcttgataaaggatccaaataaacgctttgactttaacataaacaaaaatgtcaaccaatattcatgttggaactaatcgtaagtttcatccattagtggctttggcgtacagcagaaattaacaagttttctgtgagaatcagccttggtggaggaccagatgatgcaaaagaaattatgagacacagtttcttctctggagtaaactggcaagatgtatatgataaaaagcttgtacctccttttaaacctcaagtaacatctgagacagatactagatattttgatgaagaatttacagctcagactattacaataacaccacctgaaaaatatgatgaggatggtatggactgcatggacaatgagaggcggccgcatttccctcaattttcctactctgcaagtggacgagaataagtctctttcattctgctacttcactgtcatcttcaatttattactgaaaatgattcctggacatcaccagtcctagctcttacacatagcaggggcaccttccgacatcccagaccagccaagggtcctcacccctcgccacctttcaccctcatgaaaacacacatacacgcaaatacactccagtttttgtttttgcatgaaattgtatctcagtctaaggtctcatgctgttgctgctactgtcttactattatagcaactttaagaagtaattttccaacctttggaagtcatgagcccaccattgttcatttgtgcaccaattatcatcttttgatcttttagtttttccctcagtgaaggctaaatgagatacactgattctaggtacattttttaactttctagaagagaaaaactaactagactaagaagatttagtttataaattcagaacaagcaattgtggaagggtggtggcgtgcatatgtaaagcacatcagatccgtgcgtgaagtaggcatatatcactaagctgtggctggaattgattaggaagcatttggtagaaggactgaacaactgttgggatatatatatatatatataattttttttttttaaattcctggtggatactgtagaagcagcccatatcacatgtggatgtcgagacttcacgggcaatcatgagcaagtgaacactgttctaccaagaactgaaggcatatgcacagtcaaggtcacttaaagggtcttatgaaacaatttgagccagagagcatctttcccctgtgcttggaaaccttttttccttcttgacatttatcacctctgatggctgaagaatgtagacaggtataatgatactgcttttcaccaaaatttctacaccaaggtaaacaggtgtttgccttatttaattttttactttcagttctacgtgaattagctttttctcagatgttgaaactttgaatgtccttttatgattttgtttatattgcagtagtatttattttttagtgatgagaattgtatgtcatgttagcaaacgcagctccaacttatataaaatagacttactgcagttacttttgacccatgtgcaaggattgtacacgctgatgagaatcatgcactttttctcctctgttaaaaaaaatgataaggctctgaaatggaatatattggttagaatttggctttgggagaagagatgctgccatttaaccccttggtactgaaaatgagaaaatccccaactatgcatgccaaggggttaatgaaacaaatagctgttgacgtttgctcatttaagaatttgaaacgttatgatgacctggcaacaaaaagtaatgaagaaaattgagacctgagtgaagataagaaatgatctttacgtggcaaaatgaacacatcttgagtatttaggaaatgggcagtgaaggctaagaacctggtgtgtttcttgggatcatggtacatttatcactgaattaagccatcagggaaaaaacaacaaaaaaagagaacacctccagcttttctttttctgtatatactcatgtcccccagattccaacatttctcactgaaagggggcatgtatgcaaacctcatctttctccttcattaatgatgatcttcagattaaaccctttggtgctaggagctgacaatttccaaagcagcctgtgaagtcctaggggctgggggccactcttgcggcaagcagaaggccatcctactccgcggagtgatcatggaaatgtattttagttaaactctgacagctcccaaacggaagactacagcatgacgtagtattatgattgcattgtatgaaagagcaagtgactttctaagtaggatgaatcatattcatatgcagatgtcttagcctcttgacgctggaagtgtggatttatagctatgaaaccactgctggcagtgggtgggccactgggactgacgggggttaaagggcattttactaaggcagctaagacatattcagacatcaacgttatccttctttttcatatttctacctgagtgaagttcatccttagtattgagtaggaagttacagtaaatggtagttcattcttacttacacacatagctaatcttttttttttcacttggaattatgttgaatgtttcattttgacaaaaaagtagactagaaggtatgttctttaagttgtcttgcatccattatataagaaagaaacaggtgagaggaagagcagaaagctgagactggctgatgttcagagcacttactcctctagagggaaagcatgacaccgaacactaagcacacagctttttgttgttttggttttttctcccgcaaatcttaaagtgattcccatgaccttggccaaggacacttcttaaagattaatgactggcactgacattgccccaggcgggccactcctcacactggctctcagttcccagccatgcctggggctcagtcacttctattccaccctctgagactccattggtgtcacacaaggtgtcttcttggctttgattttgagaatcccctattttcacttccagatctgtcagctgccatggaggaataatagaaaaccagaaatgcgtgtagagggagatttctaaaacttcccttgtgtcgcccatagttgtagttttgggttctggcaggtggaacaccctgaaacctggaatcattctatgagaatacagttcagactttgcagactccagcccatactaactgtcatgaagcttgacttcttgtcataatgcagccatcttggaggaaattggccatttctgcttagatggttggcagggtcgcgctcagctttgctttctacactaattacatagcattattcaagtattgttttccatttcccatccctgatttccagcttcttaaagctgactgttcttgcaggggccacttgcttctcctagagtacaaaagtaagggccttccttactaactgcagggtctctctattacacctcaacatacacactttgctgctactgtttgtactgtctacagtagaatttccttatcttgctcctggtagtgcattacaggcaagcatgaaatgtaaagtatttatttaaataaaaagaaaacctctaaattggtaattgaattacctccctgtagctttatagtttgtgacatttcttgaccttgctagttctttcattagatctgcgcaagatctagtcatctggttaaggattttaagcagatgcaactataaacccaagaaactgtattactattactgttggtcatactaaacctgtctatttcctgaagtatatgacccacaaggatgtggaataactaggagaaactgtttttgtacactgtacatccttagtatttttacacgtatatgatagggatgaacatgattttccttcgtacagacagcttaaataaagcactatgtcaatctgctacttctctgtttattgttgttggatgtggttctataatccccccaaattaaatcttctttaatgaaaacatgatttttaatagccccagctggtattaacctaccttgtataaaatgtgacaggaaaatatagaaataattccttgtagctcacacacacacacataggggatcatttttacttcagtgaaatggcagtagtgcggttgtgcaaactttgatgaacggctgcttctgaggggaaacgctgacctctcagcactggatttaggatggatgtactgtgaagccagggatgaaggaggtctcagaccctggggacattcagacccgaatcatctatacaacacacggtttggacccagaatctgaaggaatgtagcttttcattaacgtcttcctgataatgtactgctctgcatatttcctttcttagagtgtatttctaacaacatgtcatggcaaattaacaaacttagacgtgggtgatgtagatgggtaggatggctggactgcagtctgacttcacgttgaatcattctggatggggcctttttctgattttacctcataaagctactattgtagaaacttggctttgctcctgtgacgaagccagacagaggaatggcttttgggaccagagtgagtcaagcatgtatgtgtatgtcacacggccaaatttgagggcattctcacatgtgctcttctctcaaaaccactggggttgacagatccaggaggctaaaaaaaagtgacctctataattctttaaaggtgctatttttagaatattgtataatttattcacagtatatctaaaacagaattaaggacaattaaaatatcttatgtgacagcctttatgtctagcacatttgatgaaataaaaaacttctgaatctgaatagaagttctactgtttcaggcttgaaccttttacatgctcaagagattcaaatggtctctgtgtgtagatcatgccaccgcctccaaagcctaatccacatcacttctgagaggcaaggctgagcatatggtgacatcagctctgtgttgagatggtgatgaggatgatggctcgctggccaggcagggcagccgaaggtcagggacctgtcctaactaactgcagccttgcctttagtgtttgtcattctcagatacaacacggtatgtccagtgtccgtttttattactttaaagcatttgagggcttaattgtgtatagtagaaatactattttagacaaataattatctgtgtacagatatttgatatactctaagtaaattttctaatttcactaagtacgtttttaggctcctctcaaatactgcgtattgaagaaaaaaatctgacaccaccgagccaaagatgcttttttgtctgttttcgttgtttaacagaatggaaagagtaatgcatagtgcttcctggtgtctcctgattgattgattgtgcacaaagtaggacgataaataaataaaatggagtctgatgggacattgattaaaggtgaaggatgattgatatatagatcatgaaaagaaaaatgaatggcaggaaaaaaagtttggtccttaatatactttggcctagttaaaatatgtgcctttttggtgtgttttgttcatcactacaagataaaaaggaaacattacaactcaagtctttaaaaagttcatttattgaaaatcatatgtataacctagcatacgaatgagcagatttaaacacataacttcaagccatttctgaaaacatacaccaggagctctgctcagctagagtcagactccagctccagcccgactgcgtgcggggacagcgcccgcgttgatgaggaccagccccactgcaggctgaggcggtgtcaccctgggaaggtcgtggtgcgttgtggcatattaagtctaaaccagatgaatgtaaatatctctttgtaaatcatttatttcactctgttccatccaggtcagcaatcagattgtggcatgctgggtaactggaaaaaataataaaaagtaagtttcaatagctcatgttcttcaatgttatttgtcttctcatttgctggtttagtcaccttttatgatgaaaactgttgttggagaaaaaaacctgttgctaaaaatgtggaaattatatgaaaagtttgtgcctcatcttgtccacatcaaagcccttcacatatgaaataaggttaactggtttaatgggttaaatttgaa

SEQ ID NO: 293384 - DNA, 7299 bp, Homo sapiens
aggctgataagatggcagcctggcaacagaggcaggtagtggggttgggggagaacatttgatgcagagtaaaaataagatttgtgattccaaaggtcatgaattgttaggatcatgggatgactgtgtatcattggaagatgtaagctcaagaatattcatgaatatgtgttctattaaacattggagaatatataaaaaactggaggccaagatacttccttttgaagacagatggctcattcataggatataaagagaaacctcaagatgtggatttaccttatcccctcaacaacttttcagtggcaaaatgccagttaatgaaaacagaacgaccaaagccaaacacatttataatcagatgtctccagtggactactgttatagagagaacatttcatgtagatactccagaggaaagggaagaatggacagaagctatccaggctgtagcagacagactgcagaggcaagaagaggagagaatgaattgtagtccaacttcacaaattgataatataggagaggaagagatggatgcctctacaacccatcataaaagaaagacaatgaatgattttgactatttgaaactactaggtaaaggcacttttgggaaagttattttggttcgagagaaggcaagtggaaaatactatgctatgaagattctgaagaaagaagtcattattgcaaaggatgaagtggcacacactctaactgaaagcagagtattaaagaacactagacatccctttttaacatccttgaaatattccttccagacaaaagaccgtttgtgttttgtgatggaatatgttaatgggggcgagctgtttttccatttgtcgagagagcgggtgttctctgaggaccgcacacgtttctatggtgcagaaattgtctctgccttggactatctacattccggaaagattgtgtaccgtgatctcaagttggagaatctaatgctggacaaagatggccacataaaaattacagattttggactttgcaaagaagggatcacagatgcagccaccatgaagacattctgtggcactccagaatatctggcaccagaggtgttagaagataatgactatggccgagcagtagactggtggggcctaggggttgtcatgtatgaaatgatgtgtgggaggttacctttctacaaccaggaccatgagaaactttttgaattaatattaatggaagacattaaatttcctcgaacactctcttcagatgcaaaatcattgctttcagggctcttgataaaggatccaaataaacgccttggtggaggaccagatgatgcaaaagaaattatgagacacagtttcttctctggagtaaactggcaagatgtatatgataaaaagcttgtacctccttttaaacctcaagtaacatctgagacagatactagatattttgatgaagaatttacagctcagactattacaataacaccacctgaaaaatatgatgaggatggtatggactgcatggacaatgagaggcggccgcatttccctcaattttcctactctgcaagtggacgagaataagtctctttcattctgctacttcactgtcatcttcaatttattactgaaaatgattcctggacatcaccagtcctagctcttacacatagcaggggcaccttccgacatcccagaccagccaagggtcctcacccctcgccacctttcaccctcatgaaaacacacatacacgcaaatacactccagtttttgtttttgcatgaaattgtatctcagtctaaggtctcatgctgttgctgctactgtcttactattatagcaactttaagaagtaattttccaacctttggaagtcatgagcccaccattgttcatttgtgcaccaattatcatcttttgatcttttagtttttccctcagtgaaggctaaatgagatacactgattctaggtacattttttaactttctagaagagaaaaactaactagactaagaagatttagtttataaattcagaacaagcaattgtggaagggtggtggcgtgcatatgtaaagcacatcagatccgtgcgtgaagtaggcatatatcactaagctgtggctggaattgattaggaagcatttggtagaaggactgaacaactgttgggatatatatatatatatataattttttttttttaaattcctggtggatactgtagaagcagcccatatcacatgtggatgtcgagacttcacgggcaatcatgagcaagtgaacactgttctaccaagaactgaaggcatatgcacagtcaaggtcacttaaagggtcttatgaaacaatttgagccagagagcatctttcccctgtgcttggaaaccttttttccttcttgacatttatcacctctgatggctgaagaatgtagacaggtataatgatactgcttttcaccaaaatttctacaccaaggtaaacaggtgtttgccttatttaattttttactttcagttctacgtgaattagctttttctcagatgttgaaactttgaatgtccttttatgattttgtttatattgcagtagtatttattttttagtgatgagaattgtatgtcatgttagcaaacgcagctccaacttatataaaatagacttactgcagttacttttgacccatgtgcaaggattgtacacgctgatgagaatcatgcactttttctcctctgttaaaaaaaatgataaggctctgaaatggaatatattggttagaatttggctttgggagaagagatgctgccatttaaccccttggtactgaaaatgagaaaatccccaactatgcatgccaaggggttaatgaaacaaatagctgttgacgtttgctcatttaagaatttgaaacgttatgatgacctggcaacaaaaagtaatgaagaaaattgagacctgagtgaagataagaaatgatctttacgtggcaaaatgaacacatcttgagtatttaggaaatgggcagtgaaggctaagaacctggtgtgtttcttgggatcatggtacatttatcactgaattaagccatcagggaaaaaacaacaaaaaaagagaacacctccagcttttctttttctgtatatactcatgtcccccagattccaacatttctcactgaaagggggcatgtatgcaaacctcatctttctccttcattaatgatgatcttcagattaaaccctttggtgctaggagctgacaatttccaaagcagcctgtgaagtcctaggggctgggggccactcttgcggcaagcagaaggccatcctactccgcggagtgatcatggaaatgtattttagttaaactctgacagctcccaaacggaagactacagcatgacgtagtattatgattgcattgtatgaaagagcaagtgactttctaagtaggatgaatcatattcatatgcagatgtcttagcctcttgacgctggaagtgtggatttatagctatgaaaccactgctggcagtgggtgggccactgggactgacgggggttaaagggcattttactaaggcagctaagacatattcagacatcaacgttatccttctttttcatatttctacctgagtgaagttcatccttagtattgagtaggaagttacagtaaatggtagttcattcttacttacacacatagctaatcttttttttttcacttggaattatgttgaatgtttcattttgacaaaaaagtagactagaaggtatgttctttaagttgtcttgcatccattatataagaaagaaacaggtgagaggaagagcagaaagctgagactggctgatgttcagagcacttactcctctagagggaaagcatgacaccgaacactaagcacacagctttttgttgttttggttttttctcccgcaaatcttaaagtgattcccatgaccttggccaaggacacttcttaaagattaatgactggcactgacattgccccaggcgggccactcctcacactggctctcagttcccagccatgcctggggctcagtcacttctattccaccctctgagactccattggtgtcacacaaggtgtcttcttggctttgattttgagaatcccctattttcacttccagatctgtcagctgccatggaggaataatagaaaaccagaaatgcgtgtagagggagatttctaaaacttcccttgtgtcgcccatagttgtagttttgggttctggcaggtggaacaccctgaaacctggaatcattctatgagaatacagttcagactttgcagactccagcccatactaactgtcatgaagcttgacttcttgtcataatgcagccatcttggaggaaattggccatttctgcttagatggttggcagggtcgcgctcagctttgctttctacactaattacatagcattattcaagtattgttttccatttcccatccctgatttccagcttcttaaagctgactgttcttgcaggggccacttgcttctcctagagtacaaaagtaagggccttccttactaactgcagggtctctctattacacctcaacatacacactttgctgctactgtttgtactgtctacagtagaatttccttatcttgctcctggtagtgcattacaggcaagcatgaaatgtaaagtatttatttaaataaaaagaaaacctctaaattggtaattgaattacctccctgtagctttatagtttgtgacatttcttgaccttgctagttctttcattagatctgcgcaagatctagtcatctggttaaggattttaagcagatgcaactataaacccaagaaactgtattactattactgttggtcatactaaacctgtctatttcctgaagtatatgacccacaaggatgtggaataactaggagaaactgtttttgtacactgtacatccttagtatttttacacgtatatgatagggatgaacatgattttccttcgtacagacagcttaaataaagcactatgtcaatctgctacttctctgtttattgttgttggatgtggttctataatccccccaaattaaatcttctttaatgaaaacatgatttttaatagccccagctggtattaacctaccttgtataaaatgtgacaggaaaatatagaaataattccttgtagctcacacacacacacataggggatcatttttacttcagtgaaatggcagtagtgcggttgtgcaaactttgatgaacggctgcttctgaggggaaacgctgacctctcagcactggatttaggatggatgtactgtgaagccagggatgaaggaggtctcagaccctggggacattcagacccgaatcatctatacaacacacggtttggacccagaatctgaaggaatgtagcttttcattaacgtcttcctgataatgtactgctctgcatatttcctttcttagagtgtatttctaacaacatgtcatggcaaattaacaaacttagacgtgggtgatgtagatgggtaggatggctggactgcagtctgacttcacgttgaatcattctggatggggcctttttctgattttacctcataaagctactattgtagaaacttggctttgctcctgtgacgaagccagacagaggaatggcttttgggaccagagtgagtcaagcatgtatgtgtatgtcacacggccaaatttgagggcattctcacatgtgctcttctctcaaaaccactggggttgacagatccaggaggctaaaaaaaagtgacctctataattctttaaaggtgctatttttagaatattgtataatttattcacagtatatctaaaacagaattaaggacaattaaaatatcttatgtgacagcctttatgtctagcacatttgatgaaataaaaaacttctgaatctgaatagaagttctactgtttcaggcttgaaccttttacatgctcaagagattcaaatggtctctgtgtgtagatcatgccaccgcctccaaagcctaatccacatcacttctgagaggcaaggctgagcatatggtgacatcagctctgtgttgagatggtgatgaggatgatggctcgctggccaggcagggcagccgaaggtcagggacctgtcctaactaactgcagccttgcctttagtgtttgtcattctcagatacaacacggtatgtccagtgtccgtttttattactttaaagcatttgagggcttaattgtgtatagtagaaatactattttagacaaataattatctgtgtacagatatttgatatactctaagtaaattttctaatttcactaagtacgtttttaggctcctctcaaatactgcgtattgaagaaaaaaatctgacaccaccgagccaaagatgcttttttgtctgttttcgttgtttaacagaatggaaagagtaatgcatagtgcttcctggtgtctcctgattgattgattgtgcacaaagtaggacgataaataaataaaatggagtctgatgggacattgattaaaggtgaaggatgattgatatatagatcatgaaaagaaaaatgaatggcaggaaaaaaagtttggtccttaatatactttggcctagttaaaatatgtgcctttttggtgtgttttgttcatcactacaagataaaaaggaaacattacaactcaagtctttaaaaagttcatttattgaaaatcatatgtataacctagcatacgaatgagcagatttaaacacataacttcaagccatttctgaaaacatacaccaggagctctgctcagctagagtcagactccagctccagcccgactgcgtgcggggacagcgcccgcgttgatgaggaccagccccactgcaggctgaggcggtgtcaccctgggaaggtcgtggtgcgttgtggcatattaagtctaaaccagatgaatgtaaatatctctttgtaaatcatttatttcactctgttccatccaggtcagcaatcagattgtggcatgctgggtaactggaaaaaataataaaaagtaagtttcaatagctcatgttcttcaatgttatttgtcttctcatttgctggtttagtcaccttttatgatgaaaactgttgttggagaaaaaaacctgttgctaaaaatgtggaaattatatgaaaagtttgtgcctcatcttgtccacatcaaagcccttcacatatgaaataaggttaactggtttaatgggttaaatttgaa

SEQ ID NO: 293385 - DNA, 7172 bp, Homo sapiens
aaaatttaacttttcatgtaaatgattttaactcgagttttcaacaatttttttcttctctttttttctttaacatacttccaaaaaatgctactacagactttaggcatgtggtgaatgaaatgctcttaggattattttcactttggggtgatggtgagagtgtatgcttatctgtgttgagtgtgtttgatctctgaatagattttatttgtattgatttcatagtttataaaaggaaaatatttaaatcatttaccatcttctattaatgggaaattttactcatttttatagggaagaatggacagaagctatccaggctgtagcagacagactgcagaggcaagaagaggagagaatgaattgtagtccaacttcacaaattgataatataggagaggaagagatggatgcctctacaacccatcataaaagaaagacaatgaatgattttgactatttgaaactactaggtaaaggcacttttgggaaagttattttggttcgagagaaggcaagtggaaaatactatgctatgaagattctgaagaaagaagtcattattgcaaaggatgaagtggcacacactctaactgaaagcagagtattaaagaacactagacatccctttttaacatccttgaaatattccttccagacaaaagaccgtttgtgttttgtgatggaatatgttaatgggggcgagctgtttttccatttgtcgagagagcgggtgttctctgaggaccgcacacgtttctatggtgcagaaattgtctctgccttggactatctacattccggaaagattgtgtaccgtgatctcaagttggagaatctaatgctggacaaagatggccacataaaaattacagattttggactttgcaaagaagggatcacagatgcagccaccatgaagacattctgtggcactccagaatatctggcaccagaggtgttagaagataatgactatggccgagcagtagactggtggggcctaggggttgtcatgtatgaaatgatgtgtgggaggttacctttctacaaccaggaccatgagaaactttttgaattaatattaatggaagacattaaatttcctcgaacactctcttcagatgcaaaatcattgctttcagggctcttgataaaggatccaaataaacgccttggtggaggaccagatgatgcaaaagaaattatgagacacagtttcttctctggagtaaactggcaagatgtatatgataaaaagcttgtacctccttttaaacctcaagtaacatctgagacagatactagatattttgatgaagaatttacagctcagactattacaataacaccacctgaaaaatatgatgaggatggtatggactgcatggacaatgagaggcggccgcatttccctcaattttcctactctgcaagtggacgagaataagtctctttcattctgctacttcactgtcatcttcaatttattactgaaaatgattcctggacatcaccagtcctagctcttacacatagcaggggcaccttccgacatcccagaccagccaagggtcctcacccctcgccacctttcaccctcatgaaaacacacatacacgcaaatacactccagtttttgtttttgcatgaaattgtatctcagtctaaggtctcatgctgttgctgctactgtcttactattatagcaactttaagaagtaattttccaacctttggaagtcatgagcccaccattgttcatttgtgcaccaattatcatcttttgatcttttagtttttccctcagtgaaggctaaatgagatacactgattctaggtacattttttaactttctagaagagaaaaactaactagactaagaagatttagtttataaattcagaacaagcaattgtggaagggtggtggcgtgcatatgtaaagcacatcagatccgtgcgtgaagtaggcatatatcactaagctgtggctggaattgattaggaagcatttggtagaaggactgaacaactgttgggatatatatatatatatataattttttttttttaaattcctggtggatactgtagaagcagcccatatcacatgtggatgtcgagacttcacgggcaatcatgagcaagtgaacactgttctaccaagaactgaaggcatatgcacagtcaaggtcacttaaagggtcttatgaaacaatttgagccagagagcatctttcccctgtgcttggaaaccttttttccttcttgacatttatcacctctgatggctgaagaatgtagacaggtataatgatactgcttttcaccaaaatttctacaccaaggtaaacaggtgtttgccttatttaattttttactttcagttctacgtgaattagctttttctcagatgttgaaactttgaatgtccttttatgattttgtttatattgcagtagtatttattttttagtgatgagaattgtatgtcatgttagcaaacgcagctccaacttatataaaatagacttactgcagttacttttgacccatgtgcaaggattgtacacgctgatgagaatcatgcactttttctcctctgttaaaaaaaatgataaggctctgaaatggaatatattggttagaatttggctttgggagaagagatgctgccatttaaccccttggtactgaaaatgagaaaatccccaactatgcatgccaaggggttaatgaaacaaatagctgttgacgtttgctcatttaagaatttgaaacgttatgatgacctggcaacaaaaagtaatgaagaaaattgagacctgagtgaagataagaaatgatctttacgtggcaaaatgaacacatcttgagtatttaggaaatgggcagtgaaggctaagaacctggtgtgtttcttgggatcatggtacatttatcactgaattaagccatcagggaaaaaacaacaaaaaaagagaacacctccagcttttctttttctgtatatactcatgtcccccagattccaacatttctcactgaaagggggcatgtatgcaaacctcatctttctccttcattaatgatgatcttcagattaaaccctttggtgctaggagctgacaatttccaaagcagcctgtgaagtcctaggggctgggggccactcttgcggcaagcagaaggccatcctactccgcggagtgatcatggaaatgtattttagttaaactctgacagctcccaaacggaagactacagcatgacgtagtattatgattgcattgtatgaaagagcaagtgactttctaagtaggatgaatcatattcatatgcagatgtcttagcctcttgacgctggaagtgtggatttatagctatgaaaccactgctggcagtgggtgggccactgggactgacgggggttaaagggcattttactaaggcagctaagacatattcagacatcaacgttatccttctttttcatatttctacctgagtgaagttcatccttagtattgagtaggaagttacagtaaatggtagttcattcttacttacacacatagctaatcttttttttttcacttggaattatgttgaatgtttcattttgacaaaaaagtagactagaaggtatgttctttaagttgtcttgcatccattatataagaaagaaacaggtgagaggaagagcagaaagctgagactggctgatgttcagagcacttactcctctagagggaaagcatgacaccgaacactaagcacacagctttttgttgttttggttttttctcccgcaaatcttaaagtgattcccatgaccttggccaaggacacttcttaaagattaatgactggcactgacattgccccaggcgggccactcctcacactggctctcagttcccagccatgcctggggctcagtcacttctattccaccctctgagactccattggtgtcacacaaggtgtcttcttggctttgattttgagaatcccctattttcacttccagatctgtcagctgccatggaggaataatagaaaaccagaaatgcgtgtagagggagatttctaaaacttcccttgtgtcgcccatagttgtagttttgggttctggcaggtggaacaccctgaaacctggaatcattctatgagaatacagttcagactttgcagactccagcccatactaactgtcatgaagcttgacttcttgtcataatgcagccatcttggaggaaattggccatttctgcttagatggttggcagggtcgcgctcagctttgctttctacactaattacatagcattattcaagtattgttttccatttcccatccctgatttccagcttcttaaagctgactgttcttgcaggggccacttgcttctcctagagtacaaaagtaagggccttccttactaactgcagggtctctctattacacctcaacatacacactttgctgctactgtttgtactgtctacagtagaatttccttatcttgctcctggtagtgcattacaggcaagcatgaaatgtaaagtatttatttaaataaaaagaaaacctctaaattggtaattgaattacctccctgtagctttatagtttgtgacatttcttgaccttgctagttctttcattagatctgcgcaagatctagtcatctggttaaggattttaagcagatgcaactataaacccaagaaactgtattactattactgttggtcatactaaacctgtctatttcctgaagtatatgacccacaaggatgtggaataactaggagaaactgtttttgtacactgtacatccttagtatttttacacgtatatgatagggatgaacatgattttccttcgtacagacagcttaaataaagcactatgtcaatctgctacttctctgtttattgttgttggatgtggttctataatccccccaaattaaatcttctttaatgaaaacatgatttttaatagccccagctggtattaacctaccttgtataaaatgtgacaggaaaatatagaaataattccttgtagctcacacacacacacataggggatcatttttacttcagtgaaatggcagtagtgcggttgtgcaaactttgatgaacggctgcttctgaggggaaacgctgacctctcagcactggatttaggatggatgtactgtgaagccagggatgaaggaggtctcagaccctggggacattcagacccgaatcatctatacaacacacggtttggacccagaatctgaaggaatgtagcttttcattaacgtcttcctgataatgtactgctctgcatatttcctttcttagagtgtatttctaacaacatgtcatggcaaattaacaaacttagacgtgggtgatgtagatgggtaggatggctggactgcagtctgacttcacgttgaatcattctggatggggcctttttctgattttacctcataaagctactattgtagaaacttggctttgctcctgtgacgaagccagacagaggaatggcttttgggaccagagtgagtcaagcatgtatgtgtatgtcacacggccaaatttgagggcattctcacatgtgctcttctctcaaaaccactggggttgacagatccaggaggctaaaaaaaagtgacctctataattctttaaaggtgctatttttagaatattgtataatttattcacagtatatctaaaacagaattaaggacaattaaaatatcttatgtgacagcctttatgtctagcacatttgatgaaataaaaaacttctgaatctgaatagaagttctactgtttcaggcttgaaccttttacatgctcaagagattcaaatggtctctgtgtgtagatcatgccaccgcctccaaagcctaatccacatcacttctgagaggcaaggctgagcatatggtgacatcagctctgtgttgagatggtgatgaggatgatggctcgctggccaggcagggcagccgaaggtcagggacctgtcctaactaactgcagccttgcctttagtgtttgtcattctcagatacaacacggtatgtccagtgtccgtttttattactttaaagcatttgagggcttaattgtgtatagtagaaatactattttagacaaataattatctgtgtacagatatttgatatactctaagtaaattttctaatttcactaagtacgtttttaggctcctctcaaatactgcgtattgaagaaaaaaatctgacaccaccgagccaaagatgcttttttgtctgttttcgttgtttaacagaatggaaagagtaatgcatagtgcttcctggtgtctcctgattgattgattgtgcacaaagtaggacgataaataaataaaatggagtctgatgggacattgattaaaggtgaaggatgattgatatatagatcatgaaaagaaaaatgaatggcaggaaaaaaagtttggtccttaatatactttggcctagttaaaatatgtgcctttttggtgtgttttgttcatcactacaagataaaaaggaaacattacaactcaagtctttaaaaagttcatttattgaaaatcatatgtataacctagcatacgaatgagcagatttaaacacataacttcaagccatttctgaaaacatacaccaggagctctgctcagctagagtcagactccagctccagcccgactgcgtgcggggacagcgcccgcgttgatgaggaccagccccactgcaggctgaggcggtgtcaccctgggaaggtcgtggtgcgttgtggcatattaagtctaaaccagatgaatgtaaatatctctttgtaaatcatttatttcactctgttccatccaggtcagcaatcagattgtggcatgctgggtaactggaaaaaataataaaaagtaagtttcaatagctcatgttcttcaatgttatttgtcttctcatttgctggtttagtcaccttttatgatgaaaactgttgttggagaaaaaaacctgttgctaaaaatgtggaaattatatgaaaagtttgtgcctcatcttgtccacatcaaagcccttcacatatgaaataaggttaactggtttaatgggttaaatttgaa

SEQ ID NO: 293386 - DNA, 6770 bp, Homo sapiens
gtgagggggaaactgcaatctgatgatgcatacctttttcctctggtaactgaaggttaaatgggtagcaagcagaatgccttaaacaagattggtatattgattaaaacgctgatttaacagctcgcagtttccccttggaaacctggaaaagataagccagctgctgtctaagagtgctcagtgtccactgagagtacactatctatcatcacaatatggtgatgagaggtgttttatgtttgtgttaatttcccccactaaatcagtaattattacaatcctgtccctgctgtttaccctgcagctgtttttccatttgtcgagagagcgggtgttctctgaggaccgcacacgtttctatggtgcagaaattgtctctgccttggactatctacattccggaaagattgtgtaccgtgatctcaagttggagaatctaatgctggacaaagatggccacataaaaattacagattttggactttgcaaagaagggatcacagatgcagccaccatgaagacattctgtggcactccagaatatctggcaccagaggtgttagaagataatgactatggccgagcagtagactggtggggcctaggggttgtcatgtatgaaatgatgtgtgggaggttacctttctacaaccaggaccatgagaaactttttgaattaatattaatggaagacattaaatttcctcgaacactctcttcagatgcaaaatcattgctttcagggctcttgataaaggatccaaataaacgccttggtggaggaccagatgatgcaaaagaaattatgagacacagtttcttctctggagtaaactggcaagatgtatatgataaaaagcttgtacctccttttaaacctcaagtaacatctgagacagatactagatattttgatgaagaatttacagctcagactattacaataacaccacctgaaaaatatgatgaggatggtatggactgcatggacaatgagaggcggccgcatttccctcaattttcctactctgcaagtggacgagaataagtctctttcattctgctacttcactgtcatcttcaatttattactgaaaatgattcctggacatcaccagtcctagctcttacacatagcaggggcaccttccgacatcccagaccagccaagggtcctcacccctcgccacctttcaccctcatgaaaacacacatacacgcaaatacactccagtttttgtttttgcatgaaattgtatctcagtctaaggtctcatgctgttgctgctactgtcttactattatagcaactttaagaagtaattttccaacctttggaagtcatgagcccaccattgttcatttgtgcaccaattatcatcttttgatcttttagtttttccctcagtgaaggctaaatgagatacactgattctaggtacattttttaactttctagaagagaaaaactaactagactaagaagatttagtttataaattcagaacaagcaattgtggaagggtggtggcgtgcatatgtaaagcacatcagatccgtgcgtgaagtaggcatatatcactaagctgtggctggaattgattaggaagcatttggtagaaggactgaacaactgttgggatatatatatatatatataattttttttttttaaattcctggtggatactgtagaagcagcccatatcacatgtggatgtcgagacttcacgggcaatcatgagcaagtgaacactgttctaccaagaactgaaggcatatgcacagtcaaggtcacttaaagggtcttatgaaacaatttgagccagagagcatctttcccctgtgcttggaaaccttttttccttcttgacatttatcacctctgatggctgaagaatgtagacaggtataatgatactgcttttcaccaaaatttctacaccaaggtaaacaggtgtttgccttatttaattttttactttcagttctacgtgaattagctttttctcagatgttgaaactttgaatgtccttttatgattttgtttatattgcagtagtatttattttttagtgatgagaattgtatgtcatgttagcaaacgcagctccaacttatataaaatagacttactgcagttacttttgacccatgtgcaaggattgtacacgctgatgagaatcatgcactttttctcctctgttaaaaaaaatgataaggctctgaaatggaatatattggttagaatttggctttgggagaagagatgctgccatttaaccccttggtactgaaaatgagaaaatccccaactatgcatgccaaggggttaatgaaacaaatagctgttgacgtttgctcatttaagaatttgaaacgttatgatgacctggcaacaaaaagtaatgaagaaaattgagacctgagtgaagataagaaatgatctttacgtggcaaaatgaacacatcttgagtatttaggaaatgggcagtgaaggctaagaacctggtgtgtttcttgggatcatggtacatttatcactgaattaagccatcagggaaaaaacaacaaaaaaagagaacacctccagcttttctttttctgtatatactcatgtcccccagattccaacatttctcactgaaagggggcatgtatgcaaacctcatctttctccttcattaatgatgatcttcagattaaaccctttggtgctaggagctgacaatttccaaagcagcctgtgaagtcctaggggctgggggccactcttgcggcaagcagaaggccatcctactccgcggagtgatcatggaaatgtattttagttaaactctgacagctcccaaacggaagactacagcatgacgtagtattatgattgcattgtatgaaagagcaagtgactttctaagtaggatgaatcatattcatatgcagatgtcttagcctcttgacgctggaagtgtggatttatagctatgaaaccactgctggcagtgggtgggccactgggactgacgggggttaaagggcattttactaaggcagctaagacatattcagacatcaacgttatccttctttttcatatttctacctgagtgaagttcatccttagtattgagtaggaagttacagtaaatggtagttcattcttacttacacacatagctaatcttttttttttcacttggaattatgttgaatgtttcattttgacaaaaaagtagactagaaggtatgttctttaagttgtcttgcatccattatataagaaagaaacaggtgagaggaagagcagaaagctgagactggctgatgttcagagcacttactcctctagagggaaagcatgacaccgaacactaagcacacagctttttgttgttttggttttttctcccgcaaatcttaaagtgattcccatgaccttggccaaggacacttcttaaagattaatgactggcactgacattgccccaggcgggccactcctcacactggctctcagttcccagccatgcctggggctcagtcacttctattccaccctctgagactccattggtgtcacacaaggtgtcttcttggctttgattttgagaatcccctattttcacttccagatctgtcagctgccatggaggaataatagaaaaccagaaatgcgtgtagagggagatttctaaaacttcccttgtgtcgcccatagttgtagttttgggttctggcaggtggaacaccctgaaacctggaatcattctatgagaatacagttcagactttgcagactccagcccatactaactgtcatgaagcttgacttcttgtcataatgcagccatcttggaggaaattggccatttctgcttagatggttggcagggtcgcgctcagctttgctttctacactaattacatagcattattcaagtattgttttccatttcccatccctgatttccagcttcttaaagctgactgttcttgcaggggccacttgcttctcctagagtacaaaagtaagggccttccttactaactgcagggtctctctattacacctcaacatacacactttgctgctactgtttgtactgtctacagtagaatttccttatcttgctcctggtagtgcattacaggcaagcatgaaatgtaaagtatttatttaaataaaaagaaaacctctaaattggtaattgaattacctccctgtagctttatagtttgtgacatttcttgaccttgctagttctttcattagatctgcgcaagatctagtcatctggttaaggattttaagcagatgcaactataaacccaagaaactgtattactattactgttggtcatactaaacctgtctatttcctgaagtatatgacccacaaggatgtggaataactaggagaaactgtttttgtacactgtacatccttagtatttttacacgtatatgatagggatgaacatgattttccttcgtacagacagcttaaataaagcactatgtcaatctgctacttctctgtttattgttgttggatgtggttctataatccccccaaattaaatcttctttaatgaaaacatgatttttaatagccccagctggtattaacctaccttgtataaaatgtgacaggaaaatatagaaataattccttgtagctcacacacacacacataggggatcatttttacttcagtgaaatggcagtagtgcggttgtgcaaactttgatgaacggctgcttctgaggggaaacgctgacctctcagcactggatttaggatggatgtactgtgaagccagggatgaaggaggtctcagaccctggggacattcagacccgaatcatctatacaacacacggtttggacccagaatctgaaggaatgtagcttttcattaacgtcttcctgataatgtactgctctgcatatttcctttcttagagtgtatttctaacaacatgtcatggcaaattaacaaacttagacgtgggtgatgtagatgggtaggatggctggactgcagtctgacttcacgttgaatcattctggatggggcctttttctgattttacctcataaagctactattgtagaaacttggctttgctcctgtgacgaagccagacagaggaatggcttttgggaccagagtgagtcaagcatgtatgtgtatgtcacacggccaaatttgagggcattctcacatgtgctcttctctcaaaaccactggggttgacagatccaggaggctaaaaaaaagtgacctctataattctttaaaggtgctatttttagaatattgtataatttattcacagtatatctaaaacagaattaaggacaattaaaatatcttatgtgacagcctttatgtctagcacatttgatgaaataaaaaacttctgaatctgaatagaagttctactgtttcaggcttgaaccttttacatgctcaagagattcaaatggtctctgtgtgtagatcatgccaccgcctccaaagcctaatccacatcacttctgagaggcaaggctgagcatatggtgacatcagctctgtgttgagatggtgatgaggatgatggctcgctggccaggcagggcagccgaaggtcagggacctgtcctaactaactgcagccttgcctttagtgtttgtcattctcagatacaacacggtatgtccagtgtccgtttttattactttaaagcatttgagggcttaattgtgtatagtagaaatactattttagacaaataattatctgtgtacagatatttgatatactctaagtaaattttctaatttcactaagtacgtttttaggctcctctcaaatactgcgtattgaagaaaaaaatctgacaccaccgagccaaagatgcttttttgtctgttttcgttgtttaacagaatggaaagagtaatgcatagtgcttcctggtgtctcctgattgattgattgtgcacaaagtaggacgataaataaataaaatggagtctgatgggacattgattaaaggtgaaggatgattgatatatagatcatgaaaagaaaaatgaatggcaggaaaaaaagtttggtccttaatatactttggcctagttaaaatatgtgcctttttggtgtgttttgttcatcactacaagataaaaaggaaacattacaactcaagtctttaaaaagttcatttattgaaaatcatatgtataacctagcatacgaatgagcagatttaaacacataacttcaagccatttctgaaaacatacaccaggagctctgctcagctagagtcagactccagctccagcccgactgcgtgcggggacagcgcccgcgttgatgaggaccagccccactgcaggctgaggcggtgtcaccctgggaaggtcgtggtgcgttgtggcatattaagtctaaaccagatgaatgtaaatatctctttgtaaatcatttatttcactctgttccatccaggtcagcaatcagattgtggcatgctgggtaactggaaaaaataataaaaagtaagtttcaatagctcatgttcttcaatgttatttgtcttctcatttgctggtttagtcaccttttatgatgaaaactgttgttggagaaaaaaacctgttgctaaaaatgtggaaattatatgaaaagtttgtgcctcatcttgtccacatcaaagcccttcacatatgaaataaggttaactggtttaatgggttaaatttgaa

SEQ ID NO: 293387 - DNA, 6332 bp, Homo sapiens
tttatcatagggaaattgggaaaggtgagttaagccagatgctagatgttgaatgaaatttcataagaagctttattttgcagttgcacttaaagcatcacaaagaaaaaatataagcacttgaagacattcgatgatgaattctatacagactttggatgctgtggatttcactgacttgcagttttgatatatgtggttacatgaaatgaaaggttactgaagactgctccttcttaaaaacttctgttttcttcaataccatttttttcactgtttcattgagtcttgaaattttgatgtcttagagatgattctatagtattatttcttcatagactatgtatttatgaaaatcagatgatttttgaagtataattactctacagcttattgatgaacacaagtttatgggagctattgcctctgttcatctttcctatgttcagagtttaaaaaacatagactagagataatgttgcaaaaaatgaatgtgtaaaattaaaatagatgtttcctgcccacagatgatgaggatggtatggactgcatggacaatgagaggcggccgcatttccctcaattttcctactctgcaagtggacgagaataagtctctttcattctgctacttcactgtcatcttcaatttattactgaaaatgattcctggacatcaccagtcctagctcttacacatagcaggggcaccttccgacatcccagaccagccaagggtcctcacccctcgccacctttcaccctcatgaaaacacacatacacgcaaatacactccagtttttgtttttgcatgaaattgtatctcagtctaaggtctcatgctgttgctgctactgtcttactattatagcaactttaagaagtaattttccaacctttggaagtcatgagcccaccattgttcatttgtgcaccaattatcatcttttgatcttttagtttttccctcagtgaaggctaaatgagatacactgattctaggtacattttttaactttctagaagagaaaaactaactagactaagaagatttagtttataaattcagaacaagcaattgtggaagggtggtggcgtgcatatgtaaagcacatcagatccgtgcgtgaagtaggcatatatcactaagctgtggctggaattgattaggaagcatttggtagaaggactgaacaactgttgggatatatatatatatatataattttttttttttaaattcctggtggatactgtagaagcagcccatatcacatgtggatgtcgagacttcacgggcaatcatgagcaagtgaacactgttctaccaagaactgaaggcatatgcacagtcaaggtcacttaaagggtcttatgaaacaatttgagccagagagcatctttcccctgtgcttggaaaccttttttccttcttgacatttatcacctctgatggctgaagaatgtagacaggtataatgatactgcttttcaccaaaatttctacaccaaggtaaacaggtgtttgccttatttaattttttactttcagttctacgtgaattagctttttctcagatgttgaaactttgaatgtccttttatgattttgtttatattgcagtagtatttattttttagtgatgagaattgtatgtcatgttagcaaacgcagctccaacttatataaaatagacttactgcagttacttttgacccatgtgcaaggattgtacacgctgatgagaatcatgcactttttctcctctgttaaaaaaaatgataaggctctgaaatggaatatattggttagaatttggctttgggagaagagatgctgccatttaaccccttggtactgaaaatgagaaaatccccaactatgcatgccaaggggttaatgaaacaaatagctgttgacgtttgctcatttaagaatttgaaacgttatgatgacctggcaacaaaaagtaatgaagaaaattgagacctgagtgaagataagaaatgatctttacgtggcaaaatgaacacatcttgagtatttaggaaatgggcagtgaaggctaagaacctggtgtgtttcttgggatcatggtacatttatcactgaattaagccatcagggaaaaaacaacaaaaaaagagaacacctccagcttttctttttctgtatatactcatgtcccccagattccaacatttctcactgaaagggggcatgtatgcaaacctcatctttctccttcattaatgatgatcttcagattaaaccctttggtgctaggagctgacaatttccaaagcagcctgtgaagtcctaggggctgggggccactcttgcggcaagcagaaggccatcctactccgcggagtgatcatggaaatgtattttagttaaactctgacagctcccaaacggaagactacagcatgacgtagtattatgattgcattgtatgaaagagcaagtgactttctaagtaggatgaatcatattcatatgcagatgtcttagcctcttgacgctggaagtgtggatttatagctatgaaaccactgctggcagtgggtgggccactgggactgacgggggttaaagggcattttactaaggcagctaagacatattcagacatcaacgttatccttctttttcatatttctacctgagtgaagttcatccttagtattgagtaggaagttacagtaaatggtagttcattcttacttacacacatagctaatcttttttttttcacttggaattatgttgaatgtttcattttgacaaaaaagtagactagaaggtatgttctttaagttgtcttgcatccattatataagaaagaaacaggtgagaggaagagcagaaagctgagactggctgatgttcagagcacttactcctctagagggaaagcatgacaccgaacactaagcacacagctttttgttgttttggttttttctcccgcaaatcttaaagtgattcccatgaccttggccaaggacacttcttaaagattaatgactggcactgacattgccccaggcgggccactcctcacactggctctcagttcccagccatgcctggggctcagtcacttctattccaccctctgagactccattggtgtcacacaaggtgtcttcttggctttgattttgagaatcccctattttcacttccagatctgtcagctgccatggaggaataatagaaaaccagaaatgcgtgtagagggagatttctaaaacttcccttgtgtcgcccatagttgtagttttgggttctggcaggtggaacaccctgaaacctggaatcattctatgagaatacagttcagactttgcagactccagcccatactaactgtcatgaagcttgacttcttgtcataatgcagccatcttggaggaaattggccatttctgcttagatggttggcagggtcgcgctcagctttgctttctacactaattacatagcattattcaagtattgttttccatttcccatccctgatttccagcttcttaaagctgactgttcttgcaggggccacttgcttctcctagagtacaaaagtaagggccttccttactaactgcagggtctctctattacacctcaacatacacactttgctgctactgtttgtactgtctacagtagaatttccttatcttgctcctggtagtgcattacaggcaagcatgaaatgtaaagtatttatttaaataaaaagaaaacctctaaattggtaattgaattacctccctgtagctttatagtttgtgacatttcttgaccttgctagttctttcattagatctgcgcaagatctagtcatctggttaaggattttaagcagatgcaactataaacccaagaaactgtattactattactgttggtcatactaaacctgtctatttcctgaagtatatgacccacaaggatgtggaataactaggagaaactgtttttgtacactgtacatccttagtatttttacacgtatatgatagggatgaacatgattttccttcgtacagacagcttaaataaagcactatgtcaatctgctacttctctgtttattgttgttggatgtggttctataatccccccaaattaaatcttctttaatgaaaacatgatttttaatagccccagctggtattaacctaccttgtataaaatgtgacaggaaaatatagaaataattccttgtagctcacacacacacacataggggatcatttttacttcagtgaaatggcagtagtgcggttgtgcaaactttgatgaacggctgcttctgaggggaaacgctgacctctcagcactggatttaggatggatgtactgtgaagccagggatgaaggaggtctcagaccctggggacattcagacccgaatcatctatacaacacacggtttggacccagaatctgaaggaatgtagcttttcattaacgtcttcctgataatgtactgctctgcatatttcctttcttagagtgtatttctaacaacatgtcatggcaaattaacaaacttagacgtgggtgatgtagatgggtaggatggctggactgcagtctgacttcacgttgaatcattctggatggggcctttttctgattttacctcataaagctactattgtagaaacttggctttgctcctgtgacgaagccagacagaggaatggcttttgggaccagagtgagtcaagcatgtatgtgtatgtcacacggccaaatttgagggcattctcacatgtgctcttctctcaaaaccactggggttgacagatccaggaggctaaaaaaaagtgacctctataattctttaaaggtgctatttttagaatattgtataatttattcacagtatatctaaaacagaattaaggacaattaaaatatcttatgtgacagcctttatgtctagcacatttgatgaaataaaaaacttctgaatctgaatagaagttctactgtttcaggcttgaaccttttacatgctcaagagattcaaatggtctctgtgtgtagatcatgccaccgcctccaaagcctaatccacatcacttctgagaggcaaggctgagcatatggtgacatcagctctgtgttgagatggtgatgaggatgatggctcgctggccaggcagggcagccgaaggtcagggacctgtcctaactaactgcagccttgcctttagtgtttgtcattctcagatacaacacggtatgtccagtgtccgtttttattactttaaagcatttgagggcttaattgtgtatagtagaaatactattttagacaaataattatctgtgtacagatatttgatatactctaagtaaattttctaatttcactaagtacgtttttaggctcctctcaaatactgcgtattgaagaaaaaaatctgacaccaccgagccaaagatgcttttttgtctgttttcgttgtttaacagaatggaaagagtaatgcatagtgcttcctggtgtctcctgattgattgattgtgcacaaagtaggacgataaataaataaaatggagtctgatgggacattgattaaaggtgaaggatgattgatatatagatcatgaaaagaaaaatgaatggcaggaaaaaaagtttggtccttaatatactttggcctagttaaaatatgtgcctttttggtgtgttttgttcatcactacaagataaaaaggaaacattacaactcaagtctttaaaaagttcatttattgaaaatcatatgtataacctagcatacgaatgagcagatttaaacacataacttcaagccatttctgaaaacatacaccaggagctctgctcagctagagtcagactccagctccagcccgactgcgtgcggggacagcgcccgcgttgatgaggaccagccccactgcaggctgaggcggtgtcaccctgggaaggtcgtggtgcgttgtggcatattaagtctaaaccagatgaatgtaaatatctctttgtaaatcatttatttcactctgttccatccaggtcagcaatcagattgtggcatgctgggtaactggaaaaaataataaaaagtaagtttcaatagctcatgttcttcaatgttatttgtcttctcatttgctggtttagtcaccttttatgatgaaaactgttgttggagaaaaaaacctgttgctaaaaatgtggaaattatatgaaaagtttgtgcctcatcttgtccacatcaaagcccttcacatatgaaataaggttaactggtttaatgggttaaatttgaa

SEQ ID NO: 293388 - DNA, 4541 bp, Homo sapiens
gatgtgtgggaggttacctttctacaaccaggaccatgagaaactttttgaattaatattaatggaagacattaaatttcctcgaacactctcttcagatgcaaaatcattgctttcagggctcttgataaaggatccaaataaacgccttggtggaggaccagatgatgcaaaagaaattatgagacacagtttcttctctggagtaaactggcaagatgtatatgataaaaaggctgagtcatcactagagagtgggaaggggcagcagcagagaatccaaaccctaaagctgatatcacaaagtaccatttctccaagttgggggctcagaggggagtcatcatgagcgatgttaccattgtgaaagaaggttgggttcagaagaggggagaatatataaaaaactggaggccaagatacttccttttgaagacagatggctcattcataggatataaagagaaacctcaagatgtggatttaccttatcccctcaacaacttttcagtggcaaaatgccagttaatgaaaacagaacgaccaaagccaaacacatttataatcagatgtctccagtggactactgttatagagagaacatttcatgtagatactccagaggaaagggaagaatggacagaagctatccaggctgtagcagacagactgcagaggcaagaagaggagagaatgaattgtagtccaacttcacaaattgataatataggagaggaagagatggatgcctctacaacccatcataaaagaaagacaatgaatgattttgactatttgaaactactaggtaaaggcacttttgggaaagttattttggttcgagagaaggcaagtggaaaatactatgctatgaagattctgaagaaagaagtcattattgcaaaggatgaagtggcacacactctaactgaaagcagagtattaaagaacactagacatccctttttaacatccttgaaatattccttccagacaaaagaccgtttgtgttttgtgatggaatatgttaatgggggcgagctgtttttccatttgtcgagagagcgggtgttctctgaggaccgcacacgtttctatggtgcagaaattgtctctgccttggactatctacattccggaaagattgtgtaccgtgatctcaagttggagaatctaatgctggacaaagatggccacataaaaattacagattttggactttgcaaagaagggatcacagatgcagccaccatgaagacattctgtggcactccagaatatctggcaccagaggtgttagaagataatgactatggccgagcagtagactggtggggcctaggggttgtcatgtatgaaatgatgtgtgggaggttacctttctacaaccaggaccatgagaaactttttgaattaatattaatggaagacattaaatttcctcgaacactctcttcagatgcaaaatcattgctttcagggctcttgataaaggatccaaataaacgccttggtggaggaccagatgatgcaaaagaaattatgagacacagtttcttctctggagtaaactggcaagatgtatatgataaaaagcttgtacctccttttaaacctcaagtaacatcttggaggaaattggccatttctgcttagatggttggcagggtcgcgctcagctttgctttctacactaattacatagcattattcaagtattgttttccatttcccatccctgatttccagcttcttaaagctgactgttcttgcaggggccacttgcttctcctagagtacaaaagtaagggccttccttactaactgcagggtctctctattacacctcaacatacacactttgctgctactgtttgtactgtctacagtagaatttccttatcttgctcctggtagtgcattacaggcaagcatgaaatgtaaagtatttatttaaataaaaagaaaacctctaaattggtaattgaattacctccctgtagctttatagtttgtgacatttcttgaccttgctagttctttcattagatctgcgcaagatctagtcatctggttaaggattttaagcagatgcaactataaacccaagaaactgtattactattactgttggtcatactaaacctgtctatttcctgaagtatatgacccacaaggatgtggaataactaggagaaactgtttttgtacactgtacatccttagtatttttacacgtatatgatagggatgaacatgattttccttcgtacagacagcttaaataaagcactatgtcaatctgctacttctctgtttattgttgttggatgtggttctataatccccccaaattaaatcttctttaatgaaaacatgatttttaatagccccagctggtattaacctaccttgtataaaatgtgacaggaaaatatagaaataattccttgtagctcacacacacacacataggggatcatttttacttcagtgaaatggcagtagtgcggttgtgcaaactttgatgaacggctgcttctgaggggaaacgctgacctctcagcactggatttaggatggatgtactgtgaagccagggatgaaggaggtctcagaccctggggacattcagacccgaatcatctatacaacacacggtttggacccagaatctgaaggaatgtagcttttcattaacgtcttcctgataatgtactgctctgcatatttcctttcttagagtgtatttctaacaacatgtcatggcaaattaacaaacttagacgtgggtgatgtagatgggtaggatggctggactgcagtctgacttcacgttgaatcattctggatggggcctttttctgattttacctcataaagctactattgtagaaacttggctttgctcctgtgacgaagccagacagaggaatggcttttgggaccagagtgagtcaagcatgtatgtgtatgtcacacggccaaatttgagggcattctcacatgtgctcttctctcaaaaccactggggttgacagatccaggaggctaaaaaaaagtgacctctataattctttaaaggtgctatttttagaatattgtataatttattcacagtatatctaaaacagaattaaggacaattaaaatatcttatgtgacagcctttatgtctagcacatttgatgaaataaaaaacttctgaatctgaatagaagttctactgtttcaggcttgaaccttttacatgctcaagagattcaaatggtctctgtgtgtagatcatgccaccgcctccaaagcctaatccacatcacttctgagaggcaaggctgagcatatggtgacatcagctctgtgttgagatggtgatgaggatgatggctcgctggccaggcagggcagccgaaggtcagggacctgtcctaactaactgcagccttgcctttagtgtttgtcattctcagatacaacacggtatgtccagtgtccgtttttattactttaaagcatttgagggcttaattgtgtatagtagaaatactattttagacaaataattatctgtgtacagatatttgatatactctaagtaaattttctaatttcactaagtacgtttttaggctcctctcaaatactgcgtattgaagaaaaaaatctgacaccaccgagccaaagatgcttttttgtctgttttcgttgtttaacagaatggaaagagtaatgcatagtgcttcctggtgtctcctgattgattgattgtgcacaaagtaggacgataaataaataaaatggagtctgatgggacattgattaaaggtgaaggatgattgatatatagatcatgaaaagaaaaatgaatggcaggaaaaaaagtttggtccttaatatactttggcctagttaaaatatgtgcctttttggtgtgttttgttcatcactacaagataaaaaggaaacattacaactcaagtctttaaaaagttcatttattgaaaatcatatgtataacctagcatacgaatgagcagatttaaacacataacttcaagccatttctgaaaacatacaccaggagctctgctcagctagagtcagactccagctccagcccgactgcgtgcggggacagcgcccgcgttgatgaggaccagccccactgcaggctgaggcggtgtcaccctgggaaggtcgtggtgcgttgtggcatattaagtctaaaccagatgaatgtaaatatctctttgtaaatcatttatttcactctgttccatccaggtcagcaatcagattgtggcatgctgggtaactggaaaaaataataaaaagtaagtttcaatagctcatgttcttcaatgttatttgtcttctcatttgctggtttagtcaccttttatgatgaaaactgttgttggagaaaaaaacctgttgctaaaaatgtggaaattatatgaaaagtttgtgcctcatcttgtccacatcaaagcccttcacatatgaaataaggttaactggtttaatgggttaaatttgaa

SEQ ID NO: 293389 - DNA, 1967 bp, Homo sapiens
gatgtgtgggaggttacctttctacaaccaggaccatgagaaactttttgaattaatattaatggaagacattaaatttcctcgaacactctcttcagatgcaaaatcattgctttcagggctcttgataaaggatccaaataaacgccttggtggaggaccagatgatgcaaaagaaattatgagacacagtttcttctctggagtaaactggcaagatgtatatgataaaaaggctgagtcatcactagagagtgggaaggggcagcagcagagaatccaaaccctaaagctgatatcacaaagtaccatttctccaagttgggggctcagaggggagtcatcatgagcgatgttaccattgtgaaagaaggttgggttcagaagaggggagaatatataaaaaactggaggccaagatacttccttttgaagacagatggctcattcataggatataaagagaaacctcaagatgtggatttaccttatcccctcaacaacttttcagtggcaaaatgccagttaatgaaaacagaacgaccaaagccaaacacatttataatcagatgtctccagtggactactgttatagagagaacatttcatgtagatactccagaggaaagggaagaatggacagaagctatccaggctgtagcagacagactgcagaggcaagaagaggagagaatgaattgtagtccaacttcacaaattgataatataggagaggaagagatggatgcctctacaacccatcataaaagaaagacaatgaatgattttgactatttgaaactactaggtaaaggcacttttgggaaagttattttggttcgagagaaggcaagtggaaaatactatgctatgaagattctgaagaaagaagtcattattgcaaaggatgaagtggcacacactctaactgaaagcagagtattaaagaacactagacatccctttttaacatccttgaaatattccttccagacaaaagaccgtttgtgttttgtgatggaatatgttaatgggggcgagctgtttttccatttgtcgagagagcgggtgttctctgaggaccgcacacgtttctatggtgcagaaattgtctctgccttggactatctacattccggaaagattgtgtaccgtgatctcaagttggagaatctaatgctggacaaagatggccacataaaaattacagattttggactttgcaaagaagggatcacagatgcagccaccatgaagacattctgtggcactccagaatatctggcaccagaggtgttagaagataatgactatggccgagcagtagactggtggggcctaggggttgtcatgtatgaaatgatgtgtgggaggttacctttctacaaccaggaccatgagaaactttttgaattaatattaatggaagacattaaatttcctcgaacactctcttcagatgcaaaatcattgctttcagggctcttgataaaggatccaaataaacgccttggtggaggaccagatgatgcaaaagaaattatgagacacagtttcttctctggagtaaactggcaagatgtatatgataaaaagcttgtacctccttttaaacctcaagtaacatctgagacagatactagatattttgatgaagaatttacagctcagactattacaataacaccacctgaaaaatgtcagcaatcagattgtggcatgctgggtaactggaaaaaataataaaaatcggcttcctacagccagcagcacagtcacccatggaactgttggctttggattaaatgtggaattgaacgactacccagaagtgttctggaaagaagcgagatgtgtggcctgcctcaccgtcctcacccatcaaaagcaccagcaggcacgttaactcgaattctcacaaggaaaaggccattaaagctcaaggtgcatttcaaactccaggctac

SEQ ID NO: 293390 - DNA, 1600 bp, Homo sapiens
gatgtgtgggaggttacctttctacaaccaggaccatgagaaactttttgaattaatattaatggaagacattaaatttcctcgaacactctcttcagatgcaaaatcattgctttcagggctcttgataaaggatccaaataaacgccttggtggaggaccagatgatgcaaaagaaattatgagacacagtttcttctctggagtaaactggcaagatgtatatgataaaaaggctgagtcatcactagagagtgggaaggggcagcagcagagaatccaaaccctaaagctgatatcacaaagtaccatttctccaagttgggggctcagaggggagtcatcatgagcgatgttaccattgtgaaagaaggttgggttcagaagaggggagaatatataaaaaactggaggccaagatacttccttttgaagacagatggctcattcataggatataaagagaaacctcaagatgtggatttaccttatcccctcaacaacttttcagtggcaaaatgccagttaatgaaaacagaacgaccaaagccaaacacatttataatcagatgtctccagtggactactgttatagagagaacatttcatgtagatactccagaggaaagggaagaatggacagaagctatccaggctgtagcagacagactgcagaggcaagaagaggagagaatgaattgtagtccaacttcacaaattgataatataggagaggaagagatggatgcctctacaacccatcataaaagaaagacaatgaatgattttgactatttgaaactactaggtaaaggcacttttgggaaagttattttggttcgagagaaggcaagtggaaaatactatgctatgaagattctgaagaaagaagtcattattgcaaaggatgaagtggcacacactctaactgaaagcagagtattaaagaacactagacatccctttttaacatccttgaaatattccttccagacaaaagaccgtttgtgttttgtgatggaatatgttaatgggggcgagatggagtttcgctctgtcgtcaggctggagtgcagcagcacaatctaagcttactaccacctctgcctcccgggttcaagcgattctcctgcctcagccccccgagtagttgagactacaggcgcgcaccgccacacccagctaatttttgtatttttagtagagatggggtttcaccatgttggccaggatggtctcgatctcctgaccttgtgatccgtctgcctcagcctcccaaagtgctgggattacaggcgtgagccaccacgccgggcctaccatgactatatttaagagactgacaatattttggagataaatttaatatttttattagcacatttcactcattcctttattccttctcctttctcttccttggttttgatcacagtcaatgtgagggaaaagtaaatttactggaaaagctaactggaaatatttttattgtgggctttctgaaataaatttaattattaaatagggtcttgtttgtgtctcatgaacttaaaatattcttattttccaaaataaataattaaatatcctttatggaatt

SEQ ID NO: 293391 - DNA, 1375 bp, Homo sapiens
gatgtgtgggaggttacctttctacaaccaggaccatgagaaactttttgaattaatattaatggaagacattaaatttcctcgaacactctcttcagatgcaaaatcattgctttcagggctcttgataaaggatccaaataaacgccttggtggaggaccagatgatgcaaaagaaattatgagacacagtttcttctctggagtaaactggcaagatgtatatgataaaaaggctgagtcatcactagagagtgggaaggggcagcagcagagaatccaaaccctaaagctgatatcacaaagtaccatttctccaagttgggggctcagaggggagtcatcatgagcgatgttaccattgtgaaagaaggttgggttcagaagaggggagaatatataaaaaactggaggccaagatacttccttttgaagacagatggctcattcataggatataaagagaaacctcaagatgtggatttaccttatcccctcaacaacttttcagtggcaagtagtgttatgttcagatatttgcagaatttaaccttaaaccaagtttagaattgggaatggagaaaacctttgtaaaaattattttaaaatgagatcatttttaagaaaactataatgtaacaatgtcacatatttccttcttcaggctccaattcaaatcatactccaatttgaaaagaacaaaaattccacaaaacgttcattctttcctactttttccttacgttgtacaacaaatgtggaaagaaaaaaaaaacagaaaaagtgtatcccatcttaatgaaaatgactgcggcagtcaagagtttcaaatccagctgccaggggtgaaagcaaccctctgcatctctgaaagatttcatcagtgttatctcctttataatcataacttttcatgtgtatcatctgagtttcttattaaataatctcactattttaatagttccttcattataacactacaggtgatctgatcagatttctgttttagagcctgcttcctcttctttagtagcttccacgatctcccagccttttcctgatttgtattcccaagccaatcattttagttacagtctttactttctgagcctcttttatcagaatataaggaatggggggcttatttagaatcaaagggaatggtaaacttgtagacagacagctgaccatgcatactcattttaaaaatgtcccacagcattttattacaatatctggtatactggaacatcattgcgacttgtagtcagaagacctgactttgggactaggttctacctgctttactagctatgtgatcttggcgcaatcacttaacttctctgatttccatttgcttcatctttgaaccatg

SEQ ID NO: 293392 - DNA, 594 bp, Homo sapiens
  misc_feature (1)..(1): n is a, c, g, or t
  misc_feature (5)..(5): n is a, c, g, or t
  misc_feature (9)..(9): n is a, c, g, or t
ntccnccgnagagctccaccgctgaggccgacgaggccgaaagttcatttattgaaaatcatatgtataacctagcatacgaatgagcagatttaaacacataacttcaagccatttctgaaaacatacaccaggagctctgctcagctagagtcagactccagctccagcccgactgcgtgcggggacagcgcccgcgttgatgaggaccagccccactgcaggctgaggcggtgtcaccctgggaaggtcgtggtgcgttgtggcatattaagtctaaaccagatgaatgtaaatatctctttgtaaatcatttatttcactctgttccatccaggtcagcaatcagattgtggcatgctgggtaactggaaaaaataataaaaagtaagtttcaatagctcatgttcttcaatgttatttgtcttctcatttgctggtttagtcaccttttatgatgaaaactgttgttggagaaaaaaacctgttgctaaaaatgtggaaattatatgaaaagtttgtgcctcatcttgtccacatcaaagcccttcacatatgaaataaggttaactggtttaatgggttaaatttgaa

SEQ ID NO: 293393 - DNA, 556 bp, Homo sapiens
  misc_feature (1)..(1): n is a, c, g, or t
  misc_feature (5)..(5): n is a, c, g, or t
  misc_feature (9)..(9): n is a, c, g, or t
ntccnccgnagagctccaccgctgaggccgacgaggccgaaagttcatttattgaaaatcatatgtataacctagcatacgaatgagcagatttaaacacataacttcaagccatttctgaaaacatacaccaggagctctgctcagctagagtcagactccagctccagcccgactgcgtgcggggacagcgcccgcgttgatgaggaccagccccactgcaggctgaggcggtgtcaccctgggaaggtcgtggtgcgttgtggcatattaagtctaaaccagatgaatgtaaatatctctttgtaaatcatttatttcactctgttccatccaggtcagcaatcagattgtggcatgctgggtaactgggtccgcagccggtccacctcttccgacaggctctgcctctccaggagaagctggttctgcttgctgaggagctgcaccagctgctgggctgtggcctggctgtgcttatccagctgccttagctaaaaatttgttgggttttgaggttttacggcaagagtagattatacataatttcgaccat

SEQ ID NO: 293394 - DNA, 722 bp, Homo sapiens
gatgtgtgggaggttacctttctacaaccaggaccatgagaaactttttgaattaatattaatggaagacattaaatttcctcgaacactctcttcagatgcaaaatcattgctttcagggctcttgataaaggatccaaataaacgccttggtggaggaccagatgatgcaaaagaaattatgagacacagtttcttctctggagtaaactggcaagatgtatatgataaaaaggctgagtcatcactagagagtgggaaggggcagcagcagagaatccaaaccctaaagctgatatcacaaagtaccatttctccaagttgggggctcagaggggagtcatcatgagcgatgttaccattgtgaaagaaggttgggttcagaagaggggtaagtgctccgcaaaccaaaaataatacggttggtaagagtgctagcagtgagtggtgtcttagaagttgatcttttttctgatactgttaaactgtgtcatgctatgtctagtaagagagaaatgatatatttaacgtgtgttaggaatttgcttgttattaagggatttttttgtaattcttgattttgagcatttataatctagttaagttaggtttgactttctggtatgttgtgtgtagcgtgttacagaaagtgttgtatttttctgtggtgtctacaggttctgtaatctggagagatatctttagaatcatttaatatatgt

SEQ ID NO: 293395 - DNA, 305 bp, Homo sapiens
ggaaaatactatgctatgaagattctgaagaaagaagtcattattgcaaaggtaactgatttattaaagttgattactaaatttttgtttgcagtgtgcatgtgtttgtgggctcatgaatttacatgctaatgtatgcaaattccattaaacaaccaaaatatggttgtagactactgctacagtaatttttgtgtattaatatttgtaatttttaaagttttcagacattcataatatttgtatattatatactaaagctattctcttaaggaaatagaaatgtttatgtttgcatgtttggg

SEQ ID NO: 293396 - DNA, 374 bp, Homo sapiens
tctggagatcttaatttttttggtgcagccaaagaataagtcctccagggacaggtagagatcccgttcgacttgggggtcctgcttcttgacccctcggccctggagccccccaaagttcaaatctacctcacttccttctgcatcaaaaaactctgcaggaggaaagggaggcactccctctggtggccgcgctcaggagtgccagaagagactgctggtagtcctcggcaggaagtgcaaagacagccccatcctggctctgcccctgatgtgctgtgtgatccgtgggcttcagtgtcttggtctgtgggatggggtaataatgcctgacctgccttccaccattaagatgaagagctaaaacttgctga

SEQ ID NO: 293397 - DNA, 1482 bp, Homo sapiens
ctttggtgctggaagaattcgcgtggcaggagaggcggggccaattttgctgagctttctcgcgggcttgcagctgcggcaagtgctggcggcggctgctcgcgcaagtcagctggcgtgggaactaccctttgtagctgagaacggcttgtttattgctacaaagactctattgacattggtagcttcagcggcagcagcttcttacggtataaagctgttgcttcctgaagaggctacaagcatccttccctaggactgctgtaagctttgagcctctagcaggagacatgcctcggggacgaaagagtcggcgccgccgtaatgcgagagccgcagaagagaaccgcaacaatcgcaaaatccaggcctcagaggcctccgagacccctatggccgcctctgtggtagcgagcacccccgaagacgacctgagcggccccgaggaagacccgagcactccagaggaggcctctaccacccctgaagaagcctcgagcactgcccaagcacaaaagccttcagtgccccggagcaattttcagggcaccaagaaaagtctcctgatgtctatattagcgctcatcttcatcatgggcaacagcgccaaggaagctctggtctggaaagtgctggggaagttaggaatgcagcctggacgtcagcacagcatctttggagatccgaagaagatcgtcacagaagagtttgtgcgcagagggtacctgatttataaaccggtgccccgtagcagtccggtggagtatgagttcttctgggggccccgagcacacgtggaatcgagcaaactgaaagtcatgcattttgtggcaagggttcgtaaccgatgctctaaagactggccttgtaattatgactgggattcggacgatgatgcagaggttgaggctatcctcaattcaggtgctaggggttattccgccccttaagtagatctgaggcagacccttgggggtgtaaaagagagtcacaggtaccccaaggagtagatgccagggtcctaagttgaaaatgatgtcgattgggggcgggggacactgtatttgatatttgtgatcagtgatcattgttcaactgcgaaatagagtgtttgcttttgataatggaaaattgtattcgttttaaaattccgtttgttgagaataacaatatgtttaaaaatataattgaacaaatttttttctttgtttcctgtcattgacatttagtataacagttttgctaacgttctaaaatgaagtcgttccatcataatctatgatcttgtacagcacttatagaaataagctgttcttttgaagttgaaatacccagtaaaatgttgaagaaggatggaggatttcttcatatctgacgtttctgaaaccctttgtgtctgctgttgtgtgaagattgacatttaccatgattttccttagttactgcagaacatagagaaaaataaaagcctaacgaatagta

SEQ ID NO: 293398 - DNA, 1484 bp, Homo sapiens
ctttggtgctggaagaattcgcgtggcaggagaggcggggccaattttgctgagctttctcgcgggcttgcagctgcggcaagtgctggcggcggctgctcgcgcaagtcagctggcgtgggaactaccctttgtagctgagaacggcttgtttattgctacaaagactctattgacattggtagcttcagcggcagcagcttcttacggtataaagctgttgcttcctgaagaggctacaagcatccttccctaggactgctgtaagctttgagcctctagcaggagacatgcctcggggacgaaagagtcggcgccgccgtaatgcgagagccgcagaagagaaccgcaacaatcgcaaaatccaggcctcagaggcctccgagacccctatggccgcctctgtggtagcgagcacccccgaagacgacctgagcggccccgaggaagacccgagcactccagaggaggcctctaccacccctgaagaagcctcgagcactgcccaagcacaaaagccttcagtgccccggagcaattttcagggcaccaagaaaagtctcctgatgtctatattagcgctcatcttcatcatgggcaacagcgccaaggaagctctggtctggaaagtgctggggaagttaggaatgcagcctggacgtcagcacagcatctttggagatccgaagaagatcgtcacagaagagtttgtgcgcagagggtacctgatttataaaccggtgccccgtagcagtccggtggagtatgagttcttctgggggccccgagcacacgtggaatcgagcaaactgaaagtcatgcattttgtggcaagggttcgtaaccgatgctctaaagactggccttgtaattatgactgggattcggacgatgatgcagaggttgaggctatcctcaattcaggtgctaggggttattccgccccttaagtagatctgaggcagacccttgggggtgtaaaagagagtcacaggtaccccaaggagtagatgccagggtcctaagttgaaaatgatgtcgattgggggcgggggacactgtatttgatatttgtgatcagtgatcattgttcaactgcgaaatagagtgtttgcttttgataatggaaaattgtattcgttttaaaattccgtttgttgagaataacaatatgtttaaaaatataattgaacaaatttttttctttgtttcctgtcattgacatttagtataacagttttgctaacgttctaaaatgaagtcgttccatcataatctatgatcttgtacagcacttatagaaataagctgttcttttgaagttgaaatacccagtaaaatgttgaagaaggatggaggatttcttcatatctgacgtttctgaaaccctttgtgtctgctgttgtgtgaagattgacatttaccatgattttccttagttacttgacgtcttgtatctctttttattttcggattgcttatca

SEQ ID NO: 293399 - DNA, 1201 bp, Homo sapiens
ctttggtgctggaagaattcgcgtggcaggagaggcggggccaattttgctgagctttctcgcgggcttgcagctgcggcaagtgctggcggcggctgctcgcgcaagtcagctggcgtgggaactaccctttgtagctgagaacggcttgtttattgctacaaagactctattgacattggtagcttcagcggcagcagcttcttacggtataaagctgttgcttcctgaagaggctacaagcatccttccctaggactgctgtaagctttgagcctctagcaggagacatgcctcggggacgaaagagtcggcgccgccgtaatgcgagagccgcagaagagaaccgcaacaatcgcaaaatccaggcctcagaggcctccgagacccctatggccgcctctgtggtagcgagcacccccgaagacgacctgagcggccccgaggaagacccgagcactccagaggaggcctctaccacccctgaagaagcctcgagcactgcccaagcacaaaagccttcagtgccccggagcaattttcagggcaccaagaaaagtctcctgatgtctatattagcgctcatcttcatcatgggcaacagcgccaaggaagctctggtctggaaagtgctggggaagttaggaatgcagcctggacgtcagcacagcatctttggagatccgaagaagatcgtcacagaagagtttgtgcgcagagggtacctgatttataaaccggtgccccgtagcagtccggtggagtatgagttcttctgggggccccgagcacacgtggaatcgagcaaactgaaagtcatgcattttgtggcaagggttcgtaaccgatgctctaaagactggccttgtaattatgactgggattcggacgatgatgcagaggttgaggctatcctcaattcaggtgctaggggttattccgccccttaagtagatctgaggcagacccttgggggtgtaaaagagagtcacaggtaccccaaggagtagatgccagggtcctaagttgaaaatgatgtcgattgggggcgggggacactgtatttgatatttgtgatcagtgatcattgttcaactgcgaaatagagtgtttgcttttgataatggaaaattgtattcgttttaaaattccgtttgttgagaataacaatatgtttaaaaatataattgaacaaattttt

SEQ ID NO: 293400 - DNA, 1429 bp, Homo sapiens
ctttggtgctggaagaattcgcgtggcaggagaggcggggccaattttgctgagctttctcgcgggcttgcagctgcggcaagtgctggcggcggctgctcgcgcaagtcagctggcgtgggaactaccctttgtagctgagaacggcttgtttattgctacaaagactctattgacattggtagcttcagcggcagcagcttcttacggtataaagctgttgcttcctgaagaggctacaagcatccttccctaggactgctgtaagctttgagcctctagcaggagacatgcctcggggacgaaagagtcggcgccgccgtaatgcgagagccgcagaagagaaccgcaacaatcgcgagcacccccgaagacgacctgagcggccccgaggaagacccgagcactccagaggaggcctctaccacccctgaagaagcctcgagcactgcccaagcacaaaagccttcagtgccccggagcaattttcagggcaccaagaaaagtctcctgatgtctatattagcgctcatcttcatcatgggcaacagcgccaaggaagctctggtctggaaagtgctggggaagttaggaatgcagcctggacgtcagcacagcatctttggagatccgaagaagatcgtcacagaagagtttgtgcgcagagggtacctgatttataaaccggtgccccgtagcagtccggtggagtatgagttcttctgggggccccgagcacacgtggaatcgagcaaactgaaagtcatgcattttgtggcaagggttcgtaaccgatgctctaaagactggccttgtaattatgactgggattcggacgatgatgcagaggttgaggctatcctcaattcaggtgctaggggttattccgccccttaagtagatctgaggcagacccttgggggtgtaaaagagagtcacaggtaccccaaggagtagatgccagggtcctaagttgaaaatgatgtcgattgggggcgggggacactgtatttgatatttgtgatcagtgatcattgttcaactgcgaaatagagtgtttgcttttgataatggaaaattgtattcgttttaaaattccgtttgttgagaataacaatatgtttaaaaatataattgaacaaatttttttctttgtttcctgtcattgacatttagtataacagttttgctaacgttctaaaatgaagtcgttccatcataatctatgatcttgtacagcacttatagaaataagctgttcttttgaagttgaaatacccagtaaaatgttgaagaaggatggaggatttcttcatatctgacgtttctgaaaccctttgtgtctgctgttgtgtgaagattgacatttaccatgattttccttagttactgcagaacatagagaaaaataaaagcctaacgaatagta

SEQ ID NO: 293401 - DNA, 1000 bp, Homo sapiens
  misc_feature (54)..(54): n is a, c, g, or t
tctctctctctctctctctctctctctctctctctctctctctctctctctctnctcgtgccgaattcggcagagtttctcctgatgtctatattagcgctcatcttcatcatgggcaacagcgccaaggaagctctggtctggaaagtgctggggaagttaggaatgcagcctggacgtcagcacagcatctttggagatccgaagaagatcgtcacagaagagtttgtgcgcagagggtacctgatttataaaccggtgccccgtagcagtccggtggagtatgagttcttctgggggccccgagcacacgtggaatcgagcaaactgaaagtcatgcattttgtggcaagggttcgtaaccgatgctctaaagactggccttgtaattatgactgggattcggacgatgatgcagaggttgaggctatcctcaattcaggtgctaggggttattccgccccttaagtagatctgaggcagacccttgggggtgtaaaagagagtcacaggtaccccaaggagtagatgccagggtcctaagttgaaaatgatgtcgattgggggcgggggacactgtatttgatatttgtgatcagtgatcattgttcaactgcgaaatagagtgtttgcttttgataatggaaaattgtattcgttttaaaattccgtttgttgagaataacaatatgtttaaaaatataattgaacaaatttttttctttgtttcctgtcattgacatttagtataacagttttgctaacgttctaaaatgaagtcgttccatcataatctatgatcttgtacagcacttatagaaataagctgttcttttgaagttgaaatacccagtaaaatgttgaagaaggatggaggatttcttcatatctgacgtttctgaaaccctttgtgtctgctgttgtgtgaagattgacatttaccatgattttccttagttactgcagaacatagagaaaaataaaagcctaacgaatagta

SEQ ID NO: 293402 - DNA, 1106 bp, Homo sapiens
  misc_feature (1079)..(1079): n is a, c, g, or t
ctttggtgctggaagaattcgcgtggcaggagaggcggggccaattttgctgagctttctcgcgggcttgcagctgcggcaagtgctggcggcggctgctcgcgcaagtcagctggcgtgggaactaccctttgtagctgagaacggcttgtttattgctacaaagactctattgacattggtagcttcagcggcagcagcttcttacggtataaagctgttgcttcctgaagaggctacaagcatccttccctaggactgctgtaagctttgagcctctagcaggagacatgcctcggggacgaaagagtcggcgccgccgtaatgcgagagccgcagaagagaaccgcaacaatcgcaaaatccaggcctcagaggcctccgagacccctatggccgcctctgtggtagcgagcacccccgaagacgacctgagcggccccgaggaagacccgagcactccagaggaggcctctaccacccctgaagaagcctcgagcactgcccaagcacaaaagccttcagtgccccggagcaattttcagggcaccaagaaaagtctcctgatgtctatattagcgctcatcttcatcatgggcaacagcgccaaggaagctctggtctggaaagtgctggggaagttaggaatgcagcctggacgtcagcacagcatctttggagatccgaagaagatcgtcacagaagagtttgtgcgcagagggtacctgatttataaaccggtgccccgtagcagtccggtggagtatgagttcttctgggggccccgagcacacgtggaatcgagcaaactgaaagtcatgcattttgtggcaagggttcgtaaccgatgctctaaagactggccttgtaattatgactgggattcggacgatgatgcagaggttgaggctatcctcaattcaggtgctaggggttattccgccccttaagtagatctgaggcagacccttgggggtgtaaaagagagtcacaggtaccccaaggagtagatgccagggtcctaagttgaaaatgatgtcgattgggggcggggactgcttcagtttctgtcgacccgnccgcgaatttagtagtagtagtcgacc

SEQ ID NO: 293403 - DNA, 431 bp, Homo sapiens
cctatgagaagcccctttcaattccttgttgagacctctacagttcctttggagtgctttccccgctcctgcagcaagactttcttgcaaaaatgcctgtttgggattcctcagagtacagacaaaaaggaaggcttgatcagcatgtggtggatctgaagattcaaagaggtgccacagctcaaaagtagacattttggcaaatgtgaagaagtgagattcaatgaagatgataagaaatgaaaggtgttaccaaaagcatcctgtggtgactgaagaagggcctagcagcaaagggactccatcgcccgaggagcagcttccgcaggagctccggcaggttccttggaaaacgtggcagtgccggcccatggtgccctgttcagaaatacaagactcagatttagtaaagccagttgtgtaatgtgaaa

SEQ ID NO: 293404 - DNA, 857 bp, Homo sapiens
acacacacacacacacacacccggcttaagctcagaagctacaataatgcgccaagtgccccaagtgccatggggaagaaataacggatggcctgagccttactatctcgctccggcattttgttatcgttctttcgctgtcaccaacaatcgagtctccaacagcaacaccgcagcgacaagctctttcccacagtgcacctcagaatcaacccacactgctttgcgttcgcagcctttccgcttcctgtttttccctccgaccaaccccgagcgcaaagaaattgacctcgcagcggtcctacaatacttttatatcattggccaagctttaccccgcccctgcctcatgcagcctatgggctaggctttagggtccgcggttggtcagaccggagcacttggcctgaagacctggaattggcgacttcgatattaacaaggatggcggcggccgcagcaagtcgaggagtcggggcaaagctgggcctgcgtgagattcgcatccacttatgtcagcgctcgcccggcagccagggcgtcagggacttcattgagaaacgctacgtggagctgaagaaggcgaatcccgacctacccatcctaatccgcgaatgctccgatgtgcagcccaagctctgggcccgctacgcatttggccaagagacgaatgtccctttgaacaacttcagtgctgatcaggtaaccagagccctggagaacgttctaagtggtaaagcctgaagcctccactgaggattaagagcaacagccccagagcctgggctctgctggacttagtataatgtgaaaaaaatgtgttctcctattcctcataaagcttgtgctgtaaaata

SEQ ID NO: 293405 - DNA, 469 bp, Homo sapiens
  misc_feature (24)..(24): n is a, c, g, or t
ctactactactaaattcgcggccnctctggaattggcgacttcgatattaacaaggatggcggcggccgcagcaagtcgaggagtcggggcaaagctgggcctgcgtgagattcgcatccacttatgtcagcgctcgcccggcagccagggcgtcagggacttcattgagaaacgctacgtggagctgaagaaggcgaatcccgacctacccatcctaatccgcgaatgctccgatgtgcagcccaagctctgggcccgctacgcatttggccaagagacgaatgtccctttgaacaacttcagtgctgatcaggtaaccagagccctggagaacgttctaagtggtaaagcctgaagcctccactgaggattaagagcaacagccccagagcctgggctctgctggacttagtataatgtgaaaaaaatgtgttctcctattcctcataaagcttgtgctgtaaaata

SEQ ID NO: 293406 - DNA, 964 bp, Homo sapiens
acacacacacacacacacacccggcttaagctcagaagctacaataatgcgccaagtgccccaagtgccatggggaagaaataacggatggcctgagccttactatctcgctccggcattttgttatcgttctttcgctgtcaccaacaatcgagtctccaacagcaacaccgcagcgacaagctctttcccacagtgcacctcagaatcaacccacactgctttgcgttcgcagcctttccgcttcctgtttttccctccgaccaaccccgagcgcaaagaaattgacctcgcagcggtcctacaatacttttatatcattggccaagctttaccccgcccctgcctcatgcagcctatgggctaggctttagggtccgcggttggtcagaccggagcacttggcctgaagacctggaattggcgacttcgatattaacaaggatggcggcggccgcagcaagtcgaggagtcggggcaaagctgggcctgcgtgagattcgcatccacttatgtcagcgctcgcccggcagccagggcgtcagggacttcattgagaaacgctacgtggagctgaagaaggcgaatcccgacctacccatcctaatccgcgaatgctccgatgtgcagcccaagctctgggcccgctacgcatttggccaagagacgaatgtccctttgaacaacttcagtgctgatcaggtaaccagagccctggagaacgttctaagtggtaaagcctgaagcctccactgaggattaagagcaacagccccagagcctgggctctgctggacttagtataatgtgaaaaaaatgtgttctcctattcctcataaagcttgtgctgtaaaatactttctcagggtgttcttgtcctcatctaccctctaccccttactgtgcaaccactgaggcaaagtagcttaatataaaaataaaactttattctgtctcatcaaaa

SEQ ID NO: 293407 - DNA, 1155 bp, Homo sapiens
  misc_feature (1155)..(1155): n is a, c, g, or t
acacacacacacacacacacccggcttaagctcagaagctacaataatgcgccaagtgccccaagtgccatggggaagaaataacggatggcctgagccttactatctcgctccggcattttgttatcgttctttcgctgtcaccaacaatcgagtctccaacagcaacaccgcagcgacaagctctttcccacagtgcacctcagaatcaacccacactgctttgcgttcgcagcctttccgcttcctgtttttccctccgaccaaccccgagcgcaaagaaattgacctcgcagcggtcctacaatacttttatatcattggccaagctttaccccgcccctgcctcatgcagcctatgggctaggctttagggtccgcggttggtcagaccggagcacttggcctgaagacctggaattggcgacttcgatattaacaaggatggcggcggccgcagcaagtcgaggagtcggggcaaagctgggcctgcgtgagattcgcatccacttatgtcagcgctcgcccggcagccagggcgtcagggacttcattgagaaacgctacgtggagctgaagaaggcgaatcccgacctacccatcctaatccgcgaatgctccgatgtgcagcccaagctctgggcccgctacgcatttggccaagagacgaatgtccctttgaacaacttcagtgctgatcaggtaaccagagccctggagaacgttctaagtggtaaagcctgaagcctccactgaggattaagagcaacagccccagagcctgggctctgctggacttagtataatgtgaaaaaaatgtgttctcctattcctcataaagcttgtgctgtaaaatactttctcagggtgttcttgtcctcatctaccctctaccccttactgtgcaaccactgaggcaaagtagcttaatataaaaataaaactttattctgtctcatcaaaacaaaaacacaacaacacccgttgggcgcgccgggcccggggagggtttaaaccatcggggggggcgggcccgaggtttgggcctggcaaagcgtccaagagacccggcacaagcgggggttcccccaaaaaagccgggggaccgggtcgcacacccgggggccgggcctggacacacggcccggcgcaagn

SEQ ID NO: 293408 - DNA, 990 bp, Homo sapiens
acacacacacacacacacacccggcttaagctcagaagctacaataatgcgccaagtgccccaagtgccatggggaagaaataacggatggcctgagccttactatctcgctccggcattttgttatcgttctttcgctgtcaccaacaatcgagtctccaacagcaacaccgcagcgacaagctctttcccacagtgcacctcagaatcaacccacactgctttgcgttcgcagcctttccgcttcctgtttttccctccgaccaaccccgagcgcaaagaaattgacctcgcagcggtcctacaatacttttatatcattggccaagctttaccccgcccctgcctcatgcagcctatgggctaggctttagggtccgcggttggtcagaccggagcacttggcctgaagacctggaattggcgacttcgatattaacaaggatggcggcggccgcagcaagtcgaggagtcggggcaaagctgggcctgcgtgagattcgcatccacttatgtcagcgctcgcccggcagccagggcgtcagggacttcattgagaaacgctacgtggagctgaagaaggcgaatcccgacctacccatcctaatccgcgaatgctccgatgtgcagcccaagctctgggcccgctacgcatttggccaagagacgaatgtccctttgaacaacttcagtgctgatcaggtaaccagagccctggagaacgttctaagtggtaaagcctgaagcctccactgaggattaagagcaacagccccagagcctgggctctgctggacttagtataatgtgaaaaaaatgtgttctcctattcctcataaagcttgtgctgtaaaatactttctcagggtgttcttgtcctcatctaccctctaccccttactgtgcaaccactgaggcaaagtagcttaatataaaaataaaactttattctgtctcatcaaaagctaccagctgctgaagcaaacatga

SEQ ID NO: 293409 - DNA, 1101 bp, Homo sapiens
acacacacacacacacacacccggcttaagctcagaagctacaataatgcgccaagtgccccaagtgccatggggaagaaataacggatggcctgagccttactatctcgctccggcattttgttatcgttctttcgctgtcaccaacaatcgagtctccaacagcaacaccgcagcgacaagctctttcccacagtgcacctcagaatcaacccacactgctttgcgttcgcagcctttccgcttcctgtttttccctccgaccaaccccgagcgcaaagaaattgacctcgcagcggtcctacaatacttttatatcattggccaagctttaccccgcccctgcctcatgcagcctatgggctaggctttagggtccgcggttggtcagaccggagcacttggcctgaagacctggaattggcgacttcgatattaacaaggatggcggcggccgcagcaagtcgaggagtcggggcaaagctgggcctgcgtgagattcgcatccacttatgtcagcgctcgcccggcagccagggcgtcagggacttcattgagaaacgctacgtggagctgaagaaggcgaatcccgacctacccatcctaatccgcgaatgctccgatgtgcagcccaagctctgggcccgctacgcatttggccaagagacgaatgtccctttgaacaacttcagtgctgatcaggtaaccagagccctggagaacgttctaagtggtaaagcctgaagcctccactgaggattaagagcaacagccccagagcctgggctctgctggacttagtataatgtgaaaaaaatgtgttctcctattcctcataaagcttgtgctgtaaaataaaaaaactttcaagttcttttgtcggttatgtcggcccgcctgggccccagtcgacttttagactcagacaaagcttaatgcatgcggcccgtaattcgagctcactggcccaattcgcccctataggcgagctcgatttacaattcactcggccgccgtttaacaactgtgggactgggaaaaccttgcggtacccaaccttaaccgccttgcacccaactccccctttccgcagcttgcgga

SEQ ID NO: 293410 - DNA, 1406 bp, Homo sapiens
acacacacacacacacacacccggcttaagctcagaagctacaataatgcgccaagtgccccaagtgccatggggaagaaataacggatggcctgagccttactatctcgctccggcattttgttatcgttctttcgctgtcaccaacaatcgagtctccaacagcaacaccgcagcgacaagctctttcccacagtgcacctcagaatcaacccacactgctttgcgttcgcagcctttccgcttcctgtttttccctccgaccaaccccgagcgcaaagaaattgacctcgcagcggtcctacaatacttttatatcattggccaagctttaccccgcccctgcctcatgcagcctatgggctaggctttagggtccgcggttggtcagaccggagcacttggcctgaagacctggaattggcgacttcgatattaacaaggatggcggcggccgcagcaagtcgaggagtcggggcaaagctgggcctgcgtgagattcgcatccacttatgtcagcgctcgcccggcagccagggcgtcagggacttcattgagaaacgctacgtggagctgaagaaggcgaatcccgacctacccatcctaatccgcgaatgctccgatgtgcagcccaagctctgggcccgctacggaaaaaaagtctctcatccctgacctcgagtgacccaagccagcagtgtcacaatctactcagcaaacacaacttccccacccacaatacgctctagatgaaagttcaaaacaatcccgaactgcgggaagcgccatgatgccgtttcactattaatgcggatcccactgatgagagctgccaaaaacgcttgaagcgtcattgaattgtcaacgaaaagagtccaactctgtaaaatatttgaagagacttattctgagccaaatatgagtgaccatggcccttgacacagccctcaggaggtcctgagaacatgtgcccaaggtggtccggtacagcttggttttacatattttagggagatatgagacttcagttcattcaagaaatacactggttgggccgggcctggtggctcatgcctgtaatcccagcactttgggaggcctgggcgggtggatcagctgaggtcaggaatttgagaccagcctggccaacatggtgaaaccccatctttactaaaaatacaaaaattagccgggagtagtggtgggtgcctgtaatcccagctactcgggagcctgaggcaggagaatcgtttgaacccgggaggcggagattgcagtgggccgagatcgcgccccattgcctggggtacaagagcgaaactccgtctcaaaaaaaaaaaaaagaaagaaagaaagaaagaaatctgggatatgatgaggtttctcttcaaataattagatcaatc

SEQ ID NO: 293411 - DNA, 904 bp, Homo sapiens
acacacacacacacacacacccggcttaagctcagaagctacaataatgcgccaagtgccccaagtgccatggggaagaaataacggatggcctgagccttactatctcgctccggcattttgttatcgttctttcgctgtcaccaacaatcgagtctccaacagcaacaccgcagcgacaagctctttcccacagtgcacctcagaatcaacccacactgctttgcgttcgcagcctttccgcttcctgtttttccctccgaccaaccccgagcgcaaagaaattgacctcgcagcggtcctacaatacttttatatcattggccaagctttaccccgcccctgcctcatgcagcctatgggctaggctttagggtccgcggttggtcagaccggagcacttggcctgaagacctggaattggcgacttcgatattaacaaggatggcggcggccgcagcaagtcgaggagtcggggcaaagctgggcctgcgtgagattcgcatccacttatgtcagcgctcgcccggcagccagggcgtcagggacttcattgagaaacgctacgtggagctgaagaaggcgaatcccgacctacccatcctaatccgcgaatgctccgatgtgcagcccaagctctgggcccgctacgcctccagggtgcagaatagttaaagacacctccctctctctcttcagcatttggccaagagacgaatgtccctttgaacaacttcagtgctgatcaggtaaccagagccctggagaacgttctaagtggtaaagcctgaagcctccactgaggattaagagcaacagccccagagcctgggctctgctggacttagtataatgtgaaaaaaatgtgttctcctattcctcataaagcttgtgctgtaaaata

SEQ ID NO: 293412 - DNA, 979 bp, Homo sapiens
acacacacacacacacacacccggcttaagctcagaagctacaataatgcgccaagtgccccaagtgccatggggaagaaataacggatggcctgagccttactatctcgctccggcattttgttatcgttctttcgctgtcaccaacaatcgagtctccaacagcaacaccgcagcgacaagctctttcccacagtgcacctcagaatcaacccacactgctttgcgttcgcagcctttccgcttcctgtttttccctccgaccaaccccgagcgcaaagaaattgacctcgcagcggtcctacaatacttttatatcattggccaagctttaccccgcccctgcctcatgcagcctatgggctaggctttagggtccgcggttggtcagaccggagcacttggcctgaagacctggaattggcgacttcgatattaacaaggatggcggcggccgcagcaagtcgaggagtcggggcaaagctgggcctgcgtgagattcgcatccacttatgtcagcgctcgcccggcagccagggcgtcaggtgaggcgcggcgtggtgaggcgggcgggcttcgggacgccagggtcacgacctcgacctccctgaagttgagggaagcccccgcccacagcacgcgcggcgctctctccggccccgcagggacttcattgagaaacgctacgtggagctgaagaaggcgaatcccgacctacccatcctaatccgcgaatgctccgatgtgcagcccaagctctgggcccgctacggtgagtgcgggacgccaggggtctggggctccggtaggggaacaagggtttgagaagagaagggaccgcccaaggtcgtgcagaaacccgtggagaaactagaactcggactttagccttgctgttgatcttgtttccatgaagaaatttatattcgcagggttatatgatgcgttgtattccgggcaacataagtatgcaggctga

SEQ ID NO: 293413 - DNA, 576 bp, Homo sapiens
  misc_feature (24)..(24): n is a, c, g, or t
ctactactactaaattcgcggccnctctggaattggcgacttcgatattaacaaggatggcggcggccgcagcaagtcgaggagtcggggcaaagctgggcctgcgtgagattcgcatccacttatgtcagcgctcgcccggcagccagggcgtcagggacttcattgagaaacgctacgtggagctgaagaaggcgaatcccgacctacccatcctaatccgcgaatgctccgatgtgcagcccaagctctgggcccgctacgcatttggccaagagacgaatgtccctttgaacaacttcagtgctgatcaggtaaccagagccctggagaacgttctaagtggtaaagcctgaagcctccactgaggattaagagcaacagccccagagcctgggctctgctggacttagtataatgtgaaaaaaatgtgttctcctattcctcataaagcttgtgctgtaaaatactttctcagggtgttcttgtcctcatctaccctctaccccttactgtgcaaccactgaggcaaagtagcttaatataaaaataaaactttattctgtctcatcaaaa

SEQ ID NO: 293414 - DNA, 1171 bp, Homo sapiens
acacacacacacacacacacccggcttaagctcagaagctacaataatgcgccaagtgccccaagtgccatggggaagaaataacggatggcctgagccttactatctcgctccggcattttgttatcgttctttcgctgtcaccaacaatcgagtctccaacagcaacaccgcagcgacaagctctttcccacagtgcacctcagaatcaacccacactgctttgcgttcgcagcctttccgcttcctgtttttccctccgaccaaccccgagcgcaaagaaattgacctcgcagcggtcctacaatacttttatatcattggccaagctttaccccgcccctgcctcatgcagcctatgggctaggctttagggtccgcggttggtcagaccggagcacttggcctgaagacctggaattggcgacttcgatattaacaaggatggcggcggccgcagcaagtcgaggagtcggggcaaagctgggcctgcgtgagattcgcatccacttatgtcagcgctcgcccggcagccagggcgtcagggacttcattgagaaacgctacgtggagctgaagaaggcgaatcccgacctacccatcctaatccgcgaatgctccgatgtgcagcccaagctctgggcccgctacgcatttggccaagagacgaatgtccctttgaacaacttcagtgctgatcaggtaaccagagccctggagaacgttctaagtggtaaagcctgaagcctccactgaggattaagagcaacagccccagagcctgggctctgctggacttagtataatgtgaaaaaaatgtgttctcctattcctcataaagcttgtgctgtaaaatactttctcagggtgttcttgtcctcatctaccctctaccccttactgtgcaaccactgaggcaaagtagcttaatataaaaataaaactttattctgtctcatcaaaaaaacaaaaaaaaaaacaaaaaagaaaaagctttgttctggggcccgccctcgggccccttcgaaaaagagctctttcatagaacccattgtgctgtgtggggccgcggggggcccccaagttggggtttaggtgtgaaccctggtggtccaaaaacggcgggtcccccagagggaaagaactcgcgggcgccgtaggaaacatgcgt

SEQ ID NO: 293415 - DNA, 1015 bp, Homo sapiens
acacacacacacacacacacccggcttaagctcagaagctacaataatgcgccaagtgccccaagtgccatggggaagaaataacggatggcctgagccttactatctcgctccggcattttgttatcgttctttcgctgtcaccaacaatcgagtctccaacagcaacaccgcagcgacaagctctttcccacagtgcacctcagaatcaacccacactgctttgcgttcgcagcctttccgcttcctgtttttccctccgaccaaccccgagcgcaaagaaattgacctcgcagcggtcctacaatacttttatatcattggccaagctttaccccgcccctgcctcatgcagcctatgggctaggctttagggtccgcggttggtcagaccggagcacttggcctgaagacctggaattggcgacttcgatattaacaaggatggcggcggccgcagcaagtcgaggagtcggggcaaagctgggcctgcgtgagattcgcatccacttatgtcagcgctcgcccggcagccagggcgtcagggacttcattgagaaacgctacgtggagctgaagaaggcgaatcccgacctacccatcctaatccgcgaatgctccgatgtgcagcccaagctctgggcccgctacgcatttggccaagagacgaatgtccctttgaacaacttcagtgctgatcaggtaaccagagccctggagaacgttctaagtggtaaagcctgaagcctccactgaggattaagagcaacagccccagagcctgggctctgctggacttagtataatgtgaaaaaaatgtgttctcctattcctcataaagcttgtgctgtaaaataaaaaaaaaaagagaaaaaaaaaaaaaaaatttgtggggggccgggcctgggaaaagtttttagaaacacatggttggggggggggggcccagggttgggaatgggccaaggggtcccaaggaaaccggggaggaaagggggtgggttttcccataaag

SEQ ID NO: 293416 - DNA, 1011 bp, Homo sapiens
acacacacacacacacacacccggcttaagctcagaagctacaataatgcgccaagtgccccaagtgccatggggaagaaataacggatggcctgagccttactatctcgctccggcattttgttatcgttctttcgctgtcaccaacaatcgagtctccaacagcaacaccgcagcgacaagctctttcccacagtgcacctcagaatcaacccacactgctttgcgttcgcagcctttccgcttcctgtttttccctccgaccaaccccgagcgcaaagaaattgacctcgcagcggtcctacaatacttttatatcattggccaagctttaccccgcccctgcctcatgcagcctatgggctaggctttagggtccgcggttggtcagaccggagcacttggcctgaagacctggaattggcgacttcgatattaacaaggatggcggcggccgcagcaagtcgaggagtcggggcaaagctgggcctgcgtgagattcgcatccacttatgtcagcgctcgcccggcagccagggcgtcagggacttcattgagaaacgctacgtggagctgaagaaggcgaatcccgacctacccatcctaatccgcgaatgctccgatgtgcagcccaagctctgggcccgctacgcctccagggtgcagaatagttaaagacacctccctctctctcttcagcatttggccaagagacgaatgtccctttgaacaacttcagtgctgatcaggtaaccagagccctggagaacgttctaagtggtaaagcctgaagcctccactgaggattaagagcaacagccccagagcctgggctctgctggacttagtataatgtgaaaaaaatgtgttctcctattcctcataaagcttgtgctgtaaaatactttctcagggtgttcttgtcctcatctaccctctaccccttactgtgcaaccactgaggcaaagtagcttaatataaaaataaaactttattctgtctcatcaaaa

SEQ ID NO: 293417 - DNA, 1084 bp, Homo sapiens
acacacacacacacacacacccggcttaagctcagaagctacaataatgcgccaagtgccccaagtgccatggggaagaaataacggatggcctgagccttactatctcgctccggcattttgttatcgttctttcgctgtcaccaacaatcgagtctccaacagcaacaccgcagcgacaagctctttcccacagtgcacctcagaatcaacccacactgctttgcgttcgcagcctttccgcttcctgtttttccctccgaccaaccccgagcgcaaagaaattgacctcgcagcggtcctacaatacttttatatcattggccaagctttaccccgcccctgcctcatgcagcctatgggctaggctttagggtccgcggttggtcagaccggagcacttggcctgaagacctggaattggcgacttcgatattaacaaggatggcggcggccgcagcaagtcgaggagtcggggcaaagctgggcctgcgtgagattcgcatccacttatgtcagcgctcgcccggcagccagggcgtcaggtgaggcgcggcgtggtgaggcgggcgggcttcgggacgccagggtcacgacctcgacctccctgaagttgagggaagcccccgcccacagcacgcgcggcgctctctccggccccgcagggacttcattgagaaacgctacgtggagctgaagaaggcgaatcccgacctacccatcctaatccgcgaatgctccgatgtgcagcccaagctctgggcccgctacgcatttggccaagagacgaatgtccctttgaacaacttcagtgctgatcaggtaaccagagccctggagaacgttctaagtggtaaagcctgaagcctccactgaggattaagagcaacagccccagagcctgggctctgctggacttagtataatgtgaaaaaaatgtgttctcctattcctcataaagcttgtgctgtaaaatactttctcagggtgttcttgtcctcatctaccctctaccccttactgtgcaaccactgaggcaaagtagcttaatataaaaataaaactttattctgtctcatcaaaa

SEQ ID NO: 293418 - DNA, 421 bp, Homo sapiens
ctcggctcggatctaccttccagtagcagcggagtggccaatgggaccgggaccagagccgggggccggaggccgccgccgcggggaggttcccggcccaggtgcccagcgctcaccagcccggcggcgccgcggcggccccgcagctgtttcctcgggggggcgtggcgtcgggggccttcgcggcgcagtcctctttcagcatcccgaacagcagcagcggcccgtaggactcgcaggactcggtgcacagcagccctgaggatggcggcggcggccggcaccggccggtgggctggagccccggcgggccgctcctggtgatcggctccttaccagctcacctctcaccgcgcatgtttggaggtgctgagaaacataatgtctgttccccaagagccagctaatcatttttactaag

SEQ ID NO: 293419 - DNA, 2829 bp, Homo sapiens
gggcgcagagctgggccgagccgtcgccggcgccacgcgagtcccgcagccgccgcgcccgggcaatgggccgggggcactgagggccgccggggccgagcgcggaggggggaccgagccagtgccgtgccctcgggccgcgccaacatgccccgcggcttcctggtgaagcgcagcaagaagtccacgcccgtttcctaccgggtccgcggcggcgaggacggcgaccgcgcactgctgctctcgcccagctgcgggggcgcccgcgccgagcccccggcgccgagcccggtccccgggccgctgccgccgccgccgcccgcggagcgcgcccatgcagcgctcgccgccgcgcttgcctgcgcgcctgggccgcagccacccccgcagggcccgcgggccgcgcacttcggcaaccccgaggctgcgcaccccgcgccgctctacagtcccacgcggcccgtgagccgcgagcacgagaagcacaagtacttcgaacgcagcttcaacctgggctcgccggtctcggccgagtccttccccacgcccgccgcgctgctcggagggggcggcggcggcggcgcgagcggagctggcggaggcggcacctgcggcggcgacccgctgctcttcgcgcccgccgagctcaagatgggcacggcgttctcggctggcgccgaggcggcccgcggcccgggccccggccccccactgccccctgccgccgccctgcggcccccgggaaagcggcccccgccccctaccgccgcggagccgcccgccaaggcagtcaaggccccgggcgccaagaagcccaaggccatccgcaagctgcacttcgaggacgaggtgaccacgtcgcccgtgctggggctcaagatcaaggagggcccggtggaggcgccgcggggccgcgcggggggcgcggcgcggccgctgggcgagttcatctgccagctgtgcaaggaggagtacgccgacccgttcgcgctggcgcagcacaaatgctcgcgcatcgtgcgtgtggagtaccgctgtcccgagtgcgccaaggtcttcagctgcccggccaacctggcctcgcaccgccgctggcacaaaccgcggcccgcgcccgccgccgcccgcgcgccggagccagaagcagcagccagggctgaggcgcgggaggcacccggcggcggcagcgaccgggacacgccgagccccggcggcgtgtccgagtcgggctccgaggacgggctctacgagtgccatcactgcgccaagaagttccgccgccaggcctacctacgcaagcacctgctggcgcaccaccaggcgctgcaggccaagggcgcgccgctagcgcccccggccgaggacctactggccttgtaccccgggcccgacgagaaggcgccccaggaggcggccggcgacggcgagggggccggcgtgctgggcctgagtgcgtccgccgagtgccacctgtgcccagtgtgcggagagtcgttcgccagcaagggcgctcaggagcgccacctgcgcctgctgcacgccgcccaggtgttcccctgcaagtactgcccggccaccttctacagctcgcccggccttacgcggcacatcaacaagtgccacccatccgaaaacagacaggtgatcctcctgcaggtgcccgtgcgcccggcctgctagagcgcgccctccaccccggcccccgaactgtgccttcgcttggagacccacaaagagagtgcgccctgcacgccccgaacccgagtccgcgctgggggagcctcgcccccgcccccaccgggtgaaagtgtcgtctccgcttctctcggtgtggcgtgacggtaaccccatactctccttttgactccttttggaacccccacttttacgttgtgtccctccgcctcccccatggcgcaacaggagtcagtctctttctgtacaagggagaaaagctgtacgcgtttgtctcgtggttggaagcctccccttggcggggagaagctttttttcttgctagtattcgctgtgttcatggtctagaaatgcggtctggtctcgcctcgcctaccaatctctgctctctatgtatgtagcgtacgggttgttttgggtgaatcttgaggaataaatgcctttatatttcacaggctgtaaattgaacttcccacacgattagctttattatggcttgtgaactgctggagtctggctttacctttttgtatgtgaacaaatcaaattgcttaaaaaagagttttctttagtatagccacaaatgccttgaactgttgtctgggattgttttgtggggggagggaagggagtgttccgaagatgctgtagtaactgcctcagtgtttcacgtaagactttttggtttgatcatctttgttgaggtaggactatcagttccctctaaatgtatatgttgatttatgagtaattgttatttattctttatttatttatattaattatgaagattatgatattatttgattgcagatttttttggcgcgctgccccctccccaccctgccactcttgacattccactgtgcgttttagaagagagcctttttctaaagggatctgcttaaagttttaacttttatacctatctgagtgaattacagacaacctatcatttattctgcttcgagggtccccagggcccttgtacaaccgacagctcttacttttaaatgcaatctcttttctacatacattattttcttaattgttagctatttatagaaagcttcaatagaactgtttcaactgtataactatttactattcaaataaaatattttcaaagtcaaa

SEQ ID NO: 293420 - DNA, 914 bp, Homo sapiens
gtccggagtccgggcgttctggcagcaccagagtcctgcagcagagacgggctgggctggcactcacccacgaccccccttccctgctatgatggtttgtcagtagcaggtcctagacaccccccgcccgctcccggggcacgtgggcagagctagcagcagccaggtgcacggagccacaagagctctagggcactctgggggcagctgtgcctgctgccctctctggtgcctgtggagatgcctaactgacaggagagttagtgaggacaagaacgctcccttttggccgaggtccgctgtatccatggctctcctgaccaatctactgcccctgtgctgcttggcacttctggcgctgccagcccagagctgcgggccgggccgggggccggttggccggcgccgctatgcgcgcaagcagctcgtgccgctactctacaagcaatttgtgcccggcgtgccagagcggaccctgggcgccagtgggccagcggaggggagggtggcaaggggctccgagcgcttccgggacctcgtgcccaactacaaccccgacatcatcttcaaggatgaggagaacagtggagccgaccgcctgatgaccgagcgttgtaaggagcgggtgaacgctttggccattgccgtgatgaacatgtggcccggagtgcgcctacgagtgactgagggctgggacgaggacggccaccacgctcaggattcactccactacgaaggccgtgctttggacatcactacgtctgaccgcgaccgcaacaagtatgggttgctggcgcgcctcgcagtggaagccggcttcgactgggtctactacgagtcccgcaaccacgtccacgtgtcggtcaaagctgataactcactggcggtccgggcgggcggctgctttccgggaa

SEQ ID NO: 293421 - DNA, 317 bp, Homo sapiens
aaaaatgaccagattcccaccacctaaagataagtcctgtcatcctttcaggaattaatatatcaatttctcatctactcttctctcacactactttgcataaatgggatcataaatgggatcctatattttttcaagcaacagtgtgttatgcctatactccatgtttatatgtgtgtattaaaaaatgtatttgtatatatgtgtatgtataagtgtgtgtgtgtgtatgatgattcttctcccgctttgaaggtgaaagaaagcacacctttatttaagcataaactttgggtttcagatactgtctggaaaaa

SEQ ID NO: 293422 - DNA, 1692 bp, Homo sapiens
  misc_feature (504)..(504): n is a, c, g, or t
  misc_feature (1127)..(1127): n is a, c, g, or t
  misc_feature (1228)..(1228): n is a, c, g, or t
ccccaacctaagagtgcacatctgtgtgcctagcctgatccaggattcacgtgagggacctgtgtctgtctatcccactagcttaggggcaggatcctttgagcctatccacccactgccctggcaccaggctgctgggctgggacccactacccatcccacctcctcatcctcaggcagcgggggcaggggtgagctgggagagcattcacgctcgcgcacagaggggctgttgcgcatccaggcgcggcagattgggtacagtggcgtgttctcgctgaactgggccaagtccacgctccggtcgaacagcttgatcacatatgtgtctgggaaggtggggatgggaggtgtgtgagcatccttgcataggcccttggctccttaccgaccctctagggccactgtctactcactggatcgctgcggccctccctcagccagcccatcatccatctccctcctcttcttcctccgctggtgggggaagcgggcagatggccngcgtagggagagggagtgtcaggactggggtaggagctgggagcctctagtcagctggctgggaccctgccaccttaccttttgccagtggctgcgatggagcagtccctgtggggaaagacagttgaccctcagacaaacgcctgtgcaaaaccctgcagagggcaccctggggatactggtatcaaacctgagatgctcacatgaaccccacttgcctcttgggccttttgtcccacccatacccatgggggtctaggtggcaaccacggggggacctaagcttctcctgccacagggtctttgtacaggtggagtggtccgggccacgatggaggtagcgctgggctgagcggtcagggcttggataaggaaagaagttaccaaccacgaactctcaactccaaatccaatcagaaaaactcacttattgtgggtgtctgagggtgttttcccagcttcctcatccagacgctccctagaggcagaagagatctctcagctcagggttccagggccccagagaaggaaggcaccgagcagcctccccattaagcaccttcctccccaagtcagcctgtggggtcccacccaatccacccaggatcagagggcccaacccnccagggtgcccggccctgtgaccccacgctggcctacctgtccatgtgactcttctccagcagacactgcaagacagcatccagttggttccgggctttgnccatctccagctctggggcaagagaggacccagcaggagtcagctcccaggccccagctaggtgggcagctgactgggccagggaagggcgtgcgtgtcctctgccctggccaatctcagagccaggcccaggcagcctgaaagggtgcaacaggcagagatggctggagtgatgcccagagctctgagttccagagctgtcccacgtgattgctctgtgacaggagacaacacttccttcagaaaacgggaaacttccatttgtcacacgtcttggtccagataaatcccaggaagtagcatcgtgatctacacttctgatgagaatactgcagcccacagtaggaaagttatatttttgaattcacgactaccagtacaggataacagcccctagaaatggaagcactaggccgatcctaccactgcactccagcctggctgacagagcaagactctgtctc

SEQ ID NO: 293423 - DNA, 275 bp, Homo sapiens
ttctctgagaaagctcttgactatttttatttttgcagacaacacttccttcagaaaacgggaaacttccatttgtcacacgtcttggtccagataaatcccaggaagtagcatcgtgatctacacttctgatgagaatactgcagcccacagtaggaaagttatatttttgaattcacgactaccagtacaggataacagcccctagaaatggaagcactaggccgatcctaccactgcactccagcctggctgacagagcaagactctgtctc

SEQ ID NO: 293424 - DNA, 260 bp, Homo sapiens
ttctctgagaaagctcttgactatttttatttttgcagacaacacttccttcagaaaacgggaaacttccatttgtcacacgtcttggtccagataaatcccaggaagtagcatcgtgatctacacttctgatgagaatactgcagcccacagtaggaaagttatatttttgaattcacgactaccagtacaggataacagcgcgcataataagctttcaggggggggggctcaggcgctgcagagccagactctgtctc

SEQ ID NO: 293425 - DNA, 967 bp, Homo sapiens
tgtagcgctagttctcttcaagatttgcttagtgtcatttcatttcggtttcttttctcgccatgtttttctgtcggaattacggttcgttttggttctatgtactctctaaaatgttatcgtttttcatttgtctactaattttcgtgcatttgttactactgagtttcttaatatctgactggcctccgcccacgggctctgcagagcataaatactcaggctgatggtagtgcagagactctccctccttgatcagcgcaaacgttggtctgaggcttgagggatggagcaacattttcttggctgtgtgaagcgggcttgggattccgcagaggtggcgccagagccccagcctccacctattgtgagttcagaagatcgtgggccgtggcctcttcctttgtatccagtactaggagagtactcactggacagctgtgatttgggactgctttccagcccttgctggcggctgcccggagtctactggcaaaacggactctctcctggagtccagagcaccttggaaccaagtacagcgaagcccactgagttcagttggccggggacacagaagcagcaagaggcacccgtagaagaggtggggcaggcagaggaacccgacagactcaggctccagcagcttccctggagcagtcctctccatccctgggacagacagcaggacaccgaggtctgtgacagcgggtgccttttggaacgccgccatcctcctgccctccagccgtggcgccacctcccgggtttctcagactgcctggagtggattcttcgcgttggttttgccgcgttctctgtactctgggcgtgctgttcacggatctgtggagctaagcagccttagatagcagcagaaggctttttggattctcctccttgaaaagattctcagttaccaaacgtctccacctagaaaataaaaatacattaagatgtgctttca

SEQ ID NO: 293426 - DNA, 1111 bp, Homo sapiens
tgtagcgctagttctcttcaagatttgcttagtgtcatttcatttcggtttcttttctcgccatgtttttctgtcggaattacggttcgttttggttctatgtactctctaaaatgttatcgtttttcatttgtctactaattttcgtgcatttgttactactgagtttcttaatatctgactggcctccgcccacgggctctgcagagcataaatactcaggctgatggtagtgcagagactctccctccttgatcagcgcaaacgttggtctgaggcttgagggatggagcaacattttcttggctgtgtgaagcgggcttgggattccgcagaggtggcgccagagccccagcctccacctattgtgagttcagaagatcgtgggccgtggcctcttcctttgtatccagtactaggagagtactcactggacagctgtgatttgggactgctttccagcccttgctggcggctgcccggagtctactggcaaaacggactctctcctggagtccagagcaccttggaaccaagtacagcgaagcccactgagttcagttggccggggacacagaagcagcaagaggcacccgtagaagaggtggggcaggcagaggaacccgacagactcaggctccagcagcttccctggagcagtcctctccatccctgggacagacagcaggacaccgaggtctgtgacagcgggtgccttttggaacgccgccatcctcctgccctccagccgtggcgccacctcccgggtttctcagactgcctggagtggattcttcgcgttggttttgccgcgttctctgtactctgggcgtgctgttcacggatctgtggagctaagcagccttagatagcagcagaaggctttttggattctcctccttgaaaagattctcagttaccaaacgtctccacctagaaaataaaaatacattaagatgtgctttcattgctggttgtcagtttttaaattctctttttcccttatgtttctttcttgtttcgcgtcgcttattactttcagtttccttgtattttaaatatttgtatttatttcattaaatatttcattcgtatctgttactttgagaaa

SEQ ID NO: 293427 - DNA, 1313 bp, Homo sapiens
tgtagcgctagttctcttcaagatttgcttagtgtcatttcatttcggtttcttttctcgccatgtttttctgtcggaattacggttcgttttggttctatgtactctctaaaatgttatcgtttttcatttgtctactaattttcgtgcatttgttactactgagtttcttaatatctgactggcctccgcccacgggctctgcagagcataaatactcaggctgatggtagtgcagagactctccctccttgatcagcgcaaacgttggtctgaggcttgagggatggagcaacattttcttggctgtgtgaagcgggcttgggattccgcagaggtggcgccagagccccagcctccacctattgtgagttcagaagatcgtgggccgtggcctcttcctttgtatccagtactaggagagtactcactggacagctgtgatttgggactgctttccagcccttgctggcggctgcccggagtctactggcaaaacggactctctcctggagtccagagcaccttggaaccaagtacagcgaagcccactgagttcagttggccggggacacagaagcagcaagaggcacccgtagaagaggtggggcaggcagaggaacccgacagactcaggctccagcagcttccctggagcagtcctctccatccctgggacagacagcaggacaccgaggtctgtgacagcgggtgccttttggaacgccgccatcctcctgccctccagccgtggcgccacctcccgggtttctcagactgcctggagtggattcttcgcgttggttttgccgcgttctctgtactctgggcgtgctgttcacggatctgtggagctaagcagccttagatagcagcagaaggctttttggattctcctccttgaaaagattctcagttaccaaacgtctccacctagaaaataaaaatacattaagatgtgctttcaaacaaaaacacaaaacagagaaaaaaaacaaaaaaaaaaaacaaaacagagggcggcggcgcgcgccctatcaagaatctctccccgcggggggagcccccaacaacgtggcgcgcggtgaacacaaagttgttccgtagcaacacaagggggggcccccccatagtaggagccggccgacatagaacaagagaagaaggaacgatgtgcgaccacgtgatcaacaaccagcgcctccgatggacgtggggagcaaacacgtggcaacgccgggaaacactcgacgcggggagcgaagacctacagaccagagggggaggcgcacaaatcgtgggcgacaactgcc

SEQ ID NO: 293428 - DNA, 199 bp, Homo sapiens
  misc_feature (30)..(30): n is a, c, g, or t
gatcaactttaaaagaacttggaagtacantcctcaagcgtttctggaaatagcagaactacaatatttgagaaaaatattttttaatgtataaaaaattggcagggtaggctagcaagcaagagacctagagaaaagttgatgttacagtctcaagtcgaaaggcaatctgcaggcagaattatttccttgagggatc

SEQ ID NO: 293429 - DNA, 5137 bp, Homo sapiens
  misc_feature (5116)..(5116): n is a, c, g, or t
cgcgacgccccgagtggcggttgtttcaagatggcggacgtggcgggcccctcccgccccagtgccgcggcgttctggagccgggacttttctgatgaagaacaatcagtagtatacgttccaggaatttctgctgaaggaaatgtcagatcaagacacaagctgatgagtccaaaagctgatgttaaacttaagacttccagggtgactgatgcttcaatctccatggagtccttaaaaggcacaggagattcagtagatgaacagaattcctgcaggggagaaataaagagtgcatcattgaaggatttatgtcttgaagacaaaagacgcattgcaaacttaattaaagaactggccagagtaagtgaggaaaaggaagtgacagaggaaagactgaaagctgagcaggagtcatttgagaagaagatcaggcagttggaagaacagaatgaactgatcatcaaagaaagggaagctcttcagctacagtatagagaatgccaagaacttctaagcctgtatcagaaatatttatcagaacaacaggagaagctcaccatgtctctctcagaacttggtgctgctagaatgcaggaacagcaggtatccagtagaaaaagcactctccagtgttcatctgtggaactggatggttcctacttgagcatagccagaccacagacctactatcaaaccaagcaaagacctaagtctgcagtccaggattcagcttcagaatcccttatagcatttaggaataattctttgaaaccagtaacccttcatcatcccaaagatgatctagataagataccatcagagaccacaacatgtaattgtgaatctccagggagaaaacctgcagtcccaacagagaaaatgccacaagaagaattgcacatgaaggaatgtccacatcttaagcctactcctagtcaatgctgtggtcatagacttgctgcagatcgtgttcatgacagccatcctacaaacatgacccctcaacatcctaagacacatccagaatcatgcagttattgtcggctttcttgggcatctctggtgcatggtggtggggcactgcaacccattgaaactttgaaaaagcagatctcagaagatagaaagcagcaactgatgcttcagaaaatggaactggaaattgaaaaggagcgccttcagcatctgctggcccagcaggagacaaagcttcttctaaaacagcagcagcttcaccagtctcgactggattacaattgtttattgaagtcaaactgtgatggctggctgcttggaacatcatcatctattaaaaagcaccaagaccccccaaacagtggagagaataggaaggagaggaagacagttgggtttcattcgcatatgaaagatgatgcccagtggtcatgtcaaaagaaagatacatgtagaccccaaagagggacagtgacaggagttagaaaagatgcgtctacatctcctatgccaacaggaagcctaaaggattttgtcaccacagcctcaccatcattacagcacaccacctcccggtatgagacatctttgttggatttggttcagtctctgagcccaaactctgcgcccaaacctcagcgctatccctccagagaagctggggcctggaatcatggtactttccgactcagtcctctaaaatcaacccggaagaagatggggatgcacagaacccctgaagagttggaggagaatcagattctggaagatatatttttcatttgacatattgcaaaattttcttaggaaatttgtgggtttcctcacatactgatctaggattttaaattatttcattgcaaagtaattgtgtctctcctttcacggggacttgtctcactagcatcctgttacgtattgaatatagaaatcattctaacaacccaggttattttcaatcagaccaggcattcgataacacactaagggggtaggaatggaagatggtatcttttatatgctaaacagattagaaaattaacataggatactttctgcgtggtggaaaccattgcatattcagcctcatttcaagagtgtttccttctcaaacttctgctagaaaatgctgactcacttttatatacaagaaaaacctttccactgaaaaatccctctgatttaaaagtaacccctttgaaacataagcagtttcagaaaggcagactctctcatctttctcatcctgttctctcactactacatttctgtaagtggtcctttaattctgaagttggagttggtgcccctgccatcacaaacaacacgagagccaattgtgagtcagtctcagtagccatcagcctggcagctgcccatcccataaccaaagagctcaatgggctggagggtgagacccagccaatccttgggagcaagcagcactaaatcacatcagggagtgattagtcctggggaaattcagtggaggcacaagcctgaagcactcttctaccaatgtttgggtgaccacccctccaatatcccagaatgaataagaacaatccctaggtatttttatttacccaagtgttcagcttattcaccccacccccccaccccccatcacacgtgctcctgtgaactttccatggttatgtctacggaaaatgccactagagagagagtgatgcaagctgctgcaaagctgatgggcttcctctggccctcccttttcctccacgaggattaaaggatacaagctgaccaggcctcacaggtgctctgctcgtggccccaaagaaccatctctacttgccagagtatgttccaccacccaagcagggtctccctactttttctcactggcctcgttttgacccagagaaagcctatggaagttatgcagtgcagacctcatcctgtctgctgtcttttctcccacagagctcttgagatgggtccttcagcttgcagtggtccctagtagcctctcaagctaatggggatgatgatcctggtttagccagagttcaaaactctccagtcattgaaagcaaggggagggtgtgttcccagatgtgtattacttgggaattttatttgatctggagggtgtggctttttttctctcctttttaccaaccccaactaaactgggagtaagacttagtcagtgttggtagacaaagtcataccacccagggcagcctgcatgcagcgagtctgcgtggcttccctgaattactcttttaattaaaactagattatttcaatctagaaaagccttgttgagcagcctccttatccagatagatccaaagctcatgtctcttcaggctgagactggcgctgtcacctccacccagccttctttcacttggggttttttattctttggagtagaaaagaatggagcccactaatattatatttttcttctgaaataaatataaagtcaagactaactagttataatcattcccttaaaaagttggaaaatcattacagattaaaatttctttataaagttcacctctgagagtaaccaaatcggtttcatcccatatcaaaaagcctttggagtgtggagctttctgtggtatggcagaaatgggtggatggcaaactaagagccctcagccattttttcagttaaagttaggttgccagaactttcttttccttgccccctgtgtcatgactagcttaagtgtacttgactcccatagactactcccatgcccacagtcacccattccagactccagtgtccttaaaactctggagtgagaggatgccagaggatcaagaaaaggatcacagtttcttgaagaagcttgtttgcctttagaagaatcgtaaacagagtctaaactaaaggctttttgggggtcacagccacagagtggagttttattgcttctttgcctctccatgaatggccaatttggaaaagcagagatgggctttcagcagaatatcaaccaatacatttttcacatgcaaaactcatcaccagttgcctttttctaacttaatggacattttgttggtgttggtgcaagggcaataggatgtaaatttgtatataatctaatgtcttcattattaattgaatagtacatgttaacattttaatctatttaaatttactttgaaatatatacatacatatgaatgaaaggttgttacagagcctcaaagctgttgcagactatcccaagagaaaggatctggcacaaaggaatctgcctttcctccgtctcaagtctcccacccttgactggttgggatttgctcgtccagcctctagacacttcccaaagcaagactggacacatgccgagggcgttgcggatagtgcctcaccattgcccaccctgctgcccaactcctgtgagagaaaaaccaatcaatgtttacaaaatggaaaaggacacagcatgtcctttgaactccctaagtaaggcccacagttcttgatgcagagaaccaaagtgaatcatagaaaagcttttgctaacagtccgctttccaggaggcaaacttgtgtttatccaaacctgatccccatgatggggacttttctagagcaccccaaatgtcatggggagagagggactctttctgctccctcagagctactcttcacttgtccctgcttccggcaccaagttcataatagagatcttctggccagagaatcaggggagaggagaggcctgatggggcagagctggacgaagtctgctaagagagatggaggctgtggcggactccttccaactcacgatttatcctcagctcagagtgtattttgaatatgagcaaatgtttattcaatcttcaagaagtatcaagtccatccaggcgcggtggcttacacctgtaatcccaggctttgggaggccgaggcagccggatcatgaggtcaggagatcgagaccatcctggctaacacggtgaaaccccatctctgtattttgtatttgtaaaaatacaaaaaattacctgagcgtggtggcacgcacctgtagtcccggctactcaggaggctgaggcaggagaatcacttgaacccgggaggcggaggttgcagtgagccaagatcatgccgctgcactccagcctgggngacagagcaagactccatctc

SEQ ID NO: 293430 - DNA, 863 bp, Homo sapiens
cgcgacgccccgagtggcggttgtttcaagatggcggacgtggcgggcccctcccgccccagtgccgcggcgttctggagccgggacttttctgatgaagaacaatcagtagtatacgttccaggaatttctgctgaaggaaatgtcagatcaagacacaagctgatgagtccaaaagctgatgttaaacttaagacttccagggtgactgatgcttcaatctccatggagtccttaaaaggcacaggagattcagtagatgaacagaattcctgcaggggagaaataaagagtgcatcattgaaggatttatgtcttgaagacaaaagacgcattgcaaacttaattaaagaactggccagagtaagtgaggaaaaggaagtgacagaggaaagactgaaagctgagcaggagtcatttgagaagaagatcaggcagttggaagaacagaatgaactgatcatcaaagaaagggaagatatccttttgaaagttctcttttttaacgttcaagaagtttgactatttctttttttttttgagacgaaatctcgctcttgtcgcctaggctgcagtgcaatggtgcgatttcagttcaccgcaacctccacctcccggttcaagcgattctcctacctcagcctcccgagtagctgggattacaggcacccaccaccaggcccagctaattttcgtatttttagtagagacggggtttcaccttgttggccaggctggtcttgaactcctgacctcaggtgatctgcctgccttggcctcccaaagtgctaggattacaggtgtgagccaccgtgcctggccagaagtttgactatttcatgaagacaatgtaaactccagag

SEQ ID NO: 293431 - DNA, 4870 bp, Homo sapiens
cgcgacgccccgagtggcggttgtttcaagatggcggacgtggcgggcccctcccgccccagtgccgcggcgttctggagccgggacttttctgatgaagaacaatcagtagtatacgttccaggaatttctgctgaaggaaatgtcagatcaagacacaagctgatgagtccaaaagctgatgttaaacttaagacttccagggtgactgatgcttcaatctccatggagtccttaaaaggcacaggagattcagtagatgaacagaattcctgcaggggagaaataaagagtgcatcattgaaggatttatgtcttgaagacaaaagacgcattgcaaacttaattaaagaactggccagagtaagtgaggaaaaggaagtgacagaggaaagactgaaagctgagcaggagtcatttgagaagaagatcaggcagttggaagaacagaatgaactgatcatcaaagaaagggaagctcttcagctacagtatagagaatgccaagaacttctaagcctgtatcagaaatatttatcagaacaacaggagaagctcaccatgtctctctcagaacttggtgctgctagaatgcaggaacagcaggtatccagtagaaaaagcactctccagtgttcatctgtggaactggatggttcctacttgagcatagccagaccacagacctactatcaaaccaagcaaagacctaagtctgcagtccaggattcagcttcagaatcccttatagcatttaggaataattctttgaaaccagtaacccttcatcatcccaaagatgatctagataagataccatcagagaccacaacatgtaattgtgaatctccagggagaaaacctgcagtcccaacagagaaaatgccacaagaagaattgcacatgaaggaatgtccacatcttaagcctactcctagtcaatgctgtggtcatagacttgctgcagatcgtgttcatgacagccatcctacaaacatgacccctcaacatcctaagacacatccagaatcatgcagttattgtcggctttcttgggcatctctggtgcatggtggtggggcactgcaacccattgaaactttgaaaaagcagatctcagaagatagaaagcagcaactgatgcttcagaaaatggaactggaaattgaaaaggagcgccttcagcatctgctggcccagcaggagacaaagcttcttctaaaacagcagcagcttcaccagtctcgactggattacaattgtttattgaagtcaaactgtgatggctggctgcttggaacatcatcatctattaaaaagcaccaagaccccccaaacagtggagagaataggaaggagaggaagacagttgggtttcattcgcatatgaaagatgatgcccagtggtcatgtcaaaagaaagatacatgtagaccccaaagagggacagtgacaggagttagaaaagatgcgtctacatctcctatgccaacaggaagcctaaaggattttgtcaccacagcctcaccatcattacagcacaccacctcccggtatgagacatctttgttggatttggttcagtctctgagcccaaactctgcgcccaaacctcagcgctatccctccagagaagctggggcctggaatcatggtactttccgactcagtcctctaaaatcaacccggaagaagatggggatgcacagaacccctgaagagttggaggagaatcagattctggaagatatatttttcatttgacatattgcaaaattttcttaggaaatttgtgggtttcctcacatactgatctaggattttaaattatttcattgcaaagtaattgtgtctctcctttcacggggacttgtctcactagcatcctgttacgtattgaatatagaaatcattctaacaacccaggttattttcaatcagaccaggcattcgataacacactaagggggtaggaatggaagatggtatcttttatatgctaaacagattagaaaattaacataggatactttctgcgtggtggaaaccattgcatattcagcctcatttcaagagtgtttccttctcaaacttctgctagaaaatgctgactcacttttatatacaagaaaaacctttccactgaaaaatccctctgatttaaaagtaacccctttgaaacataagcagtttcagaaaggcagactctctcatctttctcatcctgttctctcactactacatttctgtaagtggtcctttaattctgaagttggagttggtgcccctgccatcacaaacaacacgagagccaattgtgagtcagtctcagtagccatcagcctggcagctgcccatcccataaccaaagagctcaatgggctggagggtgagacccagccaatccttgggagcaagcagcactaaatcacatcagggagtgattagtcctggggaaattcagtggaggcacaagcctgaagcactcttctaccaatgtttgggtgaccacccctccaatatcccagaatgaataagaacaatccctaggtatttttatttacccaagtgttcagcttattcaccccacccccccaccccccatcacacgtgctcctgtgaactttccatggttatgtctacggaaaatgccactagagagagagtgatgcaagctgctgcaaagctgatgggcttcctctggccctcccttttcctccacgaggattaaaggatacaagctgaccaggcctcacaggtgctctgctcgtggccccaaagaaccatctctacttgccagagtatgttccaccacccaagcagggtctccctactttttctcactggcctcgttttgacccagagaaagcctatggaagttatgcagtgcagacctcatcctgtctgctgtcttttctcccacagagctcttgagatgggtccttcagcttgcagtggtccctagtagcctctcaagctaatggggatgatgatcctggtttagccagagttcaaaactctccagtcattgaaagcaaggggagggtgtgttcccagatgtgtattacttgggaattttatttgatctggagggtgtggctttttttctctcctttttaccaaccccaactaaactgggagtaagacttagtcagtgttggtagacaaagtcataccacccagggcagcctgcatgcagcgagtctgcgtggcttccctgaattactcttttaattaaaactagattatttcaatctagaaaagccttgttgagcagcctccttatccagatagatccaaagctcatgtctcttcaggctgagactggcgctgtcacctccacccagccttctttcacttggggttttttattctttggagtagaaaagaatggagcccactaatattatatttttcttctgaaataaatataaagtcaagactaactagttataatcattcccttaaaaagttggaaaatcattacagattaaaatttctttataaagttcacctctgagagtaaccaaatcggtttcatcccatatcaaaaagcctttggagtgtggagctttctgtggtatggcagaaatgggtggatggcaaactaagagccctcagccattttttcagttaaagttaggttgccagaactttcttttccttgccccctgtgtcatgactagcttaagtgtacttgactcccatagactactcccatgcccacagtcacccattccagactccagtgtccttaaaactctggagtgagaggatgccagaggatcaagaaaaggatcacagtttcttgaagaagcttgtttgcctttagaagaatcgtaaacagagtctaaactaaaggctttttgggggtcacagccacagagtggagttttattgcttctttgcctctccatgaatggccaatttggaaaagcagagatgggctttcagcagaatatcaaccaatacatttttcacatgcaaaactcatcaccagttgcctttttctaacttaatggacattttgttggtgttggtgcaagggcaataggatgtaaatttgtatataatctaatgtcttcattattaattgaatagtacatgttaacattttaatctatttaaatttactttgaaatatatacatacatatgaatgaaaggttgttacagagcctcaaagctgttgcagactatcccaagagaaaggatctggcacaaaggaatctgcctttcctccgtctcaagtctcccacccttgactggttgggatttgctcgtccagcctctagacacttcccaaagcaagactggacacatgccgagggcgttgcggatagtgcctcaccattgcccaccctgctgcccaactcctgtgagagaaaaaccaatcaatgtttacaaaatggaaaaggacacagcatgtcctttgaactccctaagtaaggcccacagttcttgatgcagagaaccaaagtgaatcatagaaaagcttttgctaacagtccgctttccaggaggcaaacttgtgtttatccaaacctgatccccatgatggggacttttctagagcaccccaaatgtcatggggagagagggactctttctgctccctcagagctactcttcacttgtccctgcttccggcaccaagttcataatagagatcttctggccagagaatcaggggagaggagaggcctgatggggcagagctggacgaagtctgctaagagagatggaggctgtggcggactccttccaactcacgatttatcctcagctcagagtgtattttgaatatgagcaaatgtttatgtacgtatgagatttcaagttaataaatcatctctatggctattttcccc

SEQ ID NO: 293432 - DNA, 433 bp, Homo sapiens
ctgggcttcttgaattctcattttctaataatctgatcctttcctgtctgggttatatgtcttacaggtatgagacatctttgttggatttggttcagtctctgagcccaaactctgcgcccaaacctcagcgctatccctccagagaagctggggcctggaatcatggtactttccgactcagtcctctaaaatcaacccggaagaagatggggatgcacagaacccctgaagagttggaggagaatcagattctggaagatatatttttcatttgacatattgcaaaattttcttaggaaatttgtgggtttcctcacatactgatctaggattttaaattatttcattgcaaagtaattgtgtctctcctttcacggggacttgtctcactagcatcctgttacgtattgaatatagaaatcattctaac

SEQ ID NO: 293433 - DNA, 1577 bp, Homo sapiens
aggtgatcttgtggttctttctaggtatccagtagaaaaagcactctccagtgttcatctgtggaactggatggttcctacttgagcatagccagaccacagacctactatcaaaccaagcaaagacctaagtctgcagtccaggattcagcttcagaatcccttatagcatttaggaataattctttgaaaccagtaacccttcatcatcccaaagatgatctagataagataccatcagagaccacaacatgtaattgtgaatctccagggagaaaacctgcagtcccaacagagaaaatgccacaagaagaattgcacatgaaggaatgtccacatcttaagcctactcctagtcaatgctgtggtcatagacttgctgcagatcgtgttcatgacagccatcctacaaacatgacccctcaacatcctaagacacatccagaatcatgcagttattgtcggctttcttgggcatctctggtgcatggtggtggggcactgcaacccattgaaactttgaaaaagcagatctcagaagatagaaagcagcaactgatgcttcagaaaatggaactggaaattgaaaaggagcgccttcagcatctgctggcccagcaggagacaaagcttcttctaaaacagcagcagcttcaccagtctcgactggattacaattgctcagagtagtttgatcatctgaatccttctctcaactcgtcaaagtcattctctgtccagctttgttccgttgctggtgaggagctgcgttcctttggaggaggagaggtgctctgctttttagagtttccaagaaccaagttggaaaacactctgcaggatattatccaggagaacttccccaatctagcaaggcaggccaacattcagattcaggaaatacagagaacgccacaaagatactcctcgagaagagcaactccaagacacataattgtcagattcaccaaagttgaaatgaaggaaaaaatgttaagggcagccagagagaaaggttgggttacccacaaagggaagcccatcagactaacagcggatctcttggcagaaactctacaagccagaagagagtgggggccaatattcaacattcttaaagaaaagaattttcaacccagaatttcatatccagccaaactaagcttcataagtgaaggagaaataaaatcctttacagacaagcaaatgctgagagattttctcaccaccagacttgccctaaaagagctcctgaaggaagcactaaacatggaaaggaacaactggtaccagctgctgcaaaatcatgccaaaatgtaaagaccatcaaggctaggaagaaactgcatcaactaacgagcaaaataaccagctaacatcataatgacaggaacaaattcacacataacaatattaactttaaatgtaaatggactaaatgctccaattaaaagacacagactggcaaattggataaagagtcaagacccatcagtgtgctgttttcaggaaacccatctcacatgcagagacacacataggctcaaaataaaaggatggaggaagatctaccaagc

SEQ ID NO: 293434 - DNA, 1692 bp, Homo sapiens
cgcgacgccccgagtggcggttgtttcaagatggcggacgtggcgggcccctcccgccccagtgccgcggcgttctggagccgggacttttctgatgaagaacaatcagtagtatacgttccaggaatttctgctgaaggaaatgtcagatcaagacacaagctgatgagtccaaaagctgatgttaaacttaagacttccagggtgactgatgcttcaatctccatggagtccttaaaaggcacaggagattcagtagatgaacagaattcctgcaggggagaaataaagagtgcatcattgaaggatttatgtcttgaagacaaaagacgcattgcaaacttaattaaagaactggccagagtaagtgaggaaaaggaagtgacagaggaaagactgaaagctgagcaggagtcatttgagaagaagatcaggcagttggaagaacagaatgaactgatcatcaaagaaagggaagctcttcagctacagtatagagaatgccaagaacttctaagcctgtatcagaaatatttatcagaacaacaggagaagctcaccatgtctctctcagaacttggtgctgctagaatgcaggaacagcaggtatccagtagaaaaagcactctccagtgttcatctgtggaactggatggttcctacttgagcatagccagaccacagacctactatcaaaccaagcaaagacctaagtctgcagtccaggattcagcttcagaatcccttatagcatttaggaataattctttgaaaccagtaacccttcatcatcccaaagatgatctagataagataccatcagagaccacaacatgtaattgtgaatctccagggagaaaacctgcagtcccaacagagaaaatgccacaagaagaattgcacatgaaggaatgtccacatcttaagcctactcctagtcaatgctgtggtcatagacttgctgcagatcgtgttcatgacagccatcctacaaacatgacccctcaacatcctaagacacatccagaatcatgcagttattgtcggctttcttgggcatctctggtgcatggtggtggggcactgcaacccattgaaactttgaaaaagcagatctcagaagatagaaagcagcaactgatgcttcagaaaatggaactggaaattgaaaaggagcgccttcagcatctgctggcccagcaggagacaaagcttcttctaaaacagcagcagcttcaccagtctcgactggattacaattggttaaaagctcaggctctgtttaagtcgagagaactggttgctgaaaaacagcttactaaaccccaagaactcaaactggatatgaatggcagtgactctggaccaaggtaaacctgaagtctcagttaaaacaagaatcttaagggcataaatatttaggatacgtttggtatacttttatagctctatgttgattaatacagttttgtgaccatatgaatacgtacattcctgttatacaattttgaaaaatatagaaaaatatgaaaaacaaaataaaaatcattcataatcctacaactttgagagaatcttttgagcccttttctactatttcttttttgttttttgttttttttttttttttggtgcggtattatagtctatattgagtattaaggattatgcttatacagaattttatgttac

SEQ ID NO: 293435 - DNA, 493 bp, Homo sapiens
agctgatttttcagtgaacatgtttttattgaacaccaacttaatttcaggaacatttcaggtacattgtcagaaataaagactcttaagaatgtattattatgtacccaatactggtttcaggcctttacatgtattctcatgaaactctatgaagtagatattattatcaatattcctactttacagatgaggaaacccaggcctggagaggtcaagcaacttgctcaagtggcacagctggagagtggggagctgggacttgagcccaggtagtgtgtccccagcaccttcaactaaactccattctgtgctgccctttggaacacccactcaatggccttcacactccatgtcctacttgggaggacatgtgatctcaacagcactcacaaatgaaggctttccagacaggatattgaagatggtaagatcagtctcatgtataaagcattttttaaaagtaaagcatattatatgctagtcatatgta

SEQ ID NO: 293436 - DNA, 651 bp, Homo sapiens
agctgatttttcagtgaacatgtttttattgaacaccaacttaatttcaggaacatttcaggtacattgtcagaaataaagactcttaagaatgtattattatgtacccaatactggtttcaggcctttacatgtattctcatgaaactctatgaagtagatattattatcaatattcctactttacagatgaggaaacccaggcctggagaggtcaagcaacttgctcaagtggcacagctggagagtggggagctgggacttgagcccaggtagtgtgtccccagcaccttcaactaaactccattctgtgctgccctttggaacacccactcaatggccttcacactccatgtcctacttgggaggacatgtgatctcaacagcactcacaaatgaaggctttccagacaggatattgaagatgggaggtgtgagctgtgggagagagctgactaagaagaagaaactccccagaaaggtggcctgccagtcttcacgatgtatgggagcaggtgggaaaagagctgcaagtgtttgcacttcatcattgaaattgttgaaactgctgatcaggaaacacagaatgagtttaaccagcgatgccaacttctgcaagatggactccagcttgggagctctgtatggaat

SEQ ID NO: 293437 - DNA, 1516 bp, Homo sapiens
taatttttttttgagtactgaaacctttattcccattttactggaaacaaagaacatgaacaatttactagtcagaaaaaaagtgttttataacccaaaacaaatatttgccaagagctgtaaattgcttaaatcgcttaaactggagatttcagtgagatttttagcagtagattactaagctccttagttatagaacattcaatgcataggaaagtgtttttcctacaaagcataactgaaatgtagtttaactaatggtttacaattcagtcaaataccaaagctgcaaaccatttagggagtcatcaattacatattttgtacactttcaaaaagcttacagctgggatgggttgtttattttcaaagcatgactgctttaaaatgatcatattctttagcctgccacctaggaagcattaagcatttacttgcagaatgaacaaacgagcacgttgtcttgtgttatgaagtatataatatagttcgttttagtttcttcattcgcagactatcaggctcatttcacgtgactgcttgcacttagaactgagttatcacggagtaggaactctccaacatcgtcgtcatagaccaagagatgcccatgaacagccatgaaagtgccagtcagggaagtattcagtgctttgttgtagagttgttggatagaggcacaggatcatttcatgttgttgaggagaaaggagcaacagcctcctcccaccttattaaaaatagagatttaaaaaaacctctaatttcctcgaagtacagaatctcaagaggtagctctaaggagaatccctctgggtttgagcgcattcctcttccagggggcctattcttggactgctttccttaatagagaaatctctctgagccaaaatcggcctcccccaattccatcctgtcggccccacttttctgctccggagacttccaagccagtccccactcctccttcagccagtcgggcccgcacccgcgcccggcagggccagccctctcctcctcctgcgtggcgcagcacaggccctgagcgcgcgaccccaggccctgggcgccccgccgcatgctcgcggctggaagccccagtttgcgtggcccttcgggttattccgctcaagagccgccgcgtcgccccatctcggcgcgaatctgaaagcgctttcgggggagaagatgttgggggcactggtgagtacactgcacaagtgacaaaatgttttcagctcctggaggcgaaaggtgcagagtcgctctgtgtccgtgaggccgggcggcgacctcgctcagtcggcttctcggtccgagtccccgggtacgaggaaagaccacagggggcttctcgcggaaaagcgggccgcggaccctgcgcgggctggctggggcgggcggatgacgaggcgcaggggcaagggtgggtctgcgaggcggcgggtccgggcgtcttaggctccggggctccctcgctggcggcggagcagggatggcgcgcccgggggtgagg

SEQ ID NO: 293438 - DNA, 2683 bp, Homo sapiens
taatttttttttgagtactgaaacctttattcccattttactggaaacaaagaacatgaacaatttactagtcagaaaaaaagtgttttataacccaaaacaaatatttgccaagagctgtaaattgcttaaatcgcttaaactggagatttcagtgagatttttagcagtagattactaagctccttagttatagaacattcaatgcataggaaagtgtttttcctacaaagcataactgaaatgtagtttaactaatggtttacaattcagtcaaataccaaagctgcaaaccatttagggagtcatcaattacatattttgtacactttcaaaaagcttacagctgggatgggttgtttattttcaaagcatgactgctttaaaatgatcatattctttagcctgccacctaggaagcattaagcatttacttgcagaatgaacaaacgagcacgttgtcttgtgttatgaagtatataatatagttcgttttagtttcttcattcgcagactatcaggctcatttcacgtgactgcttgcacttagaactgagttatcacggagtaggaactctccaacatcgtcgtcatagaccaagagatgcccatgaacagccatgaaagtgccagtcagggaagtattcagtgctttgttgtagagttgttggatagaggcacaggatcatttcatgttgttgaggagaaaggagcaacagcctcctcccaccttattaaaaatagagatttaaaaaaacctctaatttcctcgaagtacagaatctcaagaggtagctctaaggagaatccctctgggtttgagcgcattcctcttccagggggcctattcttggactgctttccttaatagagaaatctctctgagccaaaatcggcctcccccaattccatcctgtcggccccacttttctgctccggagacttccaagccagtccccactcctccttcagccagtcgggcccgcacccgcgcccggcagggccagccctctcctcctcctgcgtggcgcagcacaggccctgagcgcgcgaccccaggccctgggcgccccgccgcatgctcgcggctggaagccccagtttgcgtggcccttcgggttattccgctcaagagccgccgcgtcgccccatctcggcgcgaatctgaaagcgctttcgggggagaagatgttgggggcactggtctggatgctggtagccggcttcctgctggcgctgccgccgagctgggccgcgggcgccccgagggcgggcaggcgccccgcgcggccgcggggctgcgcggaccggccggaggagctactggagcagctgtacgggcgcctggcggccggcgtgctcagtgccttccaccacacgctgcagctggggccgcgtgagcaggcgcgcaacgcgagctgcccggcagggggcaggcccgccgaccgccgcttccggccgcccaccaacctgcgcagcgtgtcgccctgggcctacagaatctcctacgacccggcgaggtaccccaggtacctgcctgaagcctactgcctgtgccggggctgcctgaccgggctgttcggcgaggaggacgtgcgcttccgcagcgcccctgtctacatgcccaccgtcgtcctgcgccgcacccccgcctgcgccggcggccgttccgtctacaccgaggcctacgtcaccatccccgtgggctgcacctgcgtccccgagccggagaaggacgcagacagcatcaactccagcatcgacaaacagggcgccaagctcctgctgggccccaacgacgcgcccgctggcccctgaggccggtcctgccccgggaggtctccccggcccgcatcccgaggcgcccaagctggagccgcctggagggctcggtcggcgacctctgaagagagtgcaccgagcaaaccaagtgccggagcaccagcgccgcctttccatggagactcgtaagcagcttcatctgacacgggcatccctggcttgcttttagctacaagcaagcagcgtggctggaagctgatgggaaacgacccggcacgggcatcctgtgtgcggcccgcatggagggtttggaaaagttcacggaggctccctgaggagcctctcagatcggctgctgcgggtgcagggcgtgactcaccgctgggtgcttgccaaagagatagggacgcatatgctttttaaagcaatctaaaaataataataagtatagcgactatatacctacttttaaaatcaactgttttgaatagaggcagagctattttatattatcaaatgagagctactctgttacatttcttaacatataaacatcgttttttacttcttctggtagaattttttaaagcataattggaatccttggataaattttgtagctggtacactctggcctgggtctctgaattcagcctgtcaccgatggctgactgatgaaatggacacgtctcatctgacccactcttccttccactgaaggtcttcacgggcctccaggtggaccaaagggatgcacaggcggctcgcatgccccagggccagctaagagttccaaagatctcagatttggttttagtcatgaatacataaacagtctcaaactcgcacaattttttcccccttttgaaagccactggggccaatttgtggttaagaggtg

SEQ ID NO: 293439 - DNA, 2955 bp, Homo sapiens
taatttttttttgagtactgaaacctttattcccattttactggaaacaaagaacatgaacaatttactagtcagaaaaaaagtgttttataacccaaaacaaatatttgccaagagctgtaaattgcttaaatcgcttaaactggagatttcagtgagatttttagcagtagattactaagctccttagttatagaacattcaatgcataggaaagtgtttttcctacaaagcataactgaaatgtagtttaactaatggtttacaattcagtcaaataccaaagctgcaaaccatttagggagtcatcaattacatattttgtacactttcaaaaagcttacagctgggatgggttgtttattttcaaagcatgactgctttaaaatgatcatattctttagcctgccacctaggaagcattaagcatttacttgcagaatgaacaaacgagcacgttgtcttgtgttatgaagtatataatatagttcgttttagtttcttcattcgcagactatcaggctcatttcacgtgactgcttgcacttagaactgagttatcacggagtaggaactctccaacatcgtcgtcatagaccaagagatgcccatgaacagccatgaaagtgccagtcagggaagtattcagtgctttgttgtagagttgttggatagaggcacaggatcatttcatgttgttgaggagaaaggagcaacagcctcctcccaccttattaaaaatagagatttaaaaaaacctctaatttcctcgaagtacagaatctcaagaggtagctctaaggagaatccctctgggtttgagcgcattcctcttccagggggcctattcttggactgctttccttaatagagaaatctctctgagccaaaatcggcctcccccaattccatcctgtcggccccacttttctgctccggagacttccaagccagtccccactcctccttcagccagtcgggcccgcacccgcgcccggcagggccagccctctcctcctcctgcgtggcgcagcacaggccctgagcgcgcgaccccaggccctgggcgccccgccgcatgctcgcggctggaagccccagtttgcgtggcccttcgggttattccgctcaagagccgccgcgtcgccccatctcggcgcgaatctgaaagcgctttcgggggagaagatgttgggggcactggtctggatgctggtagccggcttcctgctggcgctgccgccgagctgggccgcgggcgccccgagggcgggcaggcgccccgcgcggccgcggggctgcgcggaccggccggaggagctactggagcagctgtacgggcgcctggcggccggcgtgctcagtgccttccaccacacgctgcagctggggccgcgtgagcaggcgcgcaacgcgagctgcccggcagggggcaggcccgccgaccgccgcttccggccgcccaccaacctgcgcagcgtgtcgccctgggcctacagctcagtttccatcacctctaatcatccctggaggactcgtcctttgttcctggattaagccgggccacctgtcactcgctcaagccaagcttcccacgtggccagggacacttctgcgatcccatcagaggggaaaacttgatgtgtttcaagaatgccctggtgccaagcttctgcagagcagcacgcagaaaatgtgaagacaaaagaatgactgcccacaggaggcgcggcacagggcagaactctgctcggttgcttgtccgtgtttgaatctcctacgacccggcgaggtaccccaggtacctgcctgaagcctactgcctgtgccggggctgcctgaccgggctgttcggcgaggaggacgtgcgcttccgcagcgcccctgtctacatgcccaccgtcgtcctgcgccgcacccccgcctgcgccggcggccgttccgtctacaccgaggcctacgtcaccatccccgtgggctgcacctgcgtccccgagccggagaaggacgcagacagcatcaactccagcatcgacaaacagggcgccaagctcctgctgggccccaacgacgcgcccgctggcccctgaggccggtcctgccccgggaggtctccccggcccgcatcccgaggcgcccaagctggagccgcctggagggctcggtcggcgacctctgaagagagtgcaccgagcaaaccaagtgccggagcaccagcgccgcctttccatggagactcgtaagcagcttcatctgacacgggcatccctggcttgcttttagctacaagcaagcagcgtggctggaagctgatgggaaacgacccggcacgggcatcctgtgtgcggcccgcatggagggtttggaaaagttcacggaggctccctgaggagcctctcagatcggctgctgcgggtgcagggcgtgactcaccgctgggtgcttgccaaagagatagggacgcatatgctttttaaagcaatctaaaaataataataagtatagcgactatatacctacttttaaaatcaactgttttgaatagaggcagagctattttatattatcaaatgagagctactctgttacatttcttaacatataaacatcgttttttacttcttctggtagaattttttaaagcataattggaatccttggataaattttgtagctggtacactctggcctgggtctctgaattcagcctgtcaccgatggctgactgatgaaatggacacgtctcatctgacccactcttccttccactgaaggtcttcacgggcctccaggtggaccaaagggatgcacaggcggctcgcatgccccagggccagctaagagttccaaagatctcagatttggttttagtcatgaatacataaacagtctcaaactcgcacaattttttcccccttttgaaagccactggggccaatttgtggttaagaggtg

SEQ ID NO: 293440 - DNA, 2807 bp, Homo sapiens
taatttttttttgagtactgaaacctttattcccattttactggaaacaaagaacatgaacaatttactagtcagaaaaaaagtgttttataacccaaaacaaatatttgccaagagctgtaaattgcttaaatcgcttaaactggagatttcagtgagatttttagcagtagattactaagctccttagttatagaacattcaatgcataggaaagtgtttttcctacaaagcataactgaaatgtagtttaactaatggtttacaattcagtcaaataccaaagctgcaaaccatttagggagtcatcaattacatattttgtacactttcaaaaagcttacagctgggatgggttgtttattttcaaagcatgactgctttaaaatgatcatattctttagcctgccacctaggaagcattaagcatttacttgcagaatgaacaaacgagcacgttgtcttgtgttatgaagtatataatatagttcgttttagtttcttcattcgcagactatcaggctcatttcacgtgactgcttgcacttagaactgagttatcacggagtaggaactctccaacatcgtcgtcatagaccaagagatgcccatgaacagccatgaaagtgccagtcagggaagtattcagtgctttgttgtagagttgttggatagaggcacaggatcatttcatgttgttgaggagaaaggagcaacagcctcctcccaccttattaaaaatagagatttaaaaaaacctctaatttcctcgaagtacagaatctcaagaggtagctctaaggagaatccctctgggtttgagcgcattcctcttccagggggcctattcttggactgctttccttaatagagaaatctctctgagccaaaatcggcctcccccaattccatcctgtcggccccacttttctgctccggagacttccaagccagtccccactcctccttcagccagtcgggcccgcacccgcgcccggcagggccagccctctcctcctcctgcgtggcgcagcacaggccctgagcgcgcgaccccaggccctgggcgccccgccgcatgctcgcggctggaagccccagtttgcgtggcccttcgggttattccgctcaagagccgccgcgtcgccccatctcggcgcgaatctgaaagcgctttcgggggagaagatgttgggggcactggtgagtacactgcacaagtgacaaaatgttttcagctcctggaggcgaaaggtgcagagtcgctctgtgtccgtgaggccgggcggcgacctcgctcagtcggcttctcggtccgagtccccgggtctggatgctggtagccggcttcctgctggcgctgccgccgagctgggccgcgggcgccccgagggcgggcaggcgccccgcgcggccgcggggctgcgcggaccggccggaggagctactggagcagctgtacgggcgcctggcggccggcgtgctcagtgccttccaccacacgctgcagctggggccgcgtgagcaggcgcgcaacgcgagctgcccggcagggggcaggcccgccgaccgccgcttccggccgcccaccaacctgcgcagcgtgtcgccctgggcctacagaatctcctacgacccggcgaggtaccccaggtacctgcctgaagcctactgcctgtgccggggctgcctgaccgggctgttcggcgaggaggacgtgcgcttccgcagcgcccctgtctacatgcccaccgtcgtcctgcgccgcacccccgcctgcgccggcggccgttccgtctacaccgaggcctacgtcaccatccccgtgggctgcacctgcgtccccgagccggagaaggacgcagacagcatcaactccagcatcgacaaacagggcgccaagctcctgctgggccccaacgacgcgcccgctggcccctgaggccggtcctgccccgggaggtctccccggcccgcatcccgaggcgcccaagctggagccgcctggagggctcggtcggcgacctctgaagagagtgcaccgagcaaaccaagtgccggagcaccagcgccgcctttccatggagactcgtaagcagcttcatctgacacgggcatccctggcttgcttttagctacaagcaagcagcgtggctggaagctgatgggaaacgacccggcacgggcatcctgtgtgcggcccgcatggagggtttggaaaagttcacggaggctccctgaggagcctctcagatcggctgctgcgggtgcagggcgtgactcaccgctgggtgcttgccaaagagatagggacgcatatgctttttaaagcaatctaaaaataataataagtatagcgactatatacctacttttaaaatcaactgttttgaatagaggcagagctattttatattatcaaatgagagctactctgttacatttcttaacatataaacatcgttttttacttcttctggtagaattttttaaagcataattggaatccttggataaattttgtagctggtacactctggcctgggtctctgaattcagcctgtcaccgatggctgactgatgaaatggacacgtctcatctgacccactcttccttccactgaaggtcttcacgggcctccaggtggaccaaagggatgcacaggcggctcgcatgccccagggccagctaagagttccaaagatctcagatttggttttagtcatgaatacataaacagtctcaaactcgcacaattttttcccccttttgaaagccactggggccaatttgtggttaagaggtg

SEQ ID NO: 293441 - DNA, 757 bp, Homo sapiens
ggttctgtcagcacctttcgagcaaataaggtgtgacttttcagggtactgctgcttccataagctttatttgtttactgtccagctcacagacatgtctagagacagcagtggcaagtgattaccatacttatcctagctccatctatttttgacgcttttgttttccccatcagtaaaatgggaaatatcccttatcataaagttcttgagccttttagcatgagggtggctgaaacagcataaagacttcttaatctggctgggcacagtggctcatgcctataatcctagcactttgggaggccaaggaaggaggatcacttgaacccaggagttcaaaaccagcctgggaaataatagcaggacctcgtctctataaagaaaaaattttttttaattagccaagtgtggtggcacacgctttagtcccagctacttgggaggctgaggtggaaggattacttgagaggttgcagtgagccgagactgtgccactgcactccagccagggtgacagagtgaaaccctctctcaaaaaaaataaaaataaaaagaccccttagtcttgttgtcactaagaatttatgatatgctgctgtagtaactatttccagctcttgggaaaacattaactctgtactctgatagtacagtaagtgagagtgaataagtaaggtcctatacactgaagggatagggaaaggttacttatcagtcctgttattgagactggggactgtctgattcttctcca

SEQ ID NO: 293442 - DNA, 4175 bp, Homo sapiens
tggggttataattgcctctcaccccccggaggggttattttgggggtggttggaggcggtggcggcggcggcgaggaggggaatttccttgtgcctccattcccgggaggggggagcggcgttggaggccaccgtttccagcatcaacaacagcaacttgtgattggcggtgaccggatattcagttgcacatccccacatcaatgcactgccaatgggttatatcctgtgttgtgacctcatggtttaagtgggaataaagatgagtataagcagtgatgaggtcaacttcttggtatatagatacttgcaagagtcaggattttctcattcagcatttacctttggtatagaaagccatatcagtcagtccaatataaatggtgccctcgtcccacccgctgcattgatttctatcatccagaaaggtctacagtatgtagaagcagaagttagtattaatgaggatggtaccttgtttgatggtcgaccaatagagtctctgtccctgatagatgccgtaatgcctgatgtagtacaaacaagacaacaagcttatagagataagcttgcacagcaacaggcagcagctgctgcagctgccgcagctgcagccagccaacaaggatctgcaaaaaatggagaaaacacagcaaatggggaggagaatggagcacatactatagcaaataatcatactgatatgatggaagtggatggggatgttgaaatccctcctaataaagctgttgtgttgcggggccatgaatctgaagtttttatctgtgcctggaaccctgttagtgatctcctagcatcagggtctggagactcaacagcaagaatatggaatcttagtgagaacagcaccagtggctctacacagttagtacttagacattgtatacgagaaggagggcaagatgttccaagcaacaaggatgtcacatctctagattggaatagtgaaggtacacttctagcaactggttcctatgatgggtttgccagaatatggactaaagatggtaaccttgctagcaccttagggcagcataaaggccctatatttgcattaaaatggaataagaaaggaaatttcatcctaagtgctggagtagacaagactacaattatttgggacgcacatactggtgaagccaagcaacagtttccttttcattcagcaccagcattggatgttgattggcagagcaacaacacctttgcttcttgtagtacagatatgtgcattcatgtctgtaaattaggacaagacagacctattaaaacattccaaggacatacgaatgaagtaaatgctatcaaatgggacccaactggcaatctcttggcctcctgttctgacgacatgactttaaagatatggagtatgaaacaagacaattgtgtccatgatttgcaagcacataataaagaaatttatactatcaaatggagtccaacaggaccagggactaataatccaaatgccaaccttatgttagcaagtgcatcctttgattctactgttaggttatgggatgtagaccgagggatatgcatccataccttgacaaaacaccaagagcctgtgtacagtgtagctttcagtcctgatggcaggtatctggcaagtggttcttttgacaaatgtgtacacatctggaacacgcagacaggtgctctagttcacagctataggggaacaggtggaatatttgaagtttgctggaatgcagcaggagacaaagttggagccagtgcatcagatggttcagtttgtgtattagaccttcggaaatagcgctactagttggaagccatggaccgactatgaatgtgtacatagccaaaatgactgtccctgacccatgtactgctatagtcccacttgaaccatggccagtccactacagccaaatctaaaagaaatatatacatacagtgtatataaacaaaattgcaccctgaagatgacagagttttgtcacagcttgtgaattctgttcaccaagtgctggaatctaatctgctgtgcccctaaaatagcatttagaagttttggatatgaaaaacagaagagagaaaaatatacattataaaagcagaacatacatgtaccagtttttggatactaaatgacagccttgtttctcccctttgaatcagcagacaccatggattatattctttttttcccttcagtagtgagcagtttgtatgtacagagaaaatggacttacaaaaacttgcagcagtagtttgttcttgctttaaaatttcgtttttggtttagattatggatgcatgaagtaagggagtgaatcagtttcttgtttatatttttttcaccttttaaacaaaaaattctttaaaatattttaatgcattcttttgaagaggtagatgtttggtacattttatggctcccagagcatatattcagttggtgcatgttgtggaagggggaattggaaattaaatgaaaacctatgactttggtcatgtcaatctgtaagacacatcagtaaaagggtattatgctctgttggttttgtttttttgttttgcttttttttttttttttcttttttgttttttggtgatgtggcttaaatgcaatagtttcttttttgggacatatttctgccaattaaagactagaagggcacaactttttttttaattaccatagagaagatacattaaaaaaaatcttctgatgttttgtagccataactaaattatggtaaaaatgtgcactattgtgaaaaggagcaacgtagttttgggttttttgttgtttgtttgttttgctttgttttttaagagattaaaatgtttctggataaggattagcttctcgaagtgtccatcattctgtgtagaagcttaaatatgtaatgtaaccaaactccagtattaaaaatctctcatgttgttttctttatacaaagcaagataacggcatataacactgccattacatggcaaaatgtttgctaccttagtttaaaaaacaatctcaaacaaaagacttgcttcaaggtgtttttaaatagcagtgattcagaattttttttaatgaaagtataattgcactaaccttcttcctgctgctctgattctgcatttgtggtacttgtgactacgttttttcaaatatagatagatttaagctgctaatttttttttttttagtaatcactactatatcatgtcttttactctgtttataatatcaagtattttcttaaagatatagatattaaaccttgtgctcatgcaacttagagtaacatatacagacaaatgattgcatgaggccatgtttatatgtgtgactaataaggcttgtcatgattaacataatccaggtatgtcatttctgaagagaatagtcatcaaatttatatctcgaagattttaattaaggaattgcttattgttgagcttagcaaattaataacactatttctgtcactaattattttgaggccttttagtactaaaattttaacctgtgttctaagtagaaactgatttaacccaagtaatgcagctttgattgatttcagcattcgttgctttgctatttttacaaaacagcattgattgaagcaagtcttggttttactaaggtagggtagcatttgctattggtaaagagaataaatacacttaatttcacaatacattgttatatgtaccccagttgttgttagtggggactatgatactgtaataatatttttaaaaatttacatcaagagaggcagtcattcacgatggttttgtgccagctctttttagggttttggatcacattagagatatttagaacatattaccctgtgacttacgtaggaaacctaatatgctgagtatctggcacttgaattcctgcttttattgctggaggtccacatctgtggttgacctctgttattgtttaaaaaaaataaataaaaattaaaaaaatctgtgcaataattttaaaatgtgctcccaggaatagacacaaatgttttgagtatcttttaagctgcattttcctttagtgatgcatttgtcaattgcactgaatttaaatctgaaagtcagaggtgattattgatagtacttttgtattttgatatggacagtttattcatttgcatacagttattgac

SEQ ID NO: 293443 - DNA, 768 bp, Homo sapiens
tcaccacaccgacacctcggggacaccggagtttctctcctcctcatttccattttctcctgtagggaatctgtgcagacgaagcattttaggaacaccattaagcaaatttttaagtggggccaaaatatggttgtctactgagacattagcaaatgaagactaaaatagggtgttttctgaacattttgagggaagctgtcaacttttttcctctgaattaacattgctaacctaggcgtacagcatttgctattggtaaagagaataaatacacttaatttcacaatacattgttatatgtaccccagttgttgttagtggggactatgatactgtaataatatttttaaaaatttacatcaagagaggcagtcattcacgatggttttgtgccagctctttttagggttttggatcacattagagatatttagaacatattaccctgtgacttacgtaggaaacctaatatgctgagtatctggcacttgaattcctgcttttattgctggaggtccacatctgtggttgacctctgttattgtttaaaaaaaataaataaaaattaaaaaaatctgtgcaataattttaaaatgtgctcccaggaatagacacaaatgttttgagtatcttttaagctgcattttcctttagtgatgcatttgtcaattgcactgaatttaaatctgaaagtcagaggtgattattgatagtacttttgtattttgatatggacagtttattcatttgcatacagttattgac

SEQ ID NO: 293444 - DNA, 3631 bp, Homo sapiens
tggggttataattgcctctcaccccccggaggggttattttgggggtggttggaggcggtggcggcggcggcgaggaggggaatttccttgtgcctccattcccgggaggggggagcggcgttggaggccaccgtttccagcatcaacaacagcaacttgtgattggcggtgaccggatattcagttgcacatccccacatcaatgcactgccaatgggttatatcctgtgttgtgacctcatggtttaagtgggaataaagatgagtataagcagtgatgaggtcaacttcttggtatatagatacttgcaagagtcaggattttctcattcagcatttacctttggtatagaaagccatatcagtcagtccaatataaatggtgccctcgtcccacccgctgcattgatttctatcatccagaaaggtctacagtatgtagaagcagaagttagtattaatgaggatggtaccttgtttgatggtcgaccaatagagtctctgtccctgatagatgccgtaatgcctgatgtagtacaaacaagacaacaagcttatagagataagcttgcacagcaacaggcagcagctgctgcagctgccgcagctgcagccagccaacaaggatctgcaaaaaatggagaaaacacagcaaatggggaggagaatggagcacatactatagcaaataatcatactgatatgatggaagtggatggggatgttgaaatccctcctaataaagctgttgtgttgcggggccatgaatctgaagtttttatctgtgcctggaaccctgttagtgatctcctagcatcagggtctggagactcaacagcaagaatatggaatcttagtgagaacagcaccagtggctctacacagttagtacttagacattgtatacgagaaggagggcaagatgttccaagcaacaaggatgtcacatctctagattggaatagtgaaggtacacttctagcaactggttcctatgatgggtttgccagaatatggactaaagatggtaaccttgctagcaccttagggcagcataaaggccctatatttgcattaaaatggaataagaaaggaaatttcatcctaagtgctggagtagacaagactacaattatttgggacgcacatactggtgaagccaagcaacagtttccttttcattcagcaccagcattggatgttgattggcagagcaacaacacctttgcttcttgtagtacagatatgtgcattcatgtctgtaaattaggacaagacagacctattaaaacattccaaggacatacgaatgaagtaaatgctatcaaatgggacccaactggcaatctcttggcctcctgttctgacgacatgactttaaagatatggagtatgaaacaagacaattgtgtccatgatttgcaagcacataataaagaaatttatactatcaaatggagtccaacaggaccagggactaataatccaaatgccaaccttatgttagcaagtgcatcctttgattctactgttaggttatgggatgtagaccgagggatatgcatccataccttgacaaaacaccaagagcctgtgtacagtgtagctttcagtcctgatggcaggtatctggcaagtggttcttttgacaaatgtgtacacatctggaacacgcagacaggtgctctagttcacagctataggggaacaggtggaatatttgaagtttgctggaatgcagcaggagacaaagttggagccagtgcatcagatggttcagtttgtgtattagaccttcggaaatagcgctactagttggaagccatggaccgactatgaatgtgtacatagccaaaatgactgtccctgacccatgtactgctatagtcccacttgaaccatggccagtccactacagccaaatctaaaagaaatatatacatacagtgtatataaacaaaattgcaccctgaagatgacagagttttgtcacagcttgtgaattctgttcaccaagtgctggaatctaatctgctgtgcccctaaaatagcatttagaagttttggatatgaaaaacagaagagagaaaaatatacattataaaagcagaacatacatgtaccagtttttggatactaaatgacagccttgtttctcccctttgaatcagcagacaccatggattatattctttttttcccttcagtagtgagcagtttgtatgtacagagaaaatggacttacaaaaacttgcagcagtagtttgttcttgctttaaaatttcgtttttggtttagattatggatgcatgaagtaagggagtgaatcagtttcttgtttatatttttttcaccttttaaacaaaaaattctttaaaatattttaatgcattcttttgaagaggtagatgtttggtacattttatggctcccagagcatatattcagttggtgcatgttgtggaagggggaattggaaattaaatgaaaacctatgactttggtcatgtcaatctgtaagacacatcagtaaaagggtattatgctctgttggttttgtttttttgttttgcttttttttttttttttcttttttgttttttggtgatgtggcttaaatgcaatagtttcttttttgggacatatttctgccaattaaagactagaagggcacaactttttttttaattaccatagagaagatacattaaaaaaaatcttctgatgttttgtagccataactaaattatggtaaaaatgtgcactattgtgaaaaggagcaacgtagttttgggttttttgttgtttgtttgttttgctttgttttttaagagattaaaatgtttctggataaggattagcttctcgaagtgtccatcattctgtgtagaagcttaaatatgtaatgtaaccaaactccagtattaaaaatctctcatgttgttttctttatacaaagcaagataacggcatataacactgccattacatggcaaaatgtttgctaccttagtttaaaaaacaatctcaaacaaaagacttgcttcaaggtgtttttaaatagcagtgattcagaattttttttaatgaaagtataattgcactaaccttcttcctgctgctctgattctgcatttgtggtacttgtgactacgttttttcaaatatagatagatttaagctgctaatttttttttttttagtaatcactactatatcatgtcttttactctgtttataatatcaagtattttcttaaagatatagatattaaaccttgtgctcatgcaacttagagtaacatattaccctgtgacttacgtaggaaacctaatatgctgagtatctggcacttgaattcctgcttttattgctggaggtccacatctgtggttgacctctgttattgtttaaaaaaaataaataaaaattaaaaaaatctgtgcaataattttaaaatgtgctcccaggaatagacacaaatgttttgagtatcttttaagctgcattttcctttagtgatgcatttgtcaattgcactgaatttaaatctgaaagtcagaggtgattattgatagtacttttgtattttgatatggacagtttattcatttgcatacagttattgac

SEQ ID NO: 293445 - DNA, 4066 bp, Homo sapiens
tagctgtctccagaggatccccgctcgtccagcatcaacaacagcaacttgtgattggcggtgaccggatattcagttgcacatccccacatcaatgcactgccaatgggttatatcctgtgttgtgacctcatggtttaagtgggaataaagatgagtataagcagtgatgaggtcaacttcttggtatatagatacttgcaagagtcaggattttctcattcagcatttacctttggtatagaaagccatatcagtcagtccaatataaatggtgccctcgtcccacccgctgcattgatttctatcatccagaaaggtctacagtatgtagaagcagaagttagtattaatgaggatggtaccttgtttgatggtcgaccaatagagtctctgtccctgatagatgccgtaatgcctgatgtagtacaaacaagacaacaagcttatagagataagcttgcacagcaacaggcagcagctgctgcagctgccgcagctgcagccagccaacaaggatctgcaaaaaatggagaaaacacagcaaatggggaggagaatggagcacatactatagcaaataatcatactgatatgatggaagtggatggggatgttgaaatccctcctaataaagctgttgtgttgcggggccatgaatctgaagtttttatctgtgcctggaaccctgttagtgatctcctagcatcagggtctggagactcaacagcaagaatatggaatcttagtgagaacagcaccagtggctctacacagttagtacttagacattgtatacgagaaggagggcaagatgttccaagcaacaaggatgtcacatctctagattggaatagtgaaggtacacttctagcaactggttcctatgatgggtttgccagaatatggactaaagatggtaaccttgctagcaccttagggcagcataaaggccctatatttgcattaaaatggaataagaaaggaaatttcatcctaagtgctggagtagacaagactacaattatttgggacgcacatactggtgaagccaagcaacagtttccttttcattcagcaccagcattggatgttgattggcagagcaacaacacctttgcttcttgtagtacagatatgtgcattcatgtctgtaaattaggacaagacagacctattaaaacattccaaggacatacgaatgaagtaaatgctatcaaatgggacccaactggcaatctcttggcctcctgttctgacgacatgactttaaagatatggagtatgaaacaagacaattgtgtccatgatttgcaagcacataataaagaaatttatactatcaaatggagtccaacaggaccagggactaataatccaaatgccaaccttatgttagcaagtgcatcctttgattctactgttaggttatgggatgtagaccgagggatatgcatccataccttgacaaaacaccaagagcctgtgtacagtgtagctttcagtcctgatggcaggtatctggcaagtggttcttttgacaaatgtgtacacatctggaacacgcagacaggtgctctagttcacagctataggggaacaggtggaatatttgaagtttgctggaatgcagcaggagacaaagttggagccagtgcatcagatggttcagtttgtgtattagaccttcggaaatagcgctactagttggaagccatggaccgactatgaatgtgtacatagccaaaatgactgtccctgacccatgtactgctatagtcccacttgaaccatggccagtccactacagccaaatctaaaagaaatatatacatacagtgtatataaacaaaattgcaccctgaagatgacagagttttgtcacagcttgtgaattctgttcaccaagtgctggaatctaatctgctgtgcccctaaaatagcatttagaagttttggatatgaaaaacagaagagagaaaaatatacattataaaagcagaacatacatgtaccagtttttggatactaaatgacagccttgtttctcccctttgaatcagcagacaccatggattatattctttttttcccttcagtagtgagcagtttgtatgtacagagaaaatggacttacaaaaacttgcagcagtagtttgttcttgctttaaaatttcgtttttggtttagattatggatgcatgaagtaagggagtgaatcagtttcttgtttatatttttttcaccttttaaacaaaaaattctttaaaatattttaatgcattcttttgaagaggtagatgtttggtacattttatggctcccagagcatatattcagttggtgcatgttgtggaagggggaattggaaattaaatgaaaacctatgactttggtcatgtcaatctgtaagacacatcagtaaaagggtattatgctctgttggttttgtttttttgttttgcttttttttttttttttcttttttgttttttggtgatgtggcttaaatgcaatagtttcttttttgggacatatttctgccaattaaagactagaagggcacaactttttttttaattaccatagagaagatacattaaaaaaaatcttctgatgttttgtagccataactaaattatggtaaaaatgtgcactattgtgaaaaggagcaacgtagttttgggttttttgttgtttgtttgttttgctttgttttttaagagattaaaatgtttctggataaggattagcttctcgaagtgtccatcattctgtgtagaagcttaaatatgtaatgtaaccaaactccagtattaaaaatctctcatgttgttttctttatacaaagcaagataacggcatataacactgccattacatggcaaaatgtttgctaccttagtttaaaaaacaatctcaaacaaaagacttgcttcaaggtgtttttaaatagcagtgattcagaattttttttaatgaaagtataattgcactaaccttcttcctgctgctctgattctgcatttgtggtacttgtgactacgttttttcaaatatagatagatttaagctgctaatttttttttttttagtaatcactactatatcatgtcttttactctgtttataatatcaagtattttcttaaagatatagatattaaaccttgtgctcatgcaacttagagtaacatatacagacaaatgattgcatgaggccatgtttatatgtgtgactaataaggcttgtcatgattaacataatccaggtatgtcatttctgaagagaatagtcatcaaatttatatctcgaagattttaattaaggaattgcttattgttgagcttagcaaattaataacactatttctgtcactaattattttgaggccttttagtactaaaattttaacctgtgttctaagtagaaactgatttaacccaagtaatgcagctttgattgatttcagcattcgttgctttgctatttttacaaaacagcattgattgaagcaagtcttggttttactaaggtagggtagcatttgctattggtaaagagaataaatacacttaatttcacaatacattgttatatgtaccccagttgttgttagtggggactatgatactgtaataatatttttaaaaatttacatcaagagaggcagtcattcacgatggttttgtgccagctctttttagggttttggatcacattagagatatttagaacatattaccctgtgacttacgtaggaaacctaatatgctgagtatctggcacttgaattcctgcttttattgctggaggtccacatctgtggttgacctctgttattgtttaaaaaaaataaataaaaattaaaaaaatctgtgcaataattttaaaatgtgctcccaggaatagacacaaatgttttgagtatcttttaagctgcattttcctttagtgatgcatttgtcaattgcactgaatttaaatctgaaagtcagaggtgattattgatagtacttttgtattttgatatggacagtttattcatttgcatacagttattgac

SEQ ID NO: 293446 - DNA, 4099 bp, Homo sapiens
tggggttataattgcctctcaccccccggaggggttattttgggggtggttggaggcggtggcggcggcggcgaggaggggaatttccttgtgcctccattcccgggaggggggagcggcgttggaggccaccgtttccagggttatatcctgtgttgtgacctcatggtttaagtgggaataaagatgagtataagcagtgatgaggtcaacttcttggtatatagatacttgcaagagtcaggattttctcattcagcatttacctttggtatagaaagccatatcagtcagtccaatataaatggtgccctcgtcccacccgctgcattgatttctatcatccagaaaggtctacagtatgtagaagcagaagttagtattaatgaggatggtaccttgtttgatggtcgaccaatagagtctctgtccctgatagatgccgtaatgcctgatgtagtacaaacaagacaacaagcttatagagataagcttgcacagcaacaggcagcagctgctgcagctgccgcagctgcagccagccaacaaggatctgcaaaaaatggagaaaacacagcaaatggggaggagaatggagcacatactatagcaaataatcatactgatatgatggaagtggatggggatgttgaaatccctcctaataaagctgttgtgttgcggggccatgaatctgaagtttttatctgtgcctggaaccctgttagtgatctcctagcatcagggtctggagactcaacagcaagaatatggaatcttagtgagaacagcaccagtggctctacacagttagtacttagacattgtatacgagaaggagggcaagatgttccaagcaacaaggatgtcacatctctagattggaatagtgaaggtacacttctagcaactggttcctatgatgggtttgccagaatatggactaaagatggtaaccttgctagcaccttagggcagcataaaggccctatatttgcattaaaatggaataagaaaggaaatttcatcctaagtgctggagtagacaagactacaattatttgggacgcacatactggtgaagccaagcaacagtttccttttcattcagcaccagcattggatgttgattggcagagcaacaacacctttgcttcttgtagtacagatatgtgcattcatgtctgtaaattaggacaagacagacctattaaaacattccaaggacatacgaatgaagtaaatgctatcaaatgggacccaactggcaatctcttggcctcctgttctgacgacatgactttaaagatatggagtatgaaacaagacaattgtgtccatgatttgcaagcacataataaagaaatttatactatcaaatggagtccaacaggaccagggactaataatccaaatgccaaccttatgttagcaagtgcatcctttgattctactgttaggttatgggatgtagaccgagggatatgcatccataccttgacaaaacaccaagagcctgtgtacagtgtagctttcagtcctgatggcaggtatctggcaagtggttcttttgacaaatgtgtacacatctggaacacgcagacaggtgctctagttcacagctataggggaacaggtggaatatttgaagtttgctggaatgcagcaggagacaaagttggagccagtgcatcagatggttcagtttgtgtattagaccttcggaaatagcgctactagttggaagccatggaccgactatgaatgtgtacatagccaaaatgactgtccctgacccatgtactgctatagtcccacttgaaccatggccagtccactacagccaaatctaaaagaaatatatacatacagtgtatataaacaaaattgcaccctgaagatgacagagttttgtcacagcttgtgaattctgttcaccaagtgctggaatctaatctgctgtgcccctaaaatagcatttagaagttttggatatgaaaaacagaagagagaaaaatatacattataaaagcagaacatacatgtaccagtttttggatactaaatgacagccttgtttctcccctttgaatcagcagacaccatggattatattctttttttcccttcagtagtgagcagtttgtatgtacagagaaaatggacttacaaaaacttgcagcagtagtttgttcttgctttaaaatttcgtttttggtttagattatggatgcatgaagtaagggagtgaatcagtttcttgtttatatttttttcaccttttaaacaaaaaattctttaaaatattttaatgcattcttttgaagaggtagatgtttggtacattttatggctcccagagcatatattcagttggtgcatgttgtggaagggggaattggaaattaaatgaaaacctatgactttggtcatgtcaatctgtaagacacatcagtaaaagggtattatgctctgttggttttgtttttttgttttgcttttttttttttttttcttttttgttttttggtgatgtggcttaaatgcaatagtttcttttttgggacatatttctgccaattaaagactagaagggcacaactttttttttaattaccatagagaagatacattaaaaaaaatcttctgatgttttgtagccataactaaattatggtaaaaatgtgcactattgtgaaaaggagcaacgtagttttgggttttttgttgtttgtttgttttgctttgttttttaagagattaaaatgtttctggataaggattagcttctcgaagtgtccatcattctgtgtagaagcttaaatatgtaatgtaaccaaactccagtattaaaaatctctcatgttgttttctttatacaaagcaagataacggcatataacactgccattacatggcaaaatgtttgctaccttagtttaaaaaacaatctcaaacaaaagacttgcttcaaggtgtttttaaatagcagtgattcagaattttttttaatgaaagtataattgcactaaccttcttcctgctgctctgattctgcatttgtggtacttgtgactacgttttttcaaatatagatagatttaagctgctaatttttttttttttagtaatcactactatatcatgtcttttactctgtttataatatcaagtattttcttaaagatatagatattaaaccttgtgctcatgcaacttagagtaacatatacagacaaatgattgcatgaggccatgtttatatgtgtgactaataaggcttgtcatgattaacataatccaggtatgtcatttctgaagagaatagtcatcaaatttatatctcgaagattttaattaaggaattgcttattgttgagcttagcaaattaataacactatttctgtcactaattattttgaggccttttagtactaaaattttaacctgtgttctaagtagaaactgatttaacccaagtaatgcagctttgattgatttcagcattcgttgctttgctatttttacaaaacagcattgattgaagcaagtcttggttttactaaggtagggtagcatttgctattggtaaagagaataaatacacttaatttcacaatacattgttatatgtaccccagttgttgttagtggggactatgatactgtaataatatttttaaaaatttacatcaagagaggcagtcattcacgatggttttgtgccagctctttttagggttttggatcacattagagatatttagaacatattaccctgtgacttacgtaggaaacctaatatgctgagtatctggcacttgaattcctgcttttattgctggaggtccacatctgtggttgacctctgttattgtttaaaaaaaataaataaaaattaaaaaaatctgtgcaataattttaaaatgtgctcccaggaatagacacaaatgttttgagtatcttttaagctgcattttcctttagtgatgcatttgtcaattgcactgaatttaaatctgaaagtcagaggtgattattgatagtacttttgtattttgatatggacagtttattcatttgcatacagttattgac

SEQ ID NO: 293447 - DNA, 2816 bp, Homo sapiens
ttaggctagtacgaggccggtgttaatatggagtatgaaacaagacaattgtgtccatgatttgcaagcacataataaagaaatttatactatcaaatggagtccaacaggaccagggactaataatccaaatgccaaccttatgttagcaagtgcatcctttgattctactgttaggttatgggatgtagaccgagggatatgcatccataccttgacaaaacaccaagagcctgtgtacagtgtagctttcagtcctgatggcaggtatctggcaagtggttcttttgacaaatgtgtacacatctggaacacgcagacaggtgctctagttcacagctataggggaacaggtggaatatttgaagtttgctggaatgcagcaggagacaaagttggagccagtgcatcagatggttcagtttgtgtattagaccttcggaaatagcgctactagttggaagccatggaccgactatgaatgtgtacatagccaaaatgactgtccctgacccatgtactgctatagtcccacttgaaccatggccagtccactacagccaaatctaaaagaaatatatacatacagtgtatataaacaaaattgcaccctgaagatgacagagttttgtcacagcttgtgaattctgttcaccaagtgctggaatctaatctgctgtgcccctaaaatagcatttagaagttttggatatgaaaaacagaagagagaaaaatatacattataaaagcagaacatacatgtaccagtttttggatactaaatgacagccttgtttctcccctttgaatcagcagacaccatggattatattctttttttcccttcagtagtgagcagtttgtatgtacagagaaaatggacttacaaaaacttgcagcagtagtttgttcttgctttaaaatttcgtttttggtttagattatggatgcatgaagtaagggagtgaatcagtttcttgtttatatttttttcaccttttaaacaaaaaattctttaaaatattttaatgcattcttttgaagaggtagatgtttggtacattttatggctcccagagcatatattcagttggtgcatgttgtggaagggggaattggaaattaaatgaaaacctatgactttggtcatgtcaatctgtaagacacatcagtaaaagggtattatgctctgttggttttgtttttttgttttgcttttttttttttttttcttttttgttttttggtgatgtggcttaaatgcaatagtttcttttttgggacatatttctgccaattaaagactagaagggcacaactttttttttaattaccatagagaagatacattaaaaaaaatcttctgatgttttgtagccataactaaattatggtaaaaatgtgcactattgtgaaaaggagcaacgtagttttgggttttttgttgtttgtttgttttgctttgttttttaagagattaaaatgtttctggataaggattagcttctcgaagtgtccatcattctgtgtagaagcttaaatatgtaatgtaaccaaactccagtattaaaaatctctcatgttgttttctttatacaaagcaagataacggcatataacactgccattacatggcaaaatgtttgctaccttagtttaaaaaacaatctcaaacaaaagacttgcttcaaggtgtttttaaatagcagtgattcagaattttttttaatgaaagtataattgcactaaccttcttcctgctgctctgattctgcatttgtggtacttgtgactacgttttttcaaatatagatagatttaagctgctaatttttttttttttagtaatcactactatatcatgtcttttactctgtttataatatcaagtattttcttaaagatatagatattaaaccttgtgctcatgcaacttagagtaacatatacagacaaatgattgcatgaggccatgtttatatgtgtgactaataaggcttgtcatgattaacataatccaggtatgtcatttctgaagagaatagtcatcaaatttatatctcgaagattttaattaaggaattgcttattgttgagcttagcaaattaataacactatttctgtcactaattattttgaggccttttagtactaaaattttaacctgtgttctaagtagaaactgatttaacccaagtaatgcagctttgattgatttcagcattcgttgctttgctatttttacaaaacagcattgattgaagcaagtcttggttttactaaggtagggtagcatttgctattggtaaagagaataaatacacttaatttcacaatacattgttatatgtaccccagttgttgttagtggggactatgatactgtaataatatttttaaaaatttacatcaagagaggcagtcattcacgatggttttgtgccagctctttttagggttttggatcacattagagatatttagaacatattaccctgtgacttacgtaggaaacctaatatgctgagtatctggcacttgaattcctgcttttattgctggaggtccacatctgtggttgacctctgttattgtttaaaaaaaataaataaaaattaaaaaaatctgtgcaataattttaaaatgtgctcccaggaatagacacaaatgttttgagtatcttttaagctgcattttcctttagtgatgcatttgtcaattgcactgaatttaaatctgaaagtcagaggtgattattgatagtacttttgtattttgatatggacagtttattcatttgcatacagttattgac

SEQ ID NO: 293448 - DNA, 2871 bp, Homo sapiens
tggggttataattgcctctcaccccccggaggggttattttgggggtggttggaggcggtggcggcggcggcgaggaggggaatttccttgtgcctccattcccgggaggggggagcggcgttggaggccaccgtttccagcatcaacaacagcaacttgtgattggcggtgaccggatattcagttgcacatccccacatcaatgcactgccaatgggttatatcctgtgttgtgacctcatggtttaagtgggaataaagatgagtataagcagtgatgaggtcaacttcttggtatatagatacttgcaagagtcaggattttctcattcagcatttacctttggtatagaaagccatatcagtcagtccaatataaatggtgccctcgtcccacccgctgcattgatttctatcatccagaaaggtctacagtatgtagaagcagaagttagtattaatgaggatggtaccttgtttgatggtcgaccaatagagtctctgtccctgatagatgccgtaatgcctgatgtagtacaaacaagacaacaagcttatagagataagcttgcacagcaacaggcagcagctgctgcagctgccgcagctgcagccagccaacaaggatctgcaaaaaatggagaaaacacagcaaatggggaggagaatggagcacatactatagcaaataatcatactgatatgatggaagtggatggggatgttgaaatccctcctaataaagctgttgtgttgcggggccatgaatctgaagtttttatctgtgcctggaaccctgttagtgatctcctagcatcagggtctggagactcaacagcaagaatatggaatcttagtgagaacagcaccagtggctctacacagttagtacttagacattgtatacgagaaggagggcaagatgttccaagcaacaaggatgtcacatctctagattggaatagtgaaggtacacttctagcaactggttcctatgatgggtttgccagaatatggactaaagatggtaaccttgctagcaccttagggcagcataaaggccctatatttgcattaaaatggaataagaaaggaaatttcatcctaagtgctggagtagacaagactacaattatttgggacgcacatactggtgaagccaagcaacagtttccttttcattcagcaccagcattggatgttgattggcagagcaacaacacctttgcttcttgtagtacagatatgtgcattcatgtctgtaaattaggacaagacagacctattaaaacattccaaggacatacgaatgaagtaaatgctatcaaatgggacccaactggcaatctcttggcctcctgttctgacgacatgactttaaagatatggagtatgaaacaagacaattgtgtccatgatttgcaagcacataataaagaaatttatactatcaaatggagtccaacaggaccagggactaataatccaaatgccaaccttatgttagcaagtgcatcctttgattctactgttaggttatgggatgtagaccgagggatatgcatccataccttgacaaaacaccaagagcctgtgtacagtgtagctttcagtcctgatggcaggtatctggcaagtggttcttttgacaaatgtgtacacatctggaacacgcagacaggtgctctagttcacagctataggggaacaggtggaatatttgaagtttgctggaatgcagcaggagacaaagttggagccagtgcatcagatggttcagtttgtgtattagaccttcggaaatagcgctactagttggaagccatggaccgactatgaatgtgtacatagccaaaatgactgtccctgacccatgtactgctatagtcccacttgaaccatggccagtccactacagccaaatctaaaagaaatatatacatacagtgtatataaacaaaattgcaccctgaagatgacagagttttgtcacagcttgtgaattctgttcaccaagtgctggaatctaatctgctgtgcccctaaaatagcatttagaagttttggatatgaaaaacagaagagagaaaaatatacattataaaagcagaacatacatgtaccagtttttggatactaaatgacagccttgtttctcccctttgaatcagcagacaccatggattatattctttttttcccttcagtagtgagcagtttgtatgtacagagaaaatggacttacaaaaacttgcagcagtagtttgttcttgctttaaaatttcgtttttggtttagattatggatgcatgaagtaagggagtgaatcagtttcttgtttatatttttttcaccttttaaacaaaaaattctttaaaatattttaatgcattcttttgaagaggtagatgtttggtacattttatggctcccagagcatatattcagttggtgcatgttgtggaagggggaattggaaattaaatgaaaacctatgactttggtcatgtcaatctgtaagacacatcagtaaaagggtattatgctctgttggttttgtttttttgttttgcttttttttttttttttcttttttgttttttggtgatgtggcttaaatgcaatagtttcttttttgggacatatttctgccaattaaagactagaagggcacaacttttttttataagtctcgggtgaagtgcatctctttaggttattaaaaatgtgcaatacgctttaaaagggacataagaacgggaaatttcatcctaaggtgcgtggagttagcacaagactacaattattggggacgcacattacgtgtgaagccaagcaacagttcccttttcattcagcaccagcattgg

SEQ ID NO: 293449 - DNA, 2065 bp, Homo sapiens
  misc_feature (43)..(43): n is a, c, g, or t
aattcgccgccgcgtcgactacggctgcgagaagacgacatangggctcccctttgaatcagcagacaccatggattatattctttttttcccttcagtagtgagcagtttgtatgtacagagaaaatggacttacaaaaacttgcagcagtagtttgttcttgctttaaaatttcgtttttggtttagattatggatgcatgaagtaagggagtgaatcagtttcttgtttatatttttttcaccttttaaacaaaaaattctttaaaatattttaatgcattcttttgaagaggtagatgtttggtacattttatggctcccagagcatatattcagttggtgcatgttgtggaagggggaattggaaattaaatgaaaacctatgactttggtcatgtcaatctgtaagacacatcagtaaaagggtattatgctctgttggttttgtttttttgttttgcttttttttttttttttcttttttgttttttggtgatgtggcttaaatgcaatagtttcttttttgggacatatttctgccaattaaagactagaagggcacaactttttttttaattaccatagagaagatacattaaaaaaaatcttctgatgttttgtagccataactaaattatggtaaaaatgtgcactattgtgaaaaggagcaacgtagttttgggttttttgttgtttgtttgttttgctttgttttttaagagattaaaatgtttctggataaggattagcttctcgaagtgtccatcattctgtgtagaagcttaaatatgtaatgtaaccaaactccagtattaaaaatctctcatgttgttttctttatacaaagcaagataacggcatataacactgccattacatggcaaaatgtttgctaccttagtttaaaaaacaatctcaaacaaaagacttgcttcaaggtgtttttaaatagcagtgattcagaattttttttaatgaaagtataattgcactaaccttcttcctgctgctctgattctgcatttgtggtacttgtgactacgttttttcaaatatagatagatttaagctgctaatttttttttttttagtaatcactactatatcatgtcttttactctgtttataatatcaagtattttcttaaagatatagatattaaaccttgtgctcatgcaacttagagtaacatatacagacaaatgattgcatgaggccatgtttatatgtgtgactaataaggcttgtcatgattaacataatccaggtatgtcatttctgaagagaatagtcatcaaatttatatctcgaagattttaattaaggaattgcttattgttgagcttagcaaattaataacactatttctgtcactaattattttgaggccttttagtactaaaattttaacctgtgttctaagtagaaactgatttaacccaagtaatgcagctttgattgatttcagcattcgttgctttgctatttttacaaaacagcattgattgaagcaagtcttggttttactaaggtagggtagcatttgctattggtaaagagaataaatacacttaatttcacaatacattgttatatgtaccccagttgttgttagtggggactatgatactgtaataatatttttaaaaatttacatcaagagaggcagtcattcacgatggttttgtgccagctctttttagggttttggatcacattagagatatttagaacatattaccctgtgacttacgtaggaaacctaatatgctgagtatctggcacttgaattcctgcttttattgctggaggtccacatctgtggttgacctctgttattgtttaaaaaaaataaataaaaattaaaaaaatctgtgcaataattttaaaatgtgctcccaggaatagacacaaatgttttgagtatcttttaagctgcattttcctttagtgatgcatttgtcaattgcactgaatttaaatctgaaagtcagaggtgattattgatagtacttttgtattttgatatggacagtttattcatttgcatacagttattgac

SEQ ID NO: 293450 - DNA, 2420 bp, Homo sapiens
tggggttataattgcctctcaccccccggaggggttattttgggggtggttggaggcggtggcggcggcggcgaggaggggaatttccttgtgcctccattcccgggaggggggagcggcgttggaggccaccgtttccagcatcaacaacagcaacttgtgattggcggtgaccggatattcagttgcacatccccacatcaatgcactgccaatgggttatatcctgtgttgtgacctcatggtttaagtgggaataaagatgagtataagcagtgatgaggtcaacttcttggtatatagatacttgcaagagtcaggattttctcattcagcatttacctttggtatagaaagccatatcagtcagtccaatataaatggtgccctcgtcccacccgctgcattgatttctatcatccagaaaggtctacagtatgtagaagcagaagttagtattaatgaggatggtaccttgtttgatggtcgaccaatagagtctctgtccctgatagatgccgtaatgcctgatgtagtacaaacaagacaacaagcttatagagataagcttgcacagcaacaggcagcagctgctgcagctgccgcagctgcagccagccaacaaggatctgcaaaaaatggagaaaacacagcaaatggggaggagaatggagcacatactatagcaaataatcatactgatatgatggaagtggatggggatgttgaaatccctcctaataaagctgttgtgttgcggggccatgaatctgaagtttttatctgtgcctggaaccctgttagtgatctcctagcatcagggtctggagactcaacagcaagaatatggaatcttagtgagaacagcaccagtggctctacacagttagtacttagacattgtatacgagaaggagggcaagatgttccaagcaacaaggatgtcacatctctagattggaatagtgaaggtacacttctagcaactggttcctatgatgggtttgccagaatatggactaaagatggtaaccttgctagcaccttagggcagcataaaggccctatatttgcattaaaatggaataagaaaggaaatttcatcctaagtgctggagtagacaagactacaattatttgggacgcacatactggtgaagccaagcaacagtttccttttcattcagcaccagcattggatgttgattggcagagcaacaacacctttgcttcttgtagtacagatatgtgcattcatgtctgtaaattaggacaagacagacctattaaaacattccaaggacatacgaatgaagtaaatgctatcaaatgggacccaactggcaatctcttggcctcctgttctgacgacatgactttaaagatatggagtatgaaacaagacaattgtgtccatgatttgcaagcacataataaagaaatttatactatcaaatggagtccaacaggaccagggactaataatccaaatgccaaccttatgttagcaagtgcatcctttgattctactgttaggttatgggatgtagaccgagggatatgcatccataccttgacaaaacaccaagagcctgtgtacagtgtagctttcagtcctgatggcaggtatctggcaagtggttcttttgacaaatgtgtacacatctggaacacgcagacaggtgctctagttcacagctataggggaacaggtggaatatttgaagtttgctggaatgcagcaggagacaaagttggagccagtgcatcagatggttcagtttgtgtattagaccttcggaaatagcgctactagttggaagccatggaccgactatgaatgtgtacatagccaaaatgactgtccctgacccatgtactgctatagtcccacttgaaccatggccagtccactacagccaaatctaaaagaaatatatacatacagtgtatataaacaaaattgcaccctgaagatgacagagttttgtcacagcttgtgaattctgttcaccaagtgctggaatctaatctgctgtgcccctaaaatagcatttagaaggttttggatcacattagagatatttagaacatattaccctgtgacttacgtaggaaacctaatatgctgagtatctggcacttgaattcctgcttttattgctggaggtccacatctgtggttgacctctgttattgtttaaaaaaaataaataaaaattaaaaaaatctgtgcaataattttaaaatgtgctcccaggaatagacacaaatgttttgagtatcttttaagctgcattttcctttagtgatgcatttgtcaattgcactgaatttaaatctgaaagtcagaggtgattattgatagtacttttgtattttgatatggacagtttattcatttgcatacagttattgac

SEQ ID NO: 293451 - DNA, 712 bp, Homo sapiens
tattcacttgtttgattacaggtgccacgccaaaaattatacctctcatccacaaatcttagagttgcatcatgtacaaatacttggtttctgaagaattctggactgcaagttaaagaaaatgaggaagttgaggctcagagagcaaataaacttcaaaagatcatggaggtgctaagagaggttaccataccagataaaataagaagttcaatgatttctgcatctccaaggaaaagaagctacctctaatgcctgcttcatggacctcctaccagaaaacaacagtgctctccagttcaagatgcaagattttagagtaatgtcacattcagggatttttaattcatagataccctatctaaagttacaacagagtattactgacttggctgcatttgaaaaaaactattcagaaatactcacattgaaacttacatccctcatttttgataaaggcttttgtgacagattgttagttgttttccactatgttcttccttttgtccacaggaataaaattttagctggtcacttagccacccagtgagagaatacattcctggcctcccttgaagttgttgcttggtgtggaccaatggtatgtgagtggaaattaataatgggcacaacttccaggtcatcttcaacttaaaagacaactactctaggctgggcacagtggctcacgcctgtaatcccagcactttgg

SEQ ID NO: 293452 - DNA, 652 bp, Homo sapiens
tattcacttgtttgattacaggtgccacgccaaaaattatacctctcatccacaaatcttagagttgcatcatgtacaaatacttggtttctgaagaattctggactgcaagttaaagaaaaggttaccataccagataaaataagaagttcaatgatttctgcatctccaaggaaaagaagctacctctaatgcctgcttcatggacctcctaccagaaaacaacagtgctctccagttcaagatgcaagattttagagtaatgtcacattcagggatttttaattcatagataccctatctaaagttacaacagagtattactgacttggctgcatttgaaaaaaactattcagaaatactcacattgaaacttacatccctcatttttgataaaggcttttgtgacagattgttagttgttttccactatgttcttccttttgtccacaggaataaaattttagctggtcacttagccacccagtgagagaatacattcctggcctcccttgaagttgttgcttggtgtggaccaatggtatgtgagtggaaattaataatgggcacaacttccaggtcatcttcaacttaaaagacaactactctaggctgggcacagtggctcacgcctgtaatcccagcactttgg

SEQ ID NO: 293453 - DNA, 422 bp, Homo sapiens
  misc_feature (31)..(31): n is a, c, g, or t
  misc_feature (52)..(52): n is a, c, g, or t
ggtggcggccgcctcctagaacctaggggancccccccgggctgccaggaantcgggccacgagacctgttttatcttttttctttaaaatacaaaagtatcccaactaatcatttattatggtcagcttgttttacatgtcccctatcatgagaaatgctatcaacatctgtgatttctaagagtcttaccaaattgttactttaattcttgtgtcctgctgagtggtttttcttttaaaataccatttttatcaccctgtggcactgggtgtgttactgcgattacactgatgattctgagctgtgcttcttcaagtagctcagttcttgcgttttatattaggtaacagttttgtgatgcttttgtgcattctttgtcatctcttctgagttttcgaatctgtcataaataaacttttt

SEQ ID NO: 293454 - DNA, 3568 bp, Homo sapiens
ataaatcaatacatgtaaggtatacactggtttggcctggaaaggcaggacatcttgaagatgggggtttccaggtcagaggtagatcaaagagttcctgactggcaattggttgagagagttaaactttacctgaaaagatgaagtcagcttaagttaaagtaagggaggcttggcttaagtcatgtagatgaagcctccaggtagcaggcttcagagagaacagatgatgaatttttctttttaggccttaaaaggtgtcagactctccagaaaagacctaataagagaaggagattctctacagaatgcagtttcccccacaagagacagctttgtagggccatttcaaaatacgtcaaataaatatattggggggtaaatttcctttggggcctgctgtcatgtgatgctataccagagtcaggttgggatttggtattttattgccacaaagggtctgtttggttagtcttaagatctctgttttaatgttaatgctggtcagttgtatttaaattccaaagggaagagggtaatatgaggcaccctgtaatctgaccataatatgaggcaccctgtcttcccatcatggactagtttttcaggttcctttgagatcccctgggccaagacaggggtccattcagccggttgggggatttagaatttatttttggtttgctgtatatatatgtatacacacactccccgcataaatgtaaaaattttaaactaccaattcctaggcaaagatgattctaacattctgttccttttgacaagtgtccaattagagaatgctgagaatgtcccctgcatatcggctctgttggagagcccctgatttttagcagacctgtttcattcaacatgggttacccaggaggtggtcttcataaaaatgtttcttggaggccaggcgccgtggcccacgcctgtaatcccagcactttgggaggccaaggtgggcagaccaccttaggccaggagttcgagaccagcctggccaacatagtgaaactccgtcgctactaaaaatacaaaaaattagctgggcgtggtggcgggcatctgtaatcccagctactctggaggcagaagcagggagaatttcttgagcccaggaggcagaggttgcagcgagccgagatcatgccactgcactccagactgggcaacagagcaagattccgtctcaaaaaaaaaaaattgtttcttggtctccatctttcaagaaaatacatctgtgctgtattttccccttccctcaggccatgatctctgctgttttccttactaactggcatgtcagtacaagagtgattgtgaagctgctccggaagggctttatgctaacctctgttgcttgatgacatgtcctcaggactctgatattaaaactcaatccttagataacaggtagctttatcatggaagtaggtagcaatttggaattagaccattcttagttatttttttcttaatgaattgatacatgcactttaaaaaatatttttgttattttgggaagaaaaactcagacttttaaaaaagtgtatattgtcccattataatatgtatatggaagagtgaaatctgaacgctgtcttatattaagcagtagaattaggtattatcataaaaagtcttaatctgtagggaatatgagtttatgtttatgagtcctgctcagtccctctttgagagaattagttgaaacccagactctaaagtctgcttttatatttgtttgttaagaccacttatctgcagaaggttgccttttaaccccagtggttctaaggtgtggaattgagtgaccctaatatttacataagagacttgttttagtggagcataagggaggggcataagttacaccgttttgtgctgcttgagaactgtcttttaaaattgatcacaacgagggaaaacaaaataaaattagggggcaaagggtaggagtatggggggaggggagagcaaacctatcgaatatatcttagaattttgctcagaaatcactgctgcctctcaagtgttgcattgtccctgcctaaaccaagaaggctaaacaaagcccctcctgtttgaattcttaaggtaagaaatttctaagctaagaaaacactattgcctaaaaccaatgatagtggagctcatttacaaataggcatgcctcacacacacagtccaaaggcaagacactggctttgaaattaggctcatgatgtgattcctattatatgtacctgatttttttaggccccaggtatgtggaccagagttaatgtcatgactcttcaaagatatgatgaaaagttgccctagaaatctagagatgcatgtttatttaattccatagtttaaaaaaaaatttaagcaggtagttgtggcttatctgggggcaaaataatatatgtgaaattgcttccagaggacaaagtatattttctaaagtcctgaaataggatcatgaacccttctgaagttttggtttgaaatattatagtatatgatattaccaaagagcccttaattcagagtttaaggggctctcttcctgaactctcttcatcactcagggttgaatgtgtaatgttccttgctattgattgttattgttgattcttaggatcaggccaagaatcatctggaaaacattatcttaattccgtctctcatatcctaaacagtacattttactaagaaattccatatgaaaaactccactcatgtctcctgagattatcctgtaagtgaagtagctttcatttaaccaagctaaattatttccatttagccatgttaaagagaagccaagtctagagaaagcaatcctgtaacccatgaatctggtgtacccattttcccttaacgtaacgggaagtgttttgaaattcccagaagagagctgttttgtaatcaaagtgatggattataagaaagccagactttggaaaaggataattggaataaagggaggtgcttgaagattttccaaactactttatgtcatttagcttctattttctgaagggctttctttggtgccatgtactcagatcagtcagttgactgaaagatgatcatgttttcttcgtaaagatttaagcaattggcaactacaaagacattattttcttactgttctatatcatgtactgttgctgacattacaaaaagggtctggaagggaaaccgtgtcactgttttatcttttttctttaaaatacaaaagtatcccaactaatcatttattatggtcagcttgttttacatgtcccctatcatgagaaatgctatcaacatctgtgatttctaagagtcttaccaaattgttactttaattcttgtgtcctgctgagtggtttttcttttaaaataccatttttatcaccctgtggcactgggtgtgttactgcgattacactgatgattctgagctgtgcttcttcaagtagctcagttcttgcgttttatattaggtaacagttttgtgatgcttttgtgcattctttgtcatctcttctgagttttcgaatctgtcataaataaacttttt

SEQ ID NO: 293455 - DNA, 1798 bp, Homo sapiens
  misc_feature (1753)..(1753): n is a, c, g, or t
ataaatcaatacatgtaaggtatacactggtttggcctggaaaggcaggacatcttgaagatgggggtttccaggtcagaggtagatcaaagagttcctgactggcaattggttgagagagttaaactttacctgaaaagatgaagtcagcttaagttaaagtaagggaggcttggcttaagtcatgtagatgaagcctccaggtagcaggcttcagagagaacagatgatgaatttttctttttaggccttaaaaggtgtcagactctccagaaaagacctaataagagaaggagattctctacagaatgcagtttcccccacaagagacagctttgtagggccatttcaaaatacgtcaaataaatatattggggggtaaatttcctttggggcctgctgtcatgtgatgctataccagagtcaggttgggatttggtattttattgccacaaagggtctgtttggttagtcttaagatctctgttttaatgttaatgctggtcagttgtatttaaattccaaagggaagagggtaatatgaggcaccctgtaatctgaccataatatgaggcaccctgtcttcccatcatggactagtttttcaggttcctttgagatcccctgggccaagacaggggtccattcagccggttgggggatttagaatttatttttggtttgctgtatatatatgtatacacacactccccgcataaatgtaaaaattttaaactaccaattcctaggcaaagatgattctaacattctgttccttttgacaagtgtccaattagagaatgctgagaatgtcccctgcatatcggctctgttggagagcccctgatttttagcagacctgtttcattcaacatgggttacccaggaggtggtcttcataaaaatgtttcttggaggccaggcgccgtggcccacgcctgtaatcccagcactttgggaggccaaggtgggcagaccaccttaggccaggagttcgagaccagcctggccaacatagtgaaactccgtcgctactaaaaatacaaaaaattagctgggcgtggtggcgggcatctgtaatcccagctactctggaggcagaagcagggagaatttcttgagcccaggaggcagaggttgcagcgagccgagatcatgccactgcactccagactgggcaacagagcaagattccgtctcaaaaaaaaaaaattgtttcttggtctccatctttcaagaaaatacatctgtgctgtattttccccttccctcaggccatgatctctgctgttttccttactaactggcatgtcagtacaagagtgattgtgaagctgctccggaagggctttatgctaacctctgttgcttgatgacatgtcctcaggactctgatattaaaactcaatccttagataacaggtagctttatcatggaagtaggtagcaatttggaattagaccattcttagttatttttttcttaatgaattgatacatgcactttaaaaaatatttttgttattttgggaagaaaaactcagacttttaaaaaagtgtatattgtcccattataatatgtatatggaagagtgaaatctgaacgctgtcttatattaagcagtagaattaggtattatcataaaaagtcttaatctgtagggaatatgagtttatgtttatgagtcctgccagctcgggtgacgatataaggccatggacgcacaacctaagcggcggtgagtagaccacngtactggctccgtgagacgctcatggtccttctgtggtatacttg

SEQ ID NO: 293456 - DNA, 695 bp, Homo sapiens
  misc_feature (31)..(31): n is a, c, g, or t
  misc_feature (52)..(52): n is a, c, g, or t
ggtggcggccgcctcctagaacctaggggancccccccgggctgccaggaantcgggccacgagacctgttttatcttttttctttaaaatacaaaagtatcccaactaatcatttattatggtcagcttgttttacatgtcccctatcatgagaaatgctatcaacatctgtgatttctaagagtcttaccaaattgttactttaattcttgtgtcctgctgagtggtttttcttttaaaataccatttttatcaccctgtggcactgggtgtgttactgcgattacactgatgattctgagctgtgcttcttcaagtagctcagttcttgcgttttatattaggtaacagttttgtgatgcttttgtgcattctttgtcatctcttctgagttttcgaatctgtcataaataaactttttcactatgcacctggtaaaaaaagagttatattttaatgaacctgatttacattttaaattctttgtctttcatgtatcttccttaagaaaggtattctataagcccatatgaattatttcataatctattaagattgtgaaagttaagaagaactaaaaagaaaaaaaattgagaataagattaataatagatctttcatctgcatttaaattcatggcagagtatcatgacctgggaactgggaatggaaaaactgggtttatagtgatgat

SEQ ID NO: 293457 - DNA, 3841 bp, Homo sapiens
ataaatcaatacatgtaaggtatacactggtttggcctggaaaggcaggacatcttgaagatgggggtttccaggtcagaggtagatcaaagagttcctgactggcaattggttgagagagttaaactttacctgaaaagatgaagtcagcttaagttaaagtaagggaggcttggcttaagtcatgtagatgaagcctccaggtagcaggcttcagagagaacagatgatgaatttttctttttaggccttaaaaggtgtcagactctccagaaaagacctaataagagaaggagattctctacagaatgcagtttcccccacaagagacagctttgtagggccatttcaaaatacgtcaaataaatatattggggggtaaatttcctttggggcctgctgtcatgtgatgctataccagagtcaggttgggatttggtattttattgccacaaagggtctgtttggttagtcttaagatctctgttttaatgttaatgctggtcagttgtatttaaattccaaagggaagagggtaatatgaggcaccctgtaatctgaccataatatgaggcaccctgtcttcccatcatggactagtttttcaggttcctttgagatcccctgggccaagacaggggtccattcagccggttgggggatttagaatttatttttggtttgctgtatatatatgtatacacacactccccgcataaatgtaaaaattttaaactaccaattcctaggcaaagatgattctaacattctgttccttttgacaagtgtccaattagagaatgctgagaatgtcccctgcatatcggctctgttggagagcccctgatttttagcagacctgtttcattcaacatgggttacccaggaggtggtcttcataaaaatgtttcttggaggccaggcgccgtggcccacgcctgtaatcccagcactttgggaggccaaggtgggcagaccaccttaggccaggagttcgagaccagcctggccaacatagtgaaactccgtcgctactaaaaatacaaaaaattagctgggcgtggtggcgggcatctgtaatcccagctactctggaggcagaagcagggagaatttcttgagcccaggaggcagaggttgcagcgagccgagatcatgccactgcactccagactgggcaacagagcaagattccgtctcaaaaaaaaaaaattgtttcttggtctccatctttcaagaaaatacatctgtgctgtattttccccttccctcaggccatgatctctgctgttttccttactaactggcatgtcagtacaagagtgattgtgaagctgctccggaagggctttatgctaacctctgttgcttgatgacatgtcctcaggactctgatattaaaactcaatccttagataacaggtagctttatcatggaagtaggtagcaatttggaattagaccattcttagttatttttttcttaatgaattgatacatgcactttaaaaaatatttttgttattttgggaagaaaaactcagacttttaaaaaagtgtatattgtcccattataatatgtatatggaagagtgaaatctgaacgctgtcttatattaagcagtagaattaggtattatcataaaaagtcttaatctgtagggaatatgagtttatgtttatgagtcctgctcagtccctctttgagagaattagttgaaacccagactctaaagtctgcttttatatttgtttgttaagaccacttatctgcagaaggttgccttttaaccccagtggttctaaggtgtggaattgagtgaccctaatatttacataagagacttgttttagtggagcataagggaggggcataagttacaccgttttgtgctgcttgagaactgtcttttaaaattgatcacaacgagggaaaacaaaataaaattagggggcaaagggtaggagtatggggggaggggagagcaaacctatcgaatatatcttagaattttgctcagaaatcactgctgcctctcaagtgttgcattgtccctgcctaaaccaagaaggctaaacaaagcccctcctgtttgaattcttaaggtaagaaatttctaagctaagaaaacactattgcctaaaaccaatgatagtggagctcatttacaaataggcatgcctcacacacacagtccaaaggcaagacactggctttgaaattaggctcatgatgtgattcctattatatgtacctgatttttttaggccccaggtatgtggaccagagttaatgtcatgactcttcaaagatatgatgaaaagttgccctagaaatctagagatgcatgtttatttaattccatagtttaaaaaaaaatttaagcaggtagttgtggcttatctgggggcaaaataatatatgtgaaattgcttccagaggacaaagtatattttctaaagtcctgaaataggatcatgaacccttctgaagttttggtttgaaatattatagtatatgatattaccaaagagcccttaattcagagtttaaggggctctcttcctgaactctcttcatcactcagggttgaatgtgtaatgttccttgctattgattgttattgttgattcttaggatcaggccaagaatcatctggaaaacattatcttaattccgtctctcatatcctaaacagtacattttactaagaaattccatatgaaaaactccactcatgtctcctgagattatcctgtaagtgaagtagctttcatttaaccaagctaaattatttccatttagccatgttaaagagaagccaagtctagagaaagcaatcctgtaacccatgaatctggtgtacccattttcccttaacgtaacgggaagtgttttgaaattcccagaagagagctgttttgtaatcaaagtgatggattataagaaagccagactttggaaaaggataattggaataaagggaggtgcttgaagattttccaaactactttatgtcatttagcttctattttctgaagggctttctttggtgccatgtactcagatcagtcagttgactgaaagatgatcatgttttcttcgtaaagatttaagcaattggcaactacaaagacattattttcttactgttctatatcatgtactgttgctgacattacaaaaagggtctggaagggaaaccgtgtcactgttttatcttttttctttaaaatacaaaagtatcccaactaatcatttattatggtcagcttgttttacatgtcccctatcatgagaaatgctatcaacatctgtgatttctaagagtcttaccaaattgttactttaattcttgtgtcctgctgagtggtttttcttttaaaataccatttttatcaccctgtggcactgggtgtgttactgcgattacactgatgattctgagctgtgcttcttcaagtagctcagttcttgcgttttatattaggtaacagttttgtgatgcttttgtgcattctttgtcatctcttctgagttttcgaatctgtcataaataaactttttcactatgcacctggtaaaaaaagagttatattttaatgaacctgatttacattttaaattctttgtctttcatgtatcttccttaagaaaggtattctataagcccatatgaattatttcataatctattaagattgtgaaagttaagaagaactaaaaagaaaaaaaattgagaataagattaataatagatctttcatctgcatttaaattcatggcagagtatcatgacctgggaactgggaatggaaaaactgggtttatagtgatgat

SEQ ID NO: 293458 - DNA, 386 bp, Homo sapiens
caaaatgtattagagatcccattgcagttaaaggtcgatggattcaacaatgtgcagcagcccttcaaagaatacagactgtggtttcctcctgggatgacttcaccaggacccttggcaacagtgctggtggaaagtggaaagaaacagttacatgagccatagatggcagaaacagtagatagaactcacatttaggcagcaggtatatgaagccctgaaactccttgggatccctatgttcaaatgccaaagcaactgtgaccaacttttgccatatggcaaaaaaagacactctcttggcctcctttttccaccagcaatggaaaagaaaagaaataacaataataaagaaagaagaggttggtgttttcataattccaaaa

SEQ ID NO: 293459 - DNA, 1602 bp, Homo sapiens
ggcacgagggagagagaacggttccagtgaagattgacaaagtgcgcattttcttattaggactggctgataacgaagcagctattgtccaggctgaaagcgaagaaactaaggagcgcctgtttgaatcaatgctcagcgagtgtcgggacgccatccaggtggttcgggaggagctcaagccagatcagaaacagagagattatatccttgaaggagagccagggaaggtgtctaatcttcaatacttgcatagctacctgacttacatcaagctatcaacggcaatcaagcgtaatgagaacatggccaaaggtctgcagagggctctgctgcagcagcagccagaggatgacagcaagcgctcaccccggccccaggacctgatccgactctatgacatcatcttacagaatctggtggaattgctccagcttcctggtttagaggaagacaaagccttccagaaagagataggcctcaagactctggtgttcaaagcttacaggtgtttttttcattgctcagtcctatgtgctggtgaagaagtggagcgaagcccttgtcctgtatgacagagtcctgaaatatgcaaatgaagtaaattctgatgctggcgccttcaagaacagcctaaaggacctgcctgatgtgcaagagctcatcactcaagtgcggtcagagaagtgctccctgcaggccgcagccatccttgatgcaaacgacgctcatcaaacagagacctcctcctcccaagtcaaggacaataagcctctggttgaacggtttgagacattctgcctggacccttcccttgtcaccaagcaagccaaccttgtgcacttcccaccaggcttccagcccattccctgcaagcctttgttctttgacctggccctcaaccatgtggctttcccaccccttgaggacaagttggaacagaagaccaagagtggcctcactggatacatcaagggcatctttggattcaggagctaaccaggctcttcctcgggggcgggggagattctgactcttaatctgtattgtgagaaaatcccagcaagttccatgatattaaatccaggtctgcattggcccggggcaagagtttaacatcttcggccctgcattcctacatcttgtgtctgtacacgttcttaagcagcgtgtcaggagagcaccctgttgtcttctggtaaatgtgtgcagggtcatcctgtctcctgtacctcctgggaagggggccgctgctgtctggtgccctgtgagctgtgattgattgcctttggtcagtaatgcgttcaggagtccacaccaggcacagatggggccttgaaacgctttgtcatgcttcttcagtaccatggatttgaaatgaactcatccttgctgtgagcatccaggagcccttgagaagtttatctatgactatgaaactggcaacgtcaccccagaattacggtcagccttattccccttcacctcccagtgaacgctaagaagtttcagacaagcagagagctctatttttagaagaaatatgttacactcagaaatgatgaaaccaaatcttatattaaaaggcaaagatgacggaga

SEQ ID NO: 293460 - DNA, 383 bp, Homo sapiens
gccgcctactactactaaattcgcggccgcgtcgatgcaaacgacgctcatcaaacagagacctcctcctcccaagtcaaggacaataagcctctggttgaacggtttgagacattctgcctggacccttcccttgtcaccaagcaagccaaccttgtgcacttcccaccaggcttccagcccattccctgcaagcctttgttctttgacctggccctcaaccatgtggctttcccaccccttgaggacaagttggaacagaagaccaagagtggcctcactggatacatcaagggcatctttggattcaggagctaaccaggctcttcctcgggggcggggactggtcgacgcggccgcgaatttagtagtagtagtcgacc

SEQ ID NO: 293461 - DNA, 970 bp, Homo sapiens
ggcacgagggagagagaacggttccagtgaagattgacaaagtgcgcattttcttattaggactggctgataacgaagcagctattgtccaggctgaaagcgaagaaactaaggagcgcctgtttgaatcaatgctcagcgagtgtcgggacgccatccaggtggttcgggaggagctcaagccagatcagaaacagagagattatatccttgaaggagagccagggaaggtgtctaatcttcaatacttgcatagctacctgacttacatcaagctatcaacggcaatcaagcgtaatgagaacatggccaaaggtctgcagagggctctgctgcagcagcagccagaggatgacagcaagcgctcaccccggccccaggacctgatccgactctatgacatcatcttacagaatctggtggaattgctccagcttcctggtttagaggaagacaaagccttccagaaagagataggcctcaagactctggtgttcaaagcttacaggtgtttttttcattgctcagtcctatgtgctggtgaagaagtggagcgaagcccttgtcctgtatgacagagtcctgaaatatgcaaatgaagtaaattctgatgctggcgccttcaagaacagcctaaaggacctgcctgatgtgcaagagctcatcactcaagtgcggtcagagaagtgctccctgcaggccgcagccatccttgatgcaaacgacgctcatcaaacagagacctcctcctcccaagtcaaggacaataagcctctggttgaacggtttgagacattctgcctggacccttcccttgtcaccaagcaagccaaccttgtgcacttcccaccaggcttccagctgtaagctttgaacaccagagtcttgaggcctatctctttctggaaggctttgtcttcctctaaaccaggaagctggagcaattccaccagattctgtacaacagatg

SEQ ID NO: 293462 - DNA, 388 bp, Homo sapiens
ctcgggagtacacgttttctgaatcttacaggacctgcctgatgtgcaagagctcatcactcaagtgcggtcagagaagtgctccctgcaggccgcagccatccttgatgcaaacgacgctcatcaaacagagacctcctcctcccaagtcaaggacaataagcctctggttgaacggtttgagacattctgcctggacccttcccttgtcaccaagcgccacactgcttttatgagctgtaacactcaccacgaagatctgcagcttcactcctgaagccagcgagaccacaagcccaccgggaggaacgaacagctccagacgcgctgcttgaggctctggactgcatcctaccaccaactcgtccaactgacaagcccccacgcg

SEQ ID NO: 293463 - DNA, 823 bp, Homo sapiens
gtatcaacgcagagtggccattacggccggggcccattccctgcaagcctttgttctttgacctggccctcaaccatgtggctttcccaccccttgaggacaagttggaacagaagaccaagagtggcctcactggatacatcaagggcatctttggattcaggagctaaccaggctcttcctcgggggcgggggagattctgactcttaatctgtattgtgagaaaatcccagcaagttccatgatattaaatccaggtctgcattggcccggggcaagagtttaaaaaaaaaaaaaaaaaaaaaaaaaaaaaaaaaaaaaaaaaaaaaaaaaaaagggggggggcgggcacgcaaaaaaatacaccccccgcgaggggggcaaccaaccggtcaacgacccgccacacgagcaatgtttatatggtagaaaaaggggagccccccaagaagaggggagctgactataattaacaagctcgagacgaacggcaggagcagcgcggcgtataaacaagacacgcggcgggcgcgcggggggcaaacccatctgggaccagcaccggggagacactctcgtgggagaaaagaaccccaccagacctctcgggggggcgggggcacaattcaagtgggcagcaaccccccacccgcccgagaagaagattatcagaagcccccagggaggcgaacaaataactaacaactggcaacggccgctcataggggggggtcgaaccacaaccgcgaaaatgatcacgcgcgacgaaaaaattggggacccgacgagaatcagatactcggaaaaataattttcccggag

SEQ ID NO: 293464 - DNA, 1920 bp, Homo sapiens
ggcacgagggagagagaacggttccagtgaagattgacaaagtgcgcattttcttattaggactggctgataacgaagcagctattgtccaggctgaaagcgaagaaactaaggagcgcctgtttgaatcaatgctcagcgagtgtcgggacgccatccaggtggttcgggaggagctcaagccagatcagaaacagagagattatatccttgaaggagagccagggaaggtgtctaatcttcaatacttgcatagctacctgacttacatcaagctatcaacggcaatcaagcgtaatgagaacatggccaaaggtctgcagagggctctgctgcagcagcagccagaggatgacagcaagcgctcaccccggccccaggacctgatccgactctatgacatcatcttacagaatctggtggaattgctccagcttcctggtttagaggaagacaaagccttccagaaagagataggcctcaagactctggtgttcaaagcttacaggtgtttttttcattgctcagtcctatgtgctggtgaagaagtggagcgaagcccttgtcctgtatgacagagtcctgaaatatgcaaatgaagtaaattctgatgctggcgccttcaagaacagcctaaaggacctgcctgatgtgcaagagctcatcactcaagtgcggtcagagaagtgctccctgcaggccgcagccatccttgatgcaaacgacgctcatcaaacagagacctcctcctcccaagtcaaggacaataagcctctggttgaacggtttgagacattctgcctggacccttcccttgtcaccaagcaagccaaccttgtgcacttcccaccaggcttccagcccattccctgcaagcctttgttctttgacctggccctcaaccatgtggctttcccaccccttgaggacaagttggaacagaagaccaagagtggcctcactggatacatcaagggcatctttggattcaggagctaaccaggctcttcctcgggggcgggggagattctgactcttaatctgtattgtgagaaaatcccagcaagttccatgatattaaatccaggtctgcattggcccggggcaagagtttaacatcttcggccctgcattcctacatcttgtgtctgtacacgttcttaagcagcgtgtcaggagagcaccctgttgtcttctggtaaatgtgtgcagggtcatcctgtctcctgtacctcctgggaagggggccgctgctgtctggtgccctgtgagctgtgattgattgcctttggtcagtaatgcgttcaggagtccacaccaggcacagatggggccttgaaacgctttgtcatgcttcttcagtaccatggatttgaaatgaactcatccttgctgtgagcatccaggagcccttgagaagtttatctatgactatgaaactggcaacgtcaccccagaattacggtcagccttattccccttcacctcccagtgaacgctaagaagtttcagacaagcagagagctctatttttagaagaaatatgttacactcagaaatgatgaaaccaaatcttatattaaaaggcaaagatgacggagactgtgcccatttcttatatgccctccctcatgtccagtccccgttctctcctcgggagcctagttgcgtgaagccggtgaggtcaagtgtaacctgacttaccggcaactaggtgaggctgatgccagatacacatgttagaggcactatttttcaggacttcccaatgtgtaatttttagatgccattatattttaatccccttcgttaccccccgtttttccttagtcatcccttttcacttctattataacatcaataatagaagtcacaaaaacaatgtaagaaagcaaggaataaaagtgatttaaacatgta

SEQ ID NO: 293465 - DNA, 1702 bp, Homo sapiens
ggcacgagggagagagaacggttccagtgaagattgacaaagtgcgcattttcttattaggactggctgataacgaagcagctattgtccaggctgaaagcgaagaaactaaggagcgcctgtttgaatcaatgctcagcgagtgtcgggacgccatccaggtggttcgggaggagctcaagccagatcagaaacagagagattatatccttgaaggagagccagggaaggtgtctaatcttcaatacttgcatagctacctgacttacatcaagctatcaacggcaatcaagcgtaatgagaacatggccaaaggtctgcagagggctctgctgcagcagcagccagaggatgacagcaagcgctcaccccggccccaggacctgatccgactctatgacatcatcttacagaatctggtggaattgctccagcttcctggtttagaggaagacaaagccttccagaaagagataggcctcaagactctggtgttcaaagcttacaggtgtttttttcattgctcagtcctatgtgctggtgaagaagtggagcgaagcccttgtcctgtatgacagagtcctgaaatatgcaaatgaagtaaattctgatgctggcgccttcaagaacagcctaaaggacctgcctgatgtgcaagagctcatcactcaagtgcggtcagagaagtgctccctgcaggccgcagccatccttgatgcaaacgacgctcatcaaacagagacctcctcctcccaagtcaaggacaataagcctctggttgaacggtttgagacattctgcctggacccttcccttgtcaccaagcaagccaaccttgtgcacttcccaccaggcttccagcccattccctgcaagcctttgttctttgacctggccctcaaccatgtggctttcccaccccttgaggacaagttggaacagaagaccaagagtggcctcactggatacatcaagggcatctttggattcaggagctaaccaggctcttcctcgggggcgggggagattctgactcttaatctgtattgtgagaaaatcccagcaagttccatgatattaaatccaggtctgcattggcccggggcaagagtttaacatcttcggccctgcattcctacatcttgtgtctgtacacgttcttaagcagcgtgtcaggagagcaccctgttgtcttctggtaaatgtgtgcagggtcatcctgtctcctgtacctcctgggaagggggccgctgctgtctggtgccctgtgagctgtgattgattgcctttggtcagtaatgcgttcaggagtccacaccaggcacagatggggccttgaaacgctttgtcatgcttcttcagtaccatggatttgaaatgaactcatccttgctgtgagcatccaggagcccttgagaagtttatctatgactatgaaactggcaacgtcaccccagaattacggtcagccttattccccttcacctcccagtgaacgctaagaagtttcagacaagcagagagctctatttttagaagaaatatgttacactcagaaatgatgaaaccaaatcttatattaaaaggcaaagatgacggagaaaaaaaaaaatccgggcttattcggggggaaaaggttgagggcaggctgtgtcgaccgttctggaaaggaaatcggcccaaggggataacaaccgccggc

SEQ ID NO: 293466 - DNA, 2456 bp, Homo sapiens
ggcacgagggagagagaacggttccagtgaagattgacaaagtgcgcattttcttattaggactggctgataacgaagcagctattgtccaggctgaaagcgaagaaactaaggagcgcctgtttgaatcaatgctcagcgagtgtcgggacgccatccaggtggttcgggaggagctcaagccagatcagaaacagagagattatatccttgaaggagagccagggaaggtgtctaatcttcaatacttgcatagctacctgacttacatcaagctatcaacggcaatcaagcgtaatgagaacatggccaaaggtctgcagagggctctgctgcagcagcagccagaggatgacagcaagcgctcaccccggccccaggacctgatccgactctatgacatcatcttacagaatctggtggaattgctccagcttcctggtttagaggaagacaaagccttccagaaagagataggcctcaagactctggtgttcaaagcttacaggtgtttttttcattgctcagtcctatgtgctggtgaagaagtggagcgaagcccttgtcctgtatgacagagtcctgaaatatgcaaatgaagtaaattctgatgctggcgccttcaagaacagcctaaaggacctgcctgatgtgcaagagctcatcactcaagtgcggtcagagaagtgctccctgcaggccgcagccatccttgatgcaaacgacgctcatcaaacagagacctcctcctcccaagtcaaggacaataagcctctggttgaacggtttgagacattctgcctggacccttcccttgtcaccaagcaagccaaccttgtgcacttcccaccaggcttccagcccattccctgcaagcctttgttctttgacctggccctcaaccatgtggctttcccaccccttgaggacaagttggaacagaagaccaagagtggcctcactggatacatcaagggcatctttggattcaggagctaaccaggctcttcctcgggggcgggggagattctgactcttaatctgtattgtgagaaaatcccagcaagttccatgatattaaatccaggtctgcattggcccggggcaagagtttaacatcttcggccctgcattcctacatcttgtgtctgtacacgttcttaagcagcgtgtcaggagagcaccctgttgtcttctggtaaatgtgtgcagggtcatcctgtctcctgtacctcctgggaagggggccgctgctgtctggtgccctgtgagctgtgattgattgcctttggtcagtaatgcgttcaggagtccacaccaggcacagatggggccttgaaacgctttgtcatgcttcttcagtaccatggatttgaaatgaactcatccttgctgtgagcatccaggagcccttgagaagtttatctatgactatgaaactggcaacgtcaccccagaattacggtcagccttattccccttcacctcccagtgaacgctaagaagtttcagacaagcagagagctctatttttagaagaaatatgttacactcagaaatgatgaaaccaaatcttatattaaaaggcaaagatgacggagactgtgcccatttcttatatgccctccctcatgtccagtccccgttctctcctcgggagcctagttgcgtgaagccggtgaggtcaagtgtaacctgacttaccggcaactaggtgaggctgatgccagatacacatgttagaggcactatttttcaggacttcccaatgtgtaatttttagatgccattatattttaatccccttcgttaccccccgtttttccttagtcatcccttttcacttctattataacatcaataatagaagtcacaaaaacaatgtaagaaagcaaggaataaaagtgatttaaacatgtaaaaaaaaaaaaaaaaaaaaaaaaaaaaaaaaaaaaaaaaaaaaaaaaaaagggggggggcgggcacgcaaaaaaatacaccccccgcgaggggggcaaccaaccggtcaacgacccgccacacgagcaatgtttatatggtagaaaaaggggagccccccaagaagaggggagctgactataattaacaagctcgagacgaacggcaggagcagcgcggcgtataaacaagacacgcggcgggcgcgcggggggcaaacccatctgggaccagcaccggggagacactctcgtgggagaaaagaaccccaccagacctctcgggggggcgggggcacaattcaagtgggcagcaaccccccacccgcccgagaagaagattatcagaagcccccagggaggcgaacaaataactaacaactggcaacggccgctcataggggggggtcgaaccacaaccgcgaaaatgatcacgcgcgacgaaaaaattggggacccgacgagaatcagatactcggaaaaataattttcccggag

SEQ ID NO: 293467 - DNA, 638 bp, Homo sapiens
ttacgatatttcggagcctcgggtaccccgataggagaccacaagatggggccttgaaacgctttgtcatgcttcttcagtaccatggatttgaaatgaactcatccttgctgtgagcatccaggagcccttgagaagtttatctatgactatgaaactggcaacgtcaccccagaattacggtcagccttattccccttcacctcccagtgaacgctaagaagtttcagacaagcagagagctctatttttagaagaaatatgttacactcagaaatgatgaaaccaaatcttatattaaaaggcaaagatgacggagactgtgcccatttcttatatgccctccctcatgtccagtccccgttctctcctcgggagcctagttgcgtgaagccggtgaggtcaagtgtaacctgacttaccggcaactaggtgaggctgatgccagatacacatgttagaggcactatttttcaggacttcccaatgtgtaatttttagatgccattatattttaatccccttcgttaccccccgtttttccttagtcatcccttttcacttctattataacatcaataatagaagtcacaaaaacaatgtaagaaagcaaggaataaaagtgatttaaacatgta

SEQ ID NO: 293468 - DNA, 1535 bp, Homo sapiens
ggcacgagggagagagaacggttccagtgaagattgacaaagtgcgcattttcttattaggactggctgataacgaagcagctattgtccaggctgaaagcgaagaaactaaggagcgcctgtttgaatcaatgctcagcgagtgtcgggacgccatccaggtggttcgggaggagctcaagccagatcagaaacagagagattatatccttgaaggagagccagggaaggtgtctaatcttcaatacttgcatagctacctgacttacatcaagctatcaacggcaatcaagcgtaatgagaacatggccaaaggtctgcagagggctctgctgcagcagcagccagaggatgacagcaagcgctcaccccggccccaggacctgatccgactctatgacatcatcttacagaatctggtggaattgctccagcttcctggtttagaggaagacaaagccttccagaaagagataggcctcaagactctggtgttcaaagcttacaggtgtttttttcattgctcagtcctatgtgctggtgaagaagtggagcgaagcccttgtcctgtatgacagagtcctgaaatatgcaaatgaagtaaattctgatgctggcgccttcaagaacagcctaaaggacctgcctgatgtgcaagagctcatcactcaagtgcggtcagagaagtgctccctgcaggccgcagccatccttgatgcaaacgacgctcatcaaacagagacctcctcctcccaagtcaaggacaataagcctctggttgaacggtttgagacattctgcctggacccttcccttgtcaccaagcaagccaaccttgtgcacttcccaccaggcttccagcccattccctgcaagcctttgttctttgacctggccctcaaccatgtggctttcccaccccttgaggacaagttggaacagaagaccaagagtggcctcactggatacatcaagggcatctttggattcaggagctaaccaggctcttcctcgggggcgggggagattctgactcttaatctgtattgtgagaaaatcccagcaagttccatgatattaaatccaggtctgcattggcccggggcaagagtttaacatcttcggccctgcattcctacatcttgtgtctgtacacgttcttaagcagcgtgtcaggagagcaccctgttgtcttctggtaaatgtgtgcagggtcatcctgtctcctgtacctcctgggaagggggccgctgctgtctggtgccctgtgagctgtgattgattgcctttggtcataccatggatttgaaatgaactcatccttgctgtgagcatccaggagcccttgagaagtttatctatgactatgaaactggcaacgtcaccccagaattacggtcagccttattccccttcacctcccagtgaacgctaagaagtttcagacaagcagagagctctatttttagaagaaatatgttacactcagaaatgatgaaaccaaatcttatattaaaaggcaaagatgacggaga

SEQ ID NO: 293469 - DNA, 3357 bp, Homo sapiens
cgaccacgcagccacgacccggccggttattcacccgccaggccctgggaatacaaggccggcttcaaaaaaaccagggcacccgcgacctcctcgcagacgcgcgcccccatacccgggcctcaggcagccacgaggtagacgggctcaggctcgggggtgcggcaagcggcacccgggcgcggcggggcgcagctgtggggaccgcgcaggcgccacgtcagaccccgcccaccccgccgcgcaggcgccgtgtagcgccccgcggatcacgcaggcgcggctttcaggccaacatggccgtgctgctgctgctgctccgtgccctccgccggggtccaggcccgggtcctcggccgctgtggggcccaggcccggcctggagtccagggttccccgccaggcccgggagggggcggccgtacatggccagcaggcctccgggggacctcgccgaggctggaggccgagctctgcagagcttacaattgagactgctaacccctacctttgaagggatcaacggattgttgttgaaacaacatttagttcagaatccagtcagactctggcaacttttaggtggtactttctattttaacacctcaaggttgaagcagaagaataaggagaaggataagtcgaaggggaaggcgcctgaagaggacgaagaggagaggagacgccgtgagcgggacgaccagatgtaccgagagcggctgcgcaccttgctggtcatcgcggttgtcatgagcctcctgaatgctctcagcaccagcggaggcagcatttcctggaacgactttgtccacgagatgctggccaagggcgaggtgcagcgcgtccaggtggtgcctgagagcgacgtggtggaagtctacctgcaccctggagccgtggtgtttgggcggcctcggctagccttgatgtaccgaatgcaggttgcaaatattgacaagtttgaagagaagcttcgagcagctgaagatgagctgaatatcgaggccaaggacaggatcccagtttcctacaagcgaacaggattctttggaaatgccctgtactctgtggggatgacggcagtgggcctggccatcctgtggtatgttttccgtctggccgggatgactggaagggaaggtggattcagtgcttttaatcagcttaaaatggctcgtttcaccattgtggatgggaagatggggaaaggagtcagcttcaaagacgtggcaggaatgcacgaagccaaactggaagtccgcgagtttgtggattatctgaagagcccagaacgcttcctccagcttggcgccaaggtcccaaagggcgcactgctgctcggcccccccggctgtgggaagacgctgctggccaaggcggtggccacggaggctcaggtgcccttcctggcgatggccggcccagagttcgtggaggtcattggaggcctcggcgctgcccgtgtgcggagcctctttaaggaagcccgagcccgggccccctgcatcgtctacatcgatgagatcgacgcggtgggcaagaagcgctccaccaccatgtccggcttctccaacacggaggaggagcagacgctcaaccagcttctggtagaaatggatggaatgggtaccacagaccatgtcatcgtcctggcgtccacgaaccgagctgacattttggacggtgctctgatgaggccaggccgactggaccggcacgtcttcattgatctccccacgctgcaggagaggcgggagatttttgagcagcacctgaagagcctgaagctgacccagtccagcaccttttactcccagcgtctggcagagctgacaccaggattcagtggggctgacatcgccaacatctgcaatgaggctgcgctgcacgcggcgcgggagggacacacttccgtgcacactctcaacttcgagtacgccgtggagcgcgtcctcgcagggactgccaaaaagagcaagatcctgtccaaggaagaacagaaagtggttgcgtttcatgagtcgggccacgccttggtgggctggatgctggagcacacggaggccgtgatgaaggtctccataacccctcggacaaacgccgccctgggctttgctcagatgctccccagagaccagcacctcttcaccaaggagcagctgtttgagcggatgtgcatggccctgggaggacgggcctcggaagcactgtccttcaacgaggtcacttctggggcacaggacgacctgaggaaggtcacccgcatcgcctactccatggtgaagcagtttgggatggcacctggcatcgggcccatctccttccctgaggcgcaggagggcctcatgggcatcgggcggcgccccttcagccaaggcctgcagcagatgatggaccatgaagcaagactgctggtggccaaggcctacagacacaccgagaaggtgctgcaggacaacctggacaagttgcaggcgctggcaaacgcccttctggaaaaggaagtgataaactatgaggacattgaggctctcattggcccgccgccccatgggccgaagaaaatgatcgcaccgcagaggtggatcgacgcccagagggagaaacaggacttgggcgaggaggagaccgaagagacccagcagcctccacttggaggcgaagagccgacttggcccaagtagttgggaggtgttggctgcacgtgcgggtggtccgggaagtgagggctcactcagccaccctgagttgcttttcagctgaggtttgcacttcctctcgcggccctcagtagtccctgcacagtgacttctgagatctgttgattgatgacccttttcatgattttaagtttctctgcagaaactactgacggagtcctgtgtttgtgagtcgtttcccctatggggaaggttatcagtgcttcccgagtgagcatggaacacttcgagttcccagggttatagacagtcgttcccagtgtggctgaggccacccagaggcagcagagcattcagactccaaacagacccctgttcatgccgacgcttgcacgaccgccccagttcctgtggctccctcggaatgctaaggggatcggacatgaaaggaccctgtgagccgattgtcctatctccagcggccctgtcatccagctcactcatcaatggggccagtcaggcccaggcactgggctccggaggactcaccactgccccctgctgccatgtggactggtgcaagttgaggacttcttgctggtctagtcacgcatgcagtgttggggatgccttggtttttactgctctgagaattgttgagatactttactaataaactgtgtagttggaaaatcta

SEQ ID NO: 293470 - DNA, 1093 bp, Homo sapiens
ctgactcactttaaatcctccgatgacaaacgtcaagcctgaaccccaggcctagggccagacgttgaagataaaatgtttccaagtcacagcctaaagctgggtgttagctaaaatgttacaaagtcacaataatgatgacagggcggtggggggtggggggtggctgttaggaccggctcccagatggcaccgtgaggcagggagaggctccaggatgctgtaggagctcccggagggccttggacagttctgctgtttgcacttgtcaaaataggcaaattcctgttcctcctggtgatgctggctgggagcgatgggggatcgcggctcctagttcagaaggaccgggctgttcctttctctctgggccttaggggggtctctctccctcctgtgtcctgaaggggaacctgcaggggaaatctgttgtgtcaggacccctaccctcagagccactgtctgctctgtcccctcaggaatgggtaccacagaccatgtcatcgtcctggcgtccacgaaccgagctgacattttggacggtgctctgatgaggccaggccgactggaccggcacgtcttcattgatctccccacgctgcaggagaggcgggagatttttgagcagcacctgaagagcctgaagctgacccagtccagcaccttttactcccagcgtctggcagagctgacaccaggattcagtggggctgacatcgccaacatctgcaatgaggctgcgctgcacgcggcgcgggagggacacacttccgtgcacactctcaacttcgagtacgccgtggagcgcgtcctcgcaggtacagggggcgcgccctgggtgaaggccctccttagcagggcttgaaccccagaaatacccaggcaggtattgagaggtgaggtggatggaaccatcacacaggaaggaacacacgttgcgtttcagttctgcgtaactcatgtctttatgataccttgtacttttccttagtttaaaatatcacagatttacctaagagtagacgctcgtccaacagaaataaaaaatgccttgccaaagaaagtgaaaaaataaaaataaaaaatgcccccc
